United States Patent Application Publication US 2007/0214517 A1 - sequence listing, part 29

SEQ ID NO: 34850 - DNA, 1389 bp, Arabidopsis thaliana
  misc_feature (1)..(1389): Ceres Seq. ID no. 12334207
  misc_feature: MA Experiment ID: 108462 Result: Up-regulated in Transcription
  misc_feature: MA Experiment 108462 PARAMETER Experiment Name: At_Germinating_Seeds_cDNA_P Parameter: Age (day) Value: 2 vs. 0
  misc_feature: MA Experiment 108462 PARAMETER Experiment Name: At_Germinating_Seeds_cDNA_P Parameter: Tissue Value: Germinating Seeds
  misc_feature: MA Experiment ID: 108463 Result: Up-regulated in Transcription
  misc_feature: MA Experiment 108463 PARAMETER Experiment Name: At_Germinating_Seeds_cDNA_P Parameter: Age (day) Value: 3 vs. 0
  misc_feature: MA Experiment 108463 PARAMETER Experiment Name: At_Germinating_Seeds_cDNA_P Parameter: Tissue Value: Germinating Seeds
  misc_feature: MA Experiment ID: 108464 Result: Up-regulated in Transcription
  misc_feature: MA Experiment 108464 PARAMETER Experiment Name: At_Germinating_Seeds_cDNA_P Parameter: Age (day) Value: 4 vs. 0
  misc_feature: MA Experiment 108464 PARAMETER Experiment Name: At_Germinating_Seeds_cDNA_P Parameter: Tissue Value: Germinating Seeds
  misc_feature: MA Experiment ID: 108579 Result: Up-regulated in Transcription
  misc_feature: MA Experiment 108579 PARAMETER Experiment Name: At_4deg_Cold_cDNA_P Parameter: Temperature (deg C) Value: 4 vs. 22
  misc_feature: MA Experiment 108579 PARAMETER Experiment Name: At_4deg_Cold_cDNA_P Parameter: Timepoint (hr) Value: 6
  misc_feature: MA Experiment 108579 PARAMETER Experiment Name: At_4deg_Cold_cDNA_P Parameter: Tissue Value: Aerial
  misc_feature: MA Experiment ID: 108595 Result: Up-regulated in Transcription
  misc_feature: MA Experiment 108595 PARAMETER Experiment Name: At_Ler-pi_Ovule_cDNA_P Parameter: Plant Line Value: null
  misc_feature: MA Experiment ID: 20000180 Result: Up-regulated in Transcription
  misc_feature: MA Experiment 20000180 PARAMETER Experiment Name: At_Germinating_Seeds_P Parameter: Age (hr) Value: 24 vs. 0
  misc_feature: MA Experiment 20000180 PARAMETER Experiment Name: At_Germinating_Seeds_P Parameter: Tissue Value: Germinating Seeds
  misc_feature: MA Experiment ID: 20000185 Result: Down-regulated in Transcription
  misc_feature: MA Experiment 20000185 PARAMETER Experiment Name: At_Roots__P Parameter: Age (day) Value: 7 vs. 21
  misc_feature: MA Experiment 20000185 PARAMETER Experiment Name: At_Roots__P Parameter: Organism Value: A. thaliana
  misc_feature: MA Experiment 20000185 PARAMETER Experiment Name: At_Roots__P Parameter: Tissue Value: Roots vs. Whole Plant
  misc_feature: MA Experiment ID: 20000438 Result: Down-regulated in Transcription
  misc_feature: MA Experiment 20000438 PARAMETER Experiment Name: At_Shoots__P Parameter: Age (day) Value: 14
  misc_feature: MA Experiment 20000438 PARAMETER Experiment Name: At_Shoots__P Parameter: Tissue Value: Shoots vs. Whole Plant
  misc_feature: MA Experiment ID: 20000495 Result: Up-regulated in Transcription
  misc_feature: MA Experiment 20000495 PARAMETER Experiment Name: At_Guard_Cells_P Parameter: Harvest Date Value: 8/2/2002
  misc_feature: MA Experiment 20000495 PARAMETER Experiment Name: At_Guard_Cells_P Parameter: Organism Value: A. thaliana
  misc_feature: MA Experiment 20000495 PARAMETER Experiment Name: At_Guard_Cells_P Parameter: Tissue Value: Guard Cells vs. Leaves
  misc_feature: MA Experiment ID: 20000496 Result: Up-regulated in Transcription
  misc_feature: MA Experiment 20000496 PARAMETER Experiment Name: At_Guard_Cells_P Parameter: Harvest Date Value: 7/19/2002
  misc_feature: MA Experiment 20000496 PARAMETER Experiment Name: At_Guard_Cells_P Parameter: Organism Value: Canola
  misc_feature: MA Experiment 20000496 PARAMETER Experiment Name: At_Guard_Cells_P Parameter: Tissue Value: Guard Cells vs. Leaves
  misc_feature: MA Experiment ID: 20000527 Result: Down-regulated in Transcription
  misc_feature: MA Experiment 20000527 PARAMETER Experiment Name: At_10percent_PEG_P Parameter: Age (day) Value: 20
  misc_feature: MA Experiment 20000527 PARAMETER Experiment Name: At_10percent_PEG_P Parameter: Organism Value: A. thaliana
  misc_feature: MA Experiment 20000527 PARAMETER Experiment Name: At_10percent_PEG_P Parameter: Plant Line Value: WS
  misc_feature: MA Experiment 20000527 PARAMETER Experiment Name: At_10percent_PEG_P Parameter: Timepoint (day) Value: 20
  misc_feature: MA Experiment 20000527 PARAMETER Experiment Name: At_10percent_PEG_P Parameter: Tissue Value: Whole Plant
  misc_feature: MA Experiment 20000527 PARAMETER Experiment Name: At_10percent_PEG_P Parameter: Treatment Value: 10percent PEG vs. No Treatment
  misc_feature: MA Experiment ID: 20001558 Result: Down-regulated in Transcription
  misc_feature: MA Experiment 20001558 PARAMETER Experiment Name: At_Drought_Soil_Dry_P Parameter: Age (day) Value: 27
  misc_feature: MA Experiment 20001558 PARAMETER Experiment Name: At_Drought_Soil_Dry_P Parameter: Organism Value: A. thaliana
  misc_feature: MA Experiment 20001558 PARAMETER Experiment Name: At_Drought_Soil_Dry_P Parameter: Plant Line Value: WS
  misc_feature: MA Experiment 20001558 PARAMETER Experiment Name: At_Drought_Soil_Dry_P Parameter: Post Timepoint (hr) Value: 6
  misc_feature: MA Experiment 20001558 PARAMETER Experiment Name: At_Drought_Soil_Dry_P Parameter: Post-Treatment Value: Re-Water vs. No Drought
  misc_feature: MA Experiment 20001558 PARAMETER Experiment Name: At_Drought_Soil_Dry_P Parameter: Timepoint (day) Value: 13
  misc_feature: MA Experiment 20001558 PARAMETER Experiment Name: At_Drought_Soil_Dry_P Parameter: Treatment Value: Drought vs. No Drought
  misc_feature: MA Experiment ID: 20001905 Result: Down-regulated in Transcription
  misc_feature: MA Experiment 20001905 PARAMETER Experiment Name: At_Drought_Reproduction_P Parameter: Age (day) Value: 40
  misc_feature: MA Experiment 20001905 PARAMETER Experiment Name: At_Drought_Reproduction_P Parameter: Organism Value: A. thaliana
  misc_feature: MA Experiment 20001905 PARAMETER Experiment Name: At_Drought_Reproduction_P Parameter: Plant Line Value: WS
  misc_feature: MA Experiment 20001905 PARAMETER Experiment Name: At_Drought_Reproduction_P Parameter: Timepoint (day) Value: 10
  misc_feature: MA Experiment 20001905 PARAMETER Experiment Name: At_Drought_Reproduction_P Parameter: Tissue Value: Rosettes
  misc_feature: MA Experiment 20001905 PARAMETER Experiment Name: At_Drought_Reproduction_P Parameter: Treatment Value: Drought vs. No Drought
  misc_feature: MA Experiment ID: 20001906 Result: Down-regulated in Transcription
  misc_feature: MA Experiment 20001906 PARAMETER Experiment Name: At_Drought_Reproduction_P Parameter: Age (day) Value: 35
  misc_feature: MA Experiment 20001906 PARAMETER Experiment Name: At_Drought_Reproduction_P Parameter: Organism Value: A. thaliana
  misc_feature: MA Experiment 20001906 PARAMETER Experiment Name: At_Drought_Reproduction_P Parameter: Plant Line Value: WS
  misc_feature: MA Experiment 20001906 PARAMETER Experiment Name: At_Drought_Reproduction_P Parameter: Timepoint (day) Value: 5
  misc_feature: MA Experiment 20001906 PARAMETER Experiment Name: At_Drought_Reproduction_P Parameter: Tissue Value: Siliques
  misc_feature: MA Experiment 20001906 PARAMETER Experiment Name: At_Drought_Reproduction_P Parameter: Treatment Value: Drought vs. No Drought
atcattcattcacacaaacacttcaaacaatgacttgccttcttcttcttctcctcctcctcctcttctcctctgccgactctctgacgtcaccatccgacgtgtcagctttaaaagctttcaaagccaccgtgaaacccaactcaatcccaccgtggtcttgtctcgctagctgggactttactgtctccgacccatgtgcttcaccacgtcgaacacatttcacttgcggcatcacttgctcgtctgactccacacgtgtgacccaactcactctcgacccagccgggtacacgggtcgtctcacgcctctcatctccggcctcacagagcttctcacgctcgatctcgccgagaacaacttctacggcctaatcccatcctccatctcctccctcaccagcctcaagaccttgatcctccgatccaactcgttttccgggtcattacccgactcagtaactcgactcaactcactcgaatccattgacatatctcacaactctctcaccgggccgcttccaaaaacaatgaactcgctttcaaatctccgacaactcgatcttagctacaacaagctcaccggagccatcccaaagcttccgaaaaacctcatcgatttagctttaaaggcgaatactttatcaggacccatctcaaaagactcattcaccgagtcaactcagctcgaaatcgtcgaaatcgctgagaactcattcaccggaacactcggagcttggttcttcctacttgaatcaatccaacaagtcgatctagcgaacaacactctcacaggcatcgaagtcctccctccaaacctcgccggagaaaacaacctcgtagctgtagagctaggattcaaccaaatcagaggaaacgctccggcgagtttcgcggcgtatccaagactttcttcactatctatgagatacaacgtgcttcacggtgttataccgtcggaatacgaacggagcaagacattaagacggctttacttagacgggaacttcttgacgggaaaacctccggcgagatttgtgagaacagacgcagaagtaatgggaagtttggggaataattgtctacagggatgtccagggaaagctaagatgtgtgctccatcgcagaaaccattttacatttgtaagcaagcttatggtggaaaaccaaagtcttagttttgtcggtgtcggtgactttttgtgtcagtgattttgtaaaataatgcttttagtcatgagtttactctatagtcttggagaaatactaatatctatattcatcgagatcttcgtatgtacacaaataaatttacaaaaattggaacggaacttatagtatttattttgttgtattgtgtgtttttatatatttattgagatttaaatt

SEQ ID NO: 34851 - protein, 391 aa, Arabidopsis thaliana
  peptide (1)..(391): Ceres Seq. ID no. 12334208
  misc_feature (14)..(363): Homolog of NCBI NO: 22655012 NR Description: At1g73080/F3N23_28 [Arabidopsis thaliana]
  misc_feature (9)..(318): Homolog of NCBI NO: 27497120 NR Description: floral organ regulator 2 [Oryza sativa (japonica
  misc_feature (14)..(363): Homolog of NCBI NO: 26449457 NR Description: unknown protein [Arabidopsis thaliana]
  misc_feature (14)..(363): Homolog of NCBI NO: 15219370 NR Description: leucine-rich repeat transmembrane protein kinase,
  misc_feature (13)..(391): Homolog of NCBI NO: 15235318 NR Description: leucine-rich repeat transmembrane protein kinase,
  misc_feature (7)..(363): Homolog of NCBI NO: 15219369 NR Description: leucine rich repeat protein family; protein id:
  misc_feature (85)..(387): Homolog of NCBI NO: 15231699 NR Description: leucine rich repeat protein family; protein id:
  misc_feature (14)..(391): Homolog of NCBI NO: 15239346 NR Description: leucine rich repeat protein family
  misc_feature (10)..(391): Homolog of NCBI NO: 21554189 NR Description: putative leucine-rich repeat disease resistance
  misc_feature (10)..(391): Homolog of NCBI NO: 15226087 NR Description: leucine rich repeat protein family
HSFTQTLQTMTCLLLLLLLLLFSSADSLTSPSDVSALKAFKATVKPNSIPPWSCLASWDFTVSDPCASPRRTHFTCGITCSSDSTRVTQLTLDPAGYTGRLTPLISGLTELLTLDLAENNFYGLIPSSISSLTSLKTLILRSNSFSGSLPDSVTRLNSLESIDISHNSLTGPLPKTMNSLSNLRQLDLSYNKLTGAIPKLPKNLIDLALKANTLSGPISKDSFTESTQLEIVEIAENSFTGTLGAWFFLLESIQQVDLANNTLTGIEVLPPNLAGENNLVAVELGFNQIRGNAPASFAAYPRLSSLSMRYNVLHGVIPSEYERSKTLRRLYLDGNFLTGKPPARFVRTDAEVMGSLGNNCLQGCPGKAKMCAPSQKPFYICKQAYGGKPKS

SEQ ID NO: 34852 - protein, 382 aa, Arabidopsis thaliana
  peptide (1)..(382): Ceres Seq. ID no. 12334209
  misc_feature (5)..(354): Homolog of NCBI NO: 22655012 NR Description: At1g73080/F3N23_28 [Arabidopsis thaliana]
  misc_feature (1)..(309): Homolog of NCBI NO: 27497120 NR Description: floral organ regulator 2 [Oryza sativa (japonica
  misc_feature (5)..(354): Homolog of NCBI NO: 26449457 NR Description: unknown protein [Arabidopsis thaliana]
  misc_feature (5)..(354): Homolog of NCBI NO: 15219370 NR Description: leucine-rich repeat transmembrane protein kinase,
  misc_feature (4)..(382): Homolog of NCBI NO: 15235318 NR Description: leucine-rich repeat transmembrane protein kinase,
  misc_feature (1)..(354): Homolog of NCBI NO: 15219369 NR Description: leucine rich repeat protein family; protein id:
  misc_feature (76)..(378): Homolog of NCBI NO: 15231699 NR Description: leucine rich repeat protein family; protein id:
  misc_feature (5)..(382): Homolog of NCBI NO: 15239346 NR Description: leucine rich repeat protein family
  misc_feature (1)..(382): Homolog of NCBI NO: 21554189 NR Description: putative leucine-rich repeat disease resistance
  misc_feature (1)..(382): Homolog of NCBI NO: 15226087 NR Description: leucine rich repeat protein family
MTCLLLLLLLLLFSSADSLTSPSDVSALKAFKATVKPNSIPPWSCLASWDFTVSDPCASPRRTHFTCGITCSSDSTRVTQLTLDPAGYTGRLTPLISGLTELLTLDLAENNFYGLIPSSISSLTSLKTLILRSNSFSGSLPDSVTRLNSLESIDISHNSLTGPLPKTMNSLSNLRQLDLSYNKLTGAIPKLPKNLIDLALKANTLSGPISKDSFTESTQLEIVEIAENSFTGTLGAWFFLLESIQQVDLANNTLTGIEVLPPNLAGENNLVAVELGFNQIRGNAPASFAAYPRLSSLSMRYNVLHGVIPSEYERSKTLRRLYLDGNFLTGKPPARFVRTDAEVMGSLGNNCLQGCPGKAKMCAPSQKPFYICKQAYGGKPKS

SEQ ID NO: 34853 - protein, 215 aa, Arabidopsis thaliana
  peptide (1)..(215): Ceres Seq. ID no. 12334210
  misc_feature (1)..(187): Homolog of NCBI NO: 22655012 NR Description: At1g73080/F3N23_28 [Arabidopsis thaliana]
  misc_feature (1)..(142): Homolog of NCBI NO: 27497120 NR Description: floral organ regulator 2 [Oryza sativa (japonica
  misc_feature (1)..(187): Homolog of NCBI NO: 26449457 NR Description: unknown protein [Arabidopsis thaliana]
  misc_feature (1)..(187): Homolog of NCBI NO: 15219370 NR Description: leucine-rich repeat transmembrane protein kinase,
  misc_feature (1)..(215): Homolog of NCBI NO: 15235318 NR Description: leucine-rich repeat transmembrane protein kinase,
  misc_feature (1)..(187): Homolog of NCBI NO: 15219369 NR Description: leucine rich repeat protein family; protein id:
  misc_feature (1)..(211): Homolog of NCBI NO: 15231699 NR Description: leucine rich repeat protein family; protein id:
  misc_feature (1)..(215): Homolog of NCBI NO: 15239346 NR Description: leucine rich repeat protein family
  misc_feature (1)..(215): Homolog of NCBI NO: 21554189 NR Description: putative leucine-rich repeat disease resistance
  misc_feature (1)..(215): Homolog of NCBI NO: 15226087 NR Description: leucine rich repeat protein family
MNSLSNLRQLDLSYNKLTGAIPKLPKNLIDLALKANTLSGPISKDSFTESTQLEIVEIAENSFTGTLGAWFFLLESIQQVDLANNTLTGIEVLPPNLAGENNLVAVELGFNQIRGNAPASFAAYPRLSSLSMRYNVLHGVIPSEYERSKTLRRLYLDGNFLTGKPPARFVRTDAEVMGSLGNNCLQGCPGKAKMCAPSQKPFYICKQAYGGKPKS

SEQ ID NO: 34854 - DNA, 1234 bp, Arabidopsis thaliana
  misc_feature (1)..(1234): Ceres Seq. ID no. 12701868
  misc_feature: MA Experiment ID: 108488 Result: Down-regulated in Transcription
  misc_feature: MA Experiment ID: 108576 Result: Down-regulated in Transcription
  misc_feature: MA Experiment 108576 PARAMETER Experiment Name: At_42deg_Heat_cDNA_P Parameter: Temperature (deg C) Value: 42 vs. 22
  misc_feature: MA Experiment 108576 PARAMETER Experiment Name: At_42deg_Heat_cDNA_P Parameter: Timepoint (hr) Value: 1
  misc_feature: MA Experiment 108576 PARAMETER Experiment Name: At_42deg_Heat_cDNA_P Parameter: Tissue Value: Aerial
tcttcaatctcccacgtctgagattgaaaagtttgggagaagataaacaaactcaaaatacctcagctttagatcaaaatctaaaaacaagagtttcgtgcagtggtttcttagagatctagtagattagagaatttggatttgttgaagaaaagtggatttggtacgattctataggtttccttcttctctgaagctactatagagagaatctgcgagctcaatttcgtagtaaattagggttcgtgtttcttggtaaagatagaatcaatggcggaggttgttctgcacatatacgatgtgacgaacagtggatcagagaagactaacaacaccatagttcagatcaataggttcttcaaagacgggatcggtcttggcggtatattccacagcgctattcaggtatatggaaacgatgaatggtcttatgggtattgtgaacaaggaactggtgtgttcagctgtcctagtggcaagaatccaatgtacacatatcgtgagaaaattgttcttgggaagacagattgtacaatcttcatggtaaatcagatcttgcgtgagctcagcagggaatggccaggacacacttatgatttgctgtccaaaaattgcaatcacttctgcgatgtattatgtgaccgccttggtgtgccaaagatcccaggttgggtgaatcgttttgctcatgctggcgacacagccttggaagtagcaggaaacacagcaatgcgggtaaagcaagccaaaactgaacttgtttcagccagtaaagtggcttatcgcttcctttcgaatgttacctcaaacataaccaatggttcaaatggctccagtggctctccacagcggccaggaactctcaacaattcagacaatgggagctttagattgcaaggtagttggttgaaaggtatacttaacactgccaaaccctccacaagtacagagatagggaacaaagaggaagatacaaatcatacaatcaccaatcagaaaaagcagaaccgtgactctgatgttctactatttcagtagcaactgtactgatccaccccaatgtattcacttactgtatatccacctatccaaaatttattcgtttgtatccattactttgtatcacgattcgaacacacctctctttttttttccccttttcacagcagaacgtgtgattttgttaagaagatattttcaacacgttactggcaaagaccaagcaagtcttagc

SEQ ID NO: 34855 - protein, 255 aa, Arabidopsis thaliana
  peptide (1)..(255): Ceres Seq. ID no. 12701869
  misc_feature (2)..(139): Pfam Name: Eukaryotic protein of unknown function (DUF862) Pfam Description: Eukaryotic protein of unknown function (DUF862)
  misc_feature (1)..(202): Homolog of NCBI NO: 15238059 NR Description: putative protein; protein id: At5g47310.1
  misc_feature (13)..(142): Homolog of NCBI NO: 17529024 NR Description: unknown protein [Arabidopsis thaliana]
  misc_feature (34)..(142): Homolog of NCBI NO: 25354458 NR Description: hypothetical protein F23A5.4 [imported] -
  misc_feature (34)..(192): Homolog of NCBI NO: 18412886 NR Description: expressed protein
  misc_feature (34)..(209): Homolog of NCBI NO: 18420889 NR Description: putative protein
  misc_feature (14)..(192): Homolog of NCBI NO: 18400749 NR Description: expressed protein
  misc_feature (3)..(100): Homolog of NCBI NO: 34897764 NR Description: hypothetical protein [Oryza sativa (japonica
  misc_feature (1)..(249): Homolog of NCBI NO: 37536408 NR Description: unknown protein [Oryza sativa (japonica
  misc_feature (1)..(255): Homolog of NCBI NO: 15235955 NR Description: putative protein
  misc_feature (1)..(255): Homolog of NCBI NO: 15235952 NR Description: putative protein
MAEVVLHIYDVTNSGSEKTNNTIVQINRFFKDGIGLGGIFHSAIQVYGNDEWSYGYCEQGTGVFSCPSGKNPMYTYREKIVLGKTDCTIFMVNQILRELSREWPGHTYDLLSKNCNHFCDVLCDRLGVPKIPGWVNRFAHAGDTALEVAGNTAMRVKQAKTELVSASKVAYRFLSNVTSNITNGSNGSSGSPQRPGTLNNSDNGSFRLQGSWLKGILNTAKPSTSTEIGNKEEDTNHTITNQKKQNRDSDVLLFQ

SEQ ID NO: 34856 - protein, 183 aa, Arabidopsis thaliana
  peptide (1)..(183): Ceres Seq. ID no. 12701870
  misc_feature (1)..(67): Pfam Name: Eukaryotic protein of unknown function (DUF862) Pfam Description: Eukaryotic protein of unknown function (DUF862)
  misc_feature (1)..(130): Homolog of NCBI NO: 15238059 NR Description: putative protein; protein id: At5g47310.1
  misc_feature (1)..(70): Homolog of NCBI NO: 17529024 NR Description: unknown protein [Arabidopsis thaliana]
  misc_feature (1)..(70): Homolog of NCBI NO: 25354458 NR Description: hypothetical protein F23A5.4 [imported] -
  misc_feature (1)..(120): Homolog of NCBI NO: 18412886 NR Description: expressed protein
  misc_feature (1)..(137): Homolog of NCBI NO: 18420889 NR Description: putative protein
  misc_feature (1)..(120): Homolog of NCBI NO: 18400749 NR Description: expressed protein
  misc_feature (1)..(28): Homolog of NCBI NO: 34897764 NR Description: hypothetical protein [Oryza sativa (japonica
  misc_feature (1)..(177): Homolog of NCBI NO: 37536408 NR Description: unknown protein [Oryza sativa (japonica
  misc_feature (1)..(183): Homolog of NCBI NO: 15235955 NR Description: putative protein
  misc_feature (1)..(183): Homolog of NCBI NO: 15235952 NR Description: putative protein
MYTYREKIVLGKTDCTIFMVNQILRELSREWPGHTYDLLSKNCNHFCDVLCDRLGVPKIPGWVNRFAHAGDTALEVAGNTAMRVKQAKTELVSASKVAYRFLSNVTSNITNGSNGSSGSPQRPGTLNNSDNGSFRLQGSWLKGILNTAKPSTSTEIGNKEEDTNHTITNQKKQNRDSDVLLFQ

SEQ ID NO: 34857 - protein, 165 aa, Arabidopsis thaliana
  peptide (1)..(165): Ceres Seq. ID no. 12701871
  misc_feature (1)..(52): Homolog of NCBI NO: 30684058 NR Description: expressed protein [Arabidopsis thaliana]
  misc_feature (1)..(112): Homolog of NCBI NO: 15238059 NR Description: putative protein; protein id: At5g47310.1
  misc_feature (1)..(52): Homolog of NCBI NO: 17529024 NR Description: unknown protein [Arabidopsis thaliana]
  misc_feature (1)..(52): Homolog of NCBI NO: 25354458 NR Description: hypothetical protein F23A5.4 [imported] -
  misc_feature (1)..(102): Homolog of NCBI NO: 18412886 NR Description: expressed protein
  misc_feature (1)..(119): Homolog of NCBI NO: 18420889 NR Description: putative protein
  misc_feature (1)..(102): Homolog of NCBI NO: 18400749 NR Description: expressed protein
  misc_feature (1)..(159): Homolog of NCBI NO: 37536408 NR Description: unknown protein [Oryza sativa (japonica
  misc_feature (1)..(165): Homolog of NCBI NO: 15235955 NR Description: putative protein
  misc_feature (1)..(165): Homolog of NCBI NO: 15235952 NR Description: putative protein
MVNQILRELSREWPGHTYDLLSKNCNHFCDVLCDRLGVPKIPGWVNRFAHAGDTALEVAGNTAMRVKQAKTELVSASKVAYRFLSNVTSNITNGSNGSSGSPQRPGTLNNSDNGSFRLQGSWLKGILNTAKPSTSTEIGNKEEDTNHTITNQKKQNRDSDVLLFQ

SEQ ID NO: 34858 - DNA, 1408 bp, Arabidopsis thaliana
  misc_feature (1)..(1408): Ceres Seq. ID no. 13501424
  misc_feature: MA Experiment ID: 108434 Result: Up-regulated in Transcription
  misc_feature: MA Experiment 108434 PARAMETER Experiment Name: At_Root_Tips_cDNA_P Parameter: Tissue Value: Root Tips
  misc_feature: MA Experiment ID: 108461 Result: Down-regulated in Transcription
  misc_feature: MA Experiment 108461 PARAMETER Experiment Name: At_Germinating_Seeds_cDNA_P Parameter: Age (day) Value: 1 vs. 0
  misc_feature: MA Experiment 108461 PARAMETER Experiment Name: At_Germinating_Seeds_cDNA_P Parameter: Tissue Value: Germinating Seeds
  misc_feature: MA Experiment ID: 108462 Result: Down-regulated in Transcription
  misc_feature: MA Experiment 108462 PARAMETER Experiment Name: At_Germinating_Seeds_cDNA_P Parameter: Age (day) Value: 2 vs. 0
  misc_feature: MA Experiment 108462 PARAMETER Experiment Name: At_Germinating_Seeds_cDNA_P Parameter: Tissue Value: Germinating Seeds
  misc_feature: MA Experiment ID: 108463 Result: Down-regulated in Transcription
  misc_feature: MA Experiment 108463 PARAMETER Experiment Name: At_Germinating_Seeds_cDNA_P Parameter: Age (day) Value: 3 vs. 0
  misc_feature: MA Experiment 108463 PARAMETER Experiment Name: At_Germinating_Seeds_cDNA_P Parameter: Tissue Value: Germinating Seeds
  misc_feature: MA Experiment ID: 108464 Result: Down-regulated in Transcription
  misc_feature: MA Experiment 108464 PARAMETER Experiment Name: At_Germinating_Seeds_cDNA_P Parameter: Age (day) Value: 4 vs. 0
  misc_feature: MA Experiment 108464 PARAMETER Experiment Name: At_Germinating_Seeds_cDNA_P Parameter: Tissue Value: Germinating Seeds
  misc_feature: MA Experiment ID: 108488 Result: Up-regulated in Transcription
  misc_feature: MA Experiment ID: 20000113 Result: Up-regulated in Transcription
  misc_feature: MA Experiment 20000113 PARAMETER Experiment Name: At_42deg_Heat_cDNA_P Parameter: Temperature (deg C) Value: 42 vs. 22
  misc_feature: MA Experiment 20000113 PARAMETER Experiment Name: At_42deg_Heat_cDNA_P Parameter: Timepoint (hr) Value: 8
  misc_feature: MA Experiment 20000113 PARAMETER Experiment Name: At_42deg_Heat_cDNA_P Parameter: Tissue Value: Aerial
  misc_feature: MA Experiment ID: 20000234 Result: Down-regulated in Transcription
  misc_feature: MA Experiment 20000234 PARAMETER Experiment Name: At_Siliques_P Parameter: Age (day) Value: 21
  misc_feature: MA Experiment 20000234 PARAMETER Experiment Name: At_Siliques_P Parameter: Organism Value: A. thaliana
  misc_feature: MA Experiment 20000234 PARAMETER Experiment Name: At_Siliques_P Parameter: Plant Line Value: WS
  misc_feature: MA Experiment 20000234 PARAMETER Experiment Name: At_Siliques_P Parameter: Tissue Value: Less Than 5mm Siliques vs. Whole Plant
  misc_feature: MA Experiment ID: 20000264 Result: Down-regulated in Transcription
  misc_feature: MA Experiment 20000264 PARAMETER Experiment Name: At_Open_Flower_P Parameter: Age (day) Value: 21
  misc_feature: MA Experiment 20000264 PARAMETER Experiment Name: At_Open_Flower_P Parameter: Plant Line Value: WS
  misc_feature: MA Experiment 20000264 PARAMETER Experiment Name: At_Open_Flower_P Parameter: Tissue Value: Open Flower vs. Whole Plant
  misc_feature: MA Experiment ID: 20000265 Result: Down-regulated in Transcription
  misc_feature: MA Experiment 20000265 PARAMETER Experiment Name: At_Open_Flower_P Parameter: Age (day) Value: 21
  misc_feature: MA Experiment 20000265 PARAMETER Experiment Name: At_Open_Flower_P Parameter: Plant Line Value: WS
  misc_feature: MA Experiment 20000265 PARAMETER Experiment Name: At_Open_Flower_P Parameter: Tissue Value: Closed Flower vs. Whole Plant
  misc_feature: MA Experiment ID: 20000794 Result: Down-regulated in Transcription
  misc_feature: MA Experiment 20000794 PARAMETER Experiment Name: At_Petals_P Parameter: Age (day) Value: 23-25 days
  misc_feature: MA Experiment 20000794 PARAMETER Experiment Name: At_Petals_P Parameter: Plant Line Value: WS
  misc_feature: MA Experiment 20000794 PARAMETER Experiment Name: At_Petals_P Parameter: Tissue Value: Petals vs. Whole plant
  misc_feature: MA Experiment ID: 20001451 Result: Up-regulated in Transcription
  misc_feature: MA Experiment 20001451 PARAMETER Experiment Name: At_Far-red-induction_P Parameter: Age (day) Value: 7
  misc_feature: MA Experiment 20001451 PARAMETER Experiment Name: At_Far-red-induction_P Parameter: Light Value: Far-red vs. White
  misc_feature: MA Experiment 20001451 PARAMETER Experiment Name: At_Far-red-induction_P Parameter: Organism Value: A. thaliana
  misc_feature: MA Experiment 20001451 PARAMETER Experiment Name: At_Far-red-induction_P Parameter: Plant Line Value: Columbia
  misc_feature: MA Experiment 20001451 PARAMETER Experiment Name: At_Far-red-induction_P Parameter: Timepoint (hr) Value: 24
  misc_feature: MA Experiment 20001451 PARAMETER Experiment Name: At_Far-red-induction_P Parameter: Tissue Value: Whole Plant
caatggggggaaagggggggggatataataaaggggggggaaagggggggggaatccatattaataaaacgaaatttgggtctctctccctctctctacttaacgctctctgtatcttcttctccgtcaacgatacgaacccagagacgtcggcggttaaaacaatcgtcggatctctctggattcgttagacgagaagtttccggtatctaatttctgtgcgttagagagaaattagggttgttgctacgatggatgagactttacttgacgatataatacgacggcttttggcgacgaataatggaaggacggtgaagcaagcacagattactgagacggagatacgtcagctatgtttagcttcaaaagaggtttttctcagtcagcctaatctcctcgagctcgaggctcctatcaagatttgcggagatgttcatggtcagtttccagacctcttgcggttgtttgagtatggtggttatccaccagctgcgaactacttgtttcttggggattatgttgatcgtggtaagcagagcatagagacgatatgccttcttcttgcctataaggtcaaatacaagttcaacttctttcttctcagaggcaatcacgaatgtgcttcaatcaaccgtgtatatggattctacgatgaatgcaaaagaagatataatgttcgcttatggaaaacattcaccgagtgcttcaactgtctgcctgtttctgctctcattgatgataagatcctctgcatgcatggtggactatcgcctgatattaagagcttagatgacatcaggagaattcctcgtcctattgacgttcctgatcagggcattctttgtgatttgttgtgggctgatcctgacagagagattcaaggctggggggagaatgacagaggtgtctcttatacatttggggctgacaaagtagctgagttccttcaaactcatgaccttgatcttatatgccgagctcatcaggttgtagaagatggatacgagttctttgcaaagagacaactagtgacaatattctctgcacccaattactgtggcgagtttgacaatgctggtgcattgatgagtgttgatgatagcttaacatgttcattccaaatccttaaggcatctgagaagaaaggaagatttggattcaacaacaatgttcctagaccaggaaccccacctcataagggtggaaaaggtcgttaactcgtcgtcgatgggttcaagaaacgagtgaaaccgacgggttcgaattttgtaaggcaaacagtttgttttgttagattgttatctgttttcttatggttgaggcaacattatgttttgtttagattttttttgtaaaaattgtggaagatgttcacagcattttcaactgaagaaagttgggtttt

SEQ ID NO: 34859 - protein, 322 aa, Arabidopsis thaliana
  peptide (1)..(322): Ceres Seq. ID no. 13501425
  misc_feature (54)..(249): Pfam Name: Calcineurin-like phosphoesterase Pfam Description: Calcineurin-like phosphoesterase
  misc_feature (1)..(322): Homolog of NCBI NO: 28277696 NR Description: Unknown (protein for MGC:55744) [Danio rerio]
  misc_feature (1)..(302): Homolog of NCBI NO: 11133833 NR Description: Serine/threonine protein phosphatase PP1 isozyme
  misc_feature (1)..(314): Homolog of NCBI NO: 1346753 NR Description: SERINE/THREONINE PROTEIN PHOSPHATASE PP1 ISOZYME
  misc_feature (1)..(302): Homolog of NCBI NO: 1346750 NR Description: SERINE/THREONINE PROTEIN PHOSPHATASE PP1 ISOZYME
  misc_feature (1)..(317): Homolog of NCBI NO: 25752372 NR Description: phosphoprotein phosphatase (EC 3.1.3.16) 1
  misc_feature (1)..(321): Homolog of NCBI NO: 15222607 NR Description: phosphoprotein phosphatase-type 1 catalytic
  misc_feature (1)..(320): Homolog of NCBI NO: 1346763 NR Description: SERINE/THREONINE PROTEIN PHOSPHATASE PP1
  misc_feature (1)..(317): Homolog of NCBI NO: 7435131 NR Description: phosphoprotein phosphatase (EC 3.1.3.16) PP1BG -
  misc_feature (1)..(322): Homolog of NCBI NO: 1346760 NR Description: Serine/threonine protein phosphatase PP1 isozyme
  misc_feature (1)..(322): Homolog of NCBI NO: 18413493 NR Description: protein phosphatase type 1 (AtPP1bg) [Arabidopsis
MDETLLDDIIRRLLATNNGRTVKQAQITETEIRQLCLASKEVFLSQPNLLELEAPIKICGDVHGQFPDLLRLFEYGGYPPAANYLFLGDYVDRGKQSIETICLLLAYKVKYKFNFFLLRGNHECASINRVYGFYDECKRRYNVRLWKTFTECFNCLPVSALIDDKILCMHGGLSPDIKSLDDIRRIPRPIDVPDQGILCDLLWADPDREIQGWGENDRGVSYTFGADKVAEFLQTHDLDLICRAHQVVEDGYEFFAKRQLVTIFSAPNYCGEFDNAGALMSVDDSLTCSFQILKASEKKGRFGFNNNVPRPGTPPHKGGKGR

SEQ ID NO: 34860 - DNA, 1216 bp, Arabidopsis thaliana
  misc_feature (1)..(1216): Ceres Seq. ID no. 13487522
  misc_feature: MA Experiment ID: 108434 Result: Down-regulated in Transcription
  misc_feature: MA Experiment 108434 PARAMETER Experiment Name: At_Root_Tips_cDNA_P Parameter: Tissue Value: Root Tips
  misc_feature: MA Experiment ID: 108435 Result: Up-regulated in Transcription
  misc_feature: MA Experiment 108435 PARAMETER Experiment Name: At_stm_Mutants_cDNA_P Parameter: Plant Line Value: wt Landsburg vs stm
  misc_feature: MA Experiment 108435 PARAMETER Experiment Name: At_stm_Mutants_cDNA_P Parameter: Tissue Value: Shoot Apical Meristem Region
  misc_feature: MA Experiment ID: 108461 Result: Down-regulated in Transcription
  misc_feature: MA Experiment 108461 PARAMETER Experiment Name: At_Germinating_Seeds_cDNA_P Parameter: Age (day) Value: 1 vs. 0
  misc_feature: MA Experiment 108461 PARAMETER Experiment Name: At_Germinating_Seeds_cDNA_P Parameter: Tissue Value: Germinating Seeds
  misc_feature: MA Experiment ID: 108462 Result: Down-regulated in Transcription
  misc_feature: MA Experiment 108462 PARAMETER Experiment Name: At_Germinating_Seeds_cDNA_P Parameter: Age (day) Value: 2 vs. 0
  misc_feature: MA Experiment 108462 PARAMETER Experiment Name: At_Germinating_Seeds_cDNA_P Parameter: Tissue Value: Germinating Seeds
  misc_feature: MA Experiment ID: 108463 Result: Down-regulated in Transcription
  misc_feature: MA Experiment 108463 PARAMETER Experiment Name: At_Germinating_Seeds_cDNA_P Parameter: Age (day) Value: 3 vs. 0
  misc_feature: MA Experiment 108463 PARAMETER Experiment Name: At_Germinating_Seeds_cDNA_P Parameter: Tissue Value: Germinating Seeds
  misc_feature: MA Experiment ID: 108464 Result: Down-regulated in Transcription
  misc_feature: MA Experiment 108464 PARAMETER Experiment Name: At_Germinating_Seeds_cDNA_P Parameter: Age (day) Value: 4 vs. 0
  misc_feature: MA Experiment 108464 PARAMETER Experiment Name: At_Germinating_Seeds_cDNA_P Parameter: Tissue Value: Germinating Seeds
  misc_feature: MA Experiment ID: 108577 Result: Up-regulated in Transcription
  misc_feature: MA Experiment 108577 PARAMETER Experiment Name: At_42deg_Heat_cDNA_P Parameter: Temperature (deg C) Value: 42 vs. 22
  misc_feature: MA Experiment 108577 PARAMETER Experiment Name: At_42deg_Heat_cDNA_P Parameter: Timepoint (hr) Value: 6
  misc_feature: MA Experiment 108577 PARAMETER Experiment Name: At_42deg_Heat_cDNA_P Parameter: Tissue Value: Aerial
  misc_feature: MA Experiment ID: 108579 Result: Down-regulated in Transcription
  misc_feature: MA Experiment 108579 PARAMETER Experiment Name: At_4deg_Cold_cDNA_P Parameter: Temperature (deg C) Value: 4 vs. 22
  misc_feature: MA Experiment 108579 PARAMETER Experiment Name: At_4deg_Cold_cDNA_P Parameter: Timepoint (hr) Value: 6
  misc_feature: MA Experiment 108579 PARAMETER Experiment Name: At_4deg_Cold_cDNA_P Parameter: Tissue Value: Aerial
  misc_feature: MA Experiment ID: 108594 Result: Up-regulated in Transcription
  misc_feature: MA Experiment 108594 PARAMETER Experiment Name: At_Ler-rhl_Root_cDNA_P Parameter: Plant Line Value: null
  misc_feature: MA Experiment ID: 108595 Result: Up-regulated in Transcription
  misc_feature: MA Experiment 108595 PARAMETER Experiment Name: At_Ler-pi_Ovule_cDNA_P Parameter: Plant Line Value: null
  misc_feature: MA Experiment ID: 108668 Result: Down-regulated in Transcription
  misc_feature: MA Experiment 108668 PARAMETER Experiment Name: At_2mM_SA_cDNA_P Parameter: Plant Line Value: WS
  misc_feature: MA Experiment 108668 PARAMETER Experiment Name: At_2mM_SA_cDNA_P Parameter: Timepoint (hr) Value: 6
  misc_feature: MA Experiment 108668 PARAMETER Experiment Name: At_2mM_SA_cDNA_P Parameter: Treatment Value: 2mM SA vs. No Treatment
  misc_feature: MA Experiment ID: 20000111 Result: Up-regulated in Transcription
  misc_feature: MA Experiment 20000111 PARAMETER Experiment Name: At_42deg_Heat_cDNA_P Parameter: Temperature (deg C) Value: 42 vs. 22
  misc_feature: MA Experiment 20000111 PARAMETER Experiment Name: At_42deg_Heat_cDNA_P Parameter: Timepoint (hr) Value: 6
  misc_feature: MA Experiment 20000111 PARAMETER Experiment Name: At_42deg_Heat_cDNA_P Parameter: Tissue Value: Aerial
  misc_feature: MA Experiment ID: 20000112 Result: Up-regulated in Transcription
  misc_feature: MA Experiment 20000112 PARAMETER Experiment Name: At_42deg_Heat_cDNA_P Parameter: Temperature (deg C) Value: 42 vs. 22
  misc_feature: MA Experiment 20000112 PARAMETER Experiment Name: At_42deg_Heat_cDNA_P Parameter: Timepoint (hr) Value: 2
  misc_feature: MA Experiment 20000112 PARAMETER Experiment Name: At_42deg_Heat_cDNA_P Parameter: Tissue Value: Aerial
  misc_feature: MA Experiment ID: 20000113 Result: Up-regulated in Transcription
  misc_feature: MA Experiment 20000113 PARAMETER Experiment Name: At_42deg_Heat_cDNA_P Parameter: Temperature (deg C) Value: 42 vs. 22
  misc_feature: MA Experiment 20000113 PARAMETER Experiment Name: At_42deg_Heat_cDNA_P Parameter: Timepoint (hr) Value: 8
  misc_feature: MA Experiment 20000113 PARAMETER Experiment Name: At_42deg_Heat_cDNA_P Parameter: Tissue Value: Aerial
  misc_feature: MA Experiment ID: 20000173 Result: Up-regulated in Transcription
  misc_feature: MA Experiment 20000173 PARAMETER Experiment Name: At_42deg_Heat_P Parameter: Age (day) Value: 14
  misc_feature: MA Experiment 20000173 PARAMETER Experiment Name: At_42deg_Heat_P Parameter: Organism Value: A. thaliana
  misc_feature: MA Experiment 20000173 PARAMETER Experiment Name: At_42deg_Heat_P Parameter: Plant Line Value: WS
  misc_feature: MA Experiment 20000173 PARAMETER Experiment Name: At_42deg_Heat_P Parameter: Temperature (deg C) Value: 42 vs. 22
  misc_feature: MA Experiment 20000173 PARAMETER Experiment Name: At_42deg_Heat_P Parameter: Timepoint (hr) Value: 6
  misc_feature: MA Experiment 20000173 PARAMETER Experiment Name: At_42deg_Heat_P Parameter: Tissue Value: Aerial
  misc_feature: MA Experiment ID: 20000180 Result: Down-regulated in Transcription
  misc_feature: MA Experiment 20000180 PARAMETER Experiment Name: At_Germinating_Seeds_P Parameter: Age (hr) Value: 24 vs. 0
  misc_feature: MA Experiment 20000180 PARAMETER Experiment Name: At_Germinating_Seeds_P Parameter: Tissue Value: Germinating Seeds
  misc_feature: MA Experiment ID: 20000182 Result: Down-regulated in Transcription
  misc_feature: MA Experiment 20000182 PARAMETER Experiment Name: At_2mM_SA_P Parameter: Age (day) Value: 14
  misc_feature: MA Experiment 20000182 PARAMETER Experiment Name: At_2mM_SA_P Parameter: Organism Value: A. thaliana
  misc_feature: MA Experiment 20000182 PARAMETER Experiment Name: At_2mM_SA_P Parameter: Plant Line Value: WS
  misc_feature: MA Experiment 20000182 PARAMETER Experiment Name: At_2mM_SA_P Parameter: Timepoint (hr) Value: 6
  misc_feature: MA Experiment 20000182 PARAMETER Experiment Name: At_2mM_SA_P Parameter: Tissue Value: Aerial
  misc_feature: MA Experiment 20000182 PARAMETER Experiment Name: At_2mM_SA_P Parameter: Treatment Value: 2mM SA vs. No Treatment
  misc_feature: MA Experiment ID: 20000227 Result: Down-regulated in Transcription
  misc_feature: MA Experiment 20000227 PARAMETER Experiment Name: At_Root-Tips-vs-Tops_P Parameter: Tissue Value: Root Tips vs. Root Tops
  misc_feature: MA Experiment ID: 20000234 Result: Up-regulated in Transcription
  misc_feature: MA Experiment 20000234 PARAMETER Experiment Name: At_Siliques_P Parameter: Age (day) Value: 21
  misc_feature: MA Experiment 20000234 PARAMETER Experiment Name: At_Siliques_P Parameter: Organism Value: A. thaliana
  misc_feature: MA Experiment 20000234 PARAMETER Experiment Name: At_Siliques_P Parameter: Plant Line Value: WS
  misc_feature: MA Experiment 20000234 PARAMETER Experiment Name: At_Siliques_P Parameter: Tissue Value: Less Than 5mm Siliques vs. Whole Plant
  misc_feature: MA Experiment ID: 20000264 Result: Up-regulated in Transcription
  misc_feature: MA Experiment 20000264 PARAMETER Experiment Name: At_Open_Flower_P Parameter: Age (day) Value: 21
  misc_feature: MA Experiment 20000264 PARAMETER Experiment Name: At_Open_Flower_P Parameter: Plant Line Value: WS
  misc_feature: MA Experiment 20000264 PARAMETER Experiment Name: At_Open_Flower_P Parameter: Tissue Value: Open Flower vs. Whole Plant
  misc_feature: MA Experiment ID: 20000286 Result: Up-regulated in Transcription
  misc_feature: MA Experiment 20000286 PARAMETER Experiment Name: At_Open_Flower_P Parameter: Age (day) Value: 21
  misc_feature: MA Experiment 20000286 PARAMETER Experiment Name: At_Open_Flower_P Parameter: Plant Line Value: WS
  misc_feature: MA Experiment 20000286 PARAMETER Experiment Name: At_Open_Flower_P Parameter: Tissue Value: Half Open vs. Whole Plant
  misc_feature: MA Experiment ID: 20000437 Result: Up-regulated in Transcription
  misc_feature: MA Experiment 20000437 PARAMETER Experiment Name: At_Drought_P Parameter: Age (day) Value: 8
  misc_feature: MA Experiment 20000437 PARAMETER Experiment Name: At_Drought_P Parameter: Organism Value: A. thaliana
  misc_feature: MA Experiment 20000437 PARAMETER Experiment Name: At_Drought_P Parameter: Plant Line Value: WS
  misc_feature: MA Experiment 20000437 PARAMETER Experiment Name: At_Drought_P Parameter: Timepoint (hr) Value: 24
  misc_feature: MA Experiment 20000437 PARAMETER Experiment Name: At_Drought_P Parameter: Tissue Value: Whole Plant
  misc_feature: MA Experiment 20000437 PARAMETER Experiment Name: At_Drought_P Parameter: Treatment Value: Drought vs. No Drought
  misc_feature: MA Experiment ID: 20000438 Result: Down-regulated in Transcription
  misc_feature: MA Experiment 20000438 PARAMETER Experiment Name: At_Shoots__P Parameter: Age (day) Value: 14
  misc_feature: MA Experiment 20000438 PARAMETER Experiment Name: At_Shoots__P Parameter: Tissue Value: Shoots vs. Whole Plant
  misc_feature: MA Experiment ID: 20000451 Result: Up-regulated in Transcription
  misc_feature: MA Experiment 20000451 PARAMETER Experiment Name: At_CS6879_Shoots-Roots_P Parameter: Age (day) Value: 14
  misc_feature: MA Experiment 20000451 PARAMETER Experiment Name: At_CS6879_Shoots-Roots_P Parameter: Organism Value: A. thaliana
  misc_feature: MA Experiment 20000451 PARAMETER Experiment Name: At_CS6879_Shoots-Roots_P Parameter: Plant Line Value: CS6879 vs. WS
  misc_feature: MA Experiment 20000451 PARAMETER Experiment Name: At_CS6879_Shoots-Roots_P Parameter: Tissue Value: Roots
  misc_feature: MA Experiment ID: 20000453 Result: Up-regulated in Transcription
  misc_feature: MA Experiment 20000453 PARAMETER Experiment Name: At_100uM_ABA_P Parameter: Age (day) Value: 15
  misc_feature: MA Experiment 20000453 PARAMETER Experiment Name: At_100uM_ABA_P Parameter: Organism Value: A. thaliana
  misc_feature: MA Experiment 20000453 PARAMETER Experiment Name: At_100uM_ABA_P Parameter: Plant Line Value: WS
  misc_feature: MA Experiment 20000453 PARAMETER Experiment Name: At_100uM_ABA_P Parameter: Timepoint (hr) Value: 24
  misc_feature: MA Experiment 20000453 PARAMETER Experiment Name: At_100uM_ABA_P Parameter: Tissue Value: Aerial
  misc_feature: MA Experiment 20000453 PARAMETER Experiment Name: At_100uM_ABA_P Parameter: Treatment Value: 100uM ABA vs. No Treatment
  misc_feature: MA Experiment ID: 20000495 Result: Up-regulated in Transcription
  misc_feature: MA Experiment 20000495 PARAMETER Experiment Name: At_Guard_Cells_P Parameter: Harvest Date Value: 8/2/2002
  misc_feature: MA Experiment 20000495 PARAMETER Experiment Name: At_Guard_Cells_P Parameter: Organism Value: A. thaliana
  misc_feature: MA Experiment 20000495 PARAMETER Experiment Name: At_Guard_Cells_P Parameter: Tissue Value: Guard Cells vs. Leaves
  misc_feature: MA Experiment ID: 20000794 Result: Up-regulated in Transcription
  misc_feature: MA Experiment 20000794 PARAMETER Experiment Name: At_Petals_P Parameter: Age (day) Value: 23-25 days
  misc_feature: MA Experiment 20000794 PARAMETER Experiment Name: At_Petals_P Parameter: Plant Line Value: WS
  misc_feature: MA Experiment 20000794 PARAMETER Experiment Name: At_Petals_P Parameter: Tissue Value: Petals vs. Whole plant
  misc_feature: MA Experiment ID: 20001451 Result: Up-regulated in Transcription
  misc_feature: MA Experiment 20001451 PARAMETER Experiment Name: At_Far-red-induction_P Parameter: Age (day) Value: 7
  misc_feature: MA Experiment 20001451 PARAMETER Experiment Name: At_Far-red-induction_P Parameter: Light Value: Far-red vs. White
  misc_feature: MA Experiment 20001451 PARAMETER Experiment Name: At_Far-red-induction_P Parameter: Organism Value: A. thaliana
  misc_feature: MA Experiment 20001451 PARAMETER Experiment Name: At_Far-red-induction_P Parameter: Plant Line Value: Columbia
  misc_feature: MA Experiment 20001451 PARAMETER Experiment Name: At_Far-red-induction_P Parameter: Timepoint (hr) Value: 24
  misc_feature: MA Experiment 20001451 PARAMETER Experiment Name: At_Far-red-induction_P Parameter: Tissue Value: Whole Plant
  misc_feature: MA Experiment ID: 20001904 Result: Up-regulated in Transcription
  misc_feature: MA Experiment 20001904 PARAMETER Experiment Name: At_Drought_Reproduction_P Parameter: Age (day) Value: 37
  misc_feature: MA Experiment 20001904 PARAMETER Experiment Name: At_Drought_Reproduction_P Parameter: Organism Value: A. thaliana
  misc_feature: MA Experiment 20001904 PARAMETER Experiment Name: At_Drought_Reproduction_P Parameter: Plant Line Value: WS
  misc_feature: MA Experiment 20001904 PARAMETER Experiment Name: At_Drought_Reproduction_P Parameter: Timepoint (day) Value: 7
  misc_feature: MA Experiment 20001904 PARAMETER Experiment Name: At_Drought_Reproduction_P Parameter: Tissue Value: Rosettes
  misc_feature: MA Experiment 20001904 PARAMETER Experiment Name: At_Drought_Reproduction_P Parameter: Treatment Value: Drought vs. No Drought
  misc_feature: MA Experiment ID: 20001906 Result: Up-regulated in Transcription
  misc_feature: MA Experiment 20001906 PARAMETER Experiment Name: At_Drought_Reproduction_P Parameter: Age (day) Value: 35
  misc_feature: MA Experiment 20001906 PARAMETER Experiment Name: At_Drought_Reproduction_P Parameter: Organism Value: A. thaliana
  misc_feature: MA Experiment 20001906 PARAMETER Experiment Name: At_Drought_Reproduction_P Parameter: Plant Line Value: WS
  misc_feature: MA Experiment 20001906 PARAMETER Experiment Name: At_Drought_Reproduction_P Parameter: Timepoint (day) Value: 5
  misc_feature: MA Experiment 20001906 PARAMETER Experiment Name: At_Drought_Reproduction_P Parameter: Tissue Value: Siliques
  misc_feature: MA Experiment 20001906 PARAMETER Experiment Name: At_Drought_Reproduction_P Parameter: Treatment Value: Drought vs. No Drought
  misc_feature: MA Experiment ID: 20001907 Result: Up-regulated in Transcription
  misc_feature: MA Experiment 20001907 PARAMETER Experiment Name: At_Drought_Reproduction_P Parameter: Age (day) Value: 37
  misc_feature: MA Experiment 20001907 PARAMETER Experiment Name: At_Drought_Reproduction_P Parameter: Organism Value: A. thaliana
  misc_feature: MA Experiment 20001907 PARAMETER Experiment Name: At_Drought_Reproduction_P Parameter: Plant Line Value: WS
  misc_feature: MA Experiment 20001907 PARAMETER Experiment Name: At_Drought_Reproduction_P Parameter: Timepoint (day) Value: 7
  misc_feature: MA Experiment 20001907 PARAMETER Experiment Name: At_Drought_Reproduction_P Parameter: Tissue Value: Siliques
  misc_feature: MA Experiment 20001907 PARAMETER Experiment Name: At_Drought_Reproduction_P Parameter: Treatment Value: Drought vs. No Drought
  misc_feature: MA Experiment ID: 20001908 Result: Up-regulated in Transcription
  misc_feature: MA Experiment 20001908 PARAMETER Experiment Name: At_Drought_Reproduction_P Parameter: Age (day) Value: 40
  misc_feature: MA Experiment 20001908 PARAMETER Experiment Name: At_Drought_Reproduction_P Parameter: Organism Value: A. thaliana
  misc_feature: MA Experiment 20001908 PARAMETER Experiment Name: At_Drought_Reproduction_P Parameter: Plant Line Value: WS
  misc_feature: MA Experiment 20001908 PARAMETER Experiment Name: At_Drought_Reproduction_P Parameter: Timepoint (day) Value: 10
  misc_feature: MA Experiment 20001908 PARAMETER Experiment Name: At_Drought_Reproduction_P Parameter: Tissue Value: Siliques
  misc_feature: MA Experiment 20001908 PARAMETER Experiment Name: At_Drought_Reproduction_P Parameter: Treatment Value: Drought vs. No Drought
  misc_feature: MA Experiment ID: 20001911 Result: Up-regulated in Transcription
  misc_feature: MA Experiment 20001911 PARAMETER Experiment Name: At_Drought_Reproduction_P Parameter: Age (day) Value: 40
  misc_feature: MA Experiment 20001911 PARAMETER Experiment Name: At_Drought_Reproduction_P Parameter: Organism Value: A. thaliana
  misc_feature: MA Experiment 20001911 PARAMETER Experiment Name: At_Drought_Reproduction_P Parameter: Plant Line Value: WS
  misc_feature: MA Experiment 20001911 PARAMETER Experiment Name: At_Drought_Reproduction_P Parameter: Timepoint (day) Value: 10
  misc_feature: MA Experiment 20001911 PARAMETER Experiment Name: At_Drought_Reproduction_P Parameter: Tissue Value: Flowers
  misc_feature: MA Experiment 20001911 PARAMETER Experiment Name: At_Drought_Reproduction_P Parameter: Treatment Value: Drought vs. No Drought
ctctctccgcttcccccaaaaatccaggggcttcttacacgcacacaatcctttaaagctatcgtctttcttatataatcagtgaatcttcattaacacctcccacaaaatctcagaaataactttcacaacagagtcaaagagttccaaatcgtttgtttgtattttgtacgatcaaagttgttggtacttgtaagataatcgaaaccaaagatgcggatgagctgtaatggatgcagagttcttcggaaagggtgtagtgaggattgtagtataaggccgtgtttggcttggatcaaatcgcctgaagcgcaagctaacgcaactgtctttctcgccaagttctatggccgtgctggactcatgaacctcatcaacgccggtcccaatcaccttcgtcctgggattttccgatcgttgttgcacgaagcttgtgggaggattgtgaatccgatctatggttcggtgggtttgttgtggtcggggaattggcagctttgtcaagacgccgtggaggctgtgatgaaaggagaaccggtcaaagagatcgccacagacgctgcgacgatcggccaaggtccgcctcttaagatctacgacatccgacatatctccaaggatgataactctgccgccgcggctactggctcaaccgatttgaaacttgcgaaaactcgccgtgctaagcgggtctccaccgtcgcgatacaggcggaatcggagggaaagtctgacgaggctagtcacgattcgtcgttgagtcatcagtctgaaatagtggctgctcatgaaggagagagcaaggaatccgagagcaatgtctctgaggttttggcattctcgcctccggctgtgaagggctccggcgagataaagcttgacctaactttaaggctcgaaccggtgtcacgtgcgtatcatgtggtacctgttaagaagagaaggatcggcgtgtttggcacgtgtcagaaggagagcacgtgtaagactgagcttatgctctaagctccgttttagctatactcagaagttttgcccccatcagctctattcggctcggctctgatgatcttcaagtcgagccggtaacttttttttaatatatagttctctatttccccctttaatgttcactttccatttgtgacaaaagaatagagtatatgtacaaaattatttacagagattaattcaagaattggctgagatattatct

SEQ ID NO: 34861 - protein, 263 aa, Arabidopsis thaliana
  peptide (1)..(263): Ceres Seq. ID no. 13487523
  misc_feature (4)..(109): Pfam Name: Protein of unknown function DUF260 Pfam Description: Protein of unknown function DUF260
  misc_feature (3)..(114): Homolog of NCBI NO: 15240739 NR Description: lateral organ boundaries (LOB) domain protein 37
  misc_feature (3)..(112): Homolog of NCBI NO: 21553886 NR Description: unknown [Arabidopsis thaliana]
  misc_feature (3)..(112): Homolog of NCBI NO: 15229644 NR Description: lateral organ boundaries (LOB) domain protein,
  misc_feature (1)..(179): Homolog of NCBI NO: 15221429 NR Description: lateral organ boundaries (LOB) domain protein 42
  misc_feature (1)..(190): Homolog of NCBI NO: 34895540 NR Description: unnamed protein product [Oryza sativa (japonica
  misc_feature (1)..(146): Homolog of NCBI NO: 15219829 NR Description: lateral organ boundaries (LOB) domain family
  misc_feature (1)..(187): Homolog of NCBI NO: 34914608 NR Description: P0520B06.17 [Oryza sativa (japonica
  misc_feature (1)..(263): Homolog of NCBI NO: 32395577 NR Description: seed specific protein Bn15D17A [Brassica napus]
  misc_feature (1)..(263): Homolog of NCBI NO: 21554191 NR Description: unknown [Arabidopsis thaliana]
  misc_feature (1)..(263): Homolog of NCBI NO: 18396229 NR Description: lateral organ boundaries (LOB) domain protein 41
MRMSCNGCRVLRKGCSEDCSIRPCLAWIKSPEAQANATVFLAKFYGRAGLMNLINAGPNHLRPGIFRSLLHEACGRIVNPIYGSVGLLWSGNWQLCQDAVEAVMKGEPVKEIATDAATIGQGPPLKIYDIRHISKDDNSAAAATGSTDLKLAKTRRAKRVSTVAIQAESEGKSDEASHDSSLSHQSEIVAAHEGESKESESNVSEVLAFSPPAVKGSGEIKLDLTLRLEPVSRAYHVVPVKKRRIGVFGTCQKESTCKTELML

SEQ ID NO: 34862 - protein, 261 aa, Arabidopsis thaliana
  peptide (1)..(261): Ceres Seq. ID no. 13487524
  misc_feature (2)..(107): Pfam Name: Protein of unknown function DUF260 Pfam Description: Protein of unknown function DUF260
  misc_feature (1)..(112): Homolog of NCBI NO: 15240739 NR Description: lateral organ boundaries (LOB) domain protein 37
  misc_feature (1)..(110): Homolog of NCBI NO: 21553886 NR Description: unknown [Arabidopsis thaliana]
  misc_feature (1)..(110): Homolog of NCBI NO: 15229644 NR Description: lateral organ boundaries (LOB) domain protein,
  misc_feature (1)..(177): Homolog of NCBI NO: 15221429 NR Description: lateral organ boundaries (LOB) domain protein 42
  misc_feature (1)..(188): Homolog of NCBI NO: 34895540 NR Description: unnamed protein product [Oryza sativa (japonica
  misc_feature (1)..(144): Homolog of NCBI NO: 15219829 NR Description: lateral organ boundaries (LOB) domain family
  misc_feature (1)..(185): Homolog of NCBI NO: 34914608 NR Description: P0520B06.17 [Oryza sativa (japonica
  misc_feature (1)..(261): Homolog of NCBI NO: 32395577 NR Description: seed specific protein Bn15D17A [Brassica napus]
  misc_feature (1)..(261): Homolog of NCBI NO: 21554191 NR Description: unknown [Arabidopsis thaliana]
  misc_feature (1)..(261): Homolog of NCBI NO: 18396229 NR Description: lateral organ boundaries (LOB) domain protein 41
MSCNGCRVLRKGCSEDCSIRPCLAWIKSPEAQANATVFLAKFYGRAGLMNLINAGPNHLRPGIFRSLLHEACGRIVNPIYGSVGLLWSGNWQLCQDAVEAVMKGEPVKEIATDAATIGQGPPLKIYDIRHISKDDNSAAAATGSTDLKLAKTRRAKRVSTVAIQAESEGKSDEASHDSSLSHQSEIVAAHEGESKESESNVSEVLAFSPPAVKGSGEIKLDLTLRLEPVSRAYHVVPVKKRRIGVFGTCQKESTCKTELML

SEQ ID NO: 34863 - protein, 213 aa, Arabidopsis thaliana
  peptide (1)..(213): Ceres Seq. ID no. 13487525
  misc_feature (1)..(59): Pfam Name: Protein of unknown function DUF260 Pfam Description: Protein of unknown function DUF260
  misc_feature (1)..(64): Homolog of NCBI NO: 15240739 NR Description: lateral organ boundaries (LOB) domain protein 37
  misc_feature (1)..(62): Homolog of NCBI NO: 21553886 NR Description: unknown [Arabidopsis thaliana]
  misc_feature (1)..(62): Homolog of NCBI NO: 15229644 NR Description: lateral organ boundaries (LOB) domain protein,
  misc_feature (1)..(129): Homolog of NCBI NO: 15221429 NR Description: lateral organ boundaries (LOB) domain protein 42
  misc_feature (1)..(140): Homolog of NCBI NO: 34895540 NR Description: unnamed protein product [Oryza sativa (japonica
  misc_feature (1)..(96): Homolog of NCBI NO: 15219829 NR Description: lateral organ boundaries (LOB) domain family
  misc_feature (1)..(137): Homolog of NCBI NO: 34914608 NR Description: P0520B06.17 [Oryza sativa (japonica
  misc_feature (1)..(213): Homolog of NCBI NO: 32395577 NR Description: seed specific protein Bn15D17A [Brassica napus]
  misc_feature (1)..(213): Homolog of NCBI NO: 21554191 NR Description: unknown [Arabidopsis thaliana]
  misc_feature (1)..(213): Homolog of NCBI NO: 18396229 NR Description: lateral organ boundaries (LOB) domain protein 41
MNLINAGPNHLRPGIFRSLLHEACGRIVNPIYGSVGLLWSGNWQLCQDAVEAVMKGEPVKEIATDAATIGQGPPLKIYDIRHISKDDNSAAAATGSTDLKLAKTRRAKRVSTVAIQAESEGKSDEASHDSSLSHQSEIVAAHEGESKESESNVSEVLAFSPPAVKGSGEIKLDLTLRLEPVSRAYHVVPVKKRRIGVFGTCQKESTCKTELML

SEQ ID NO: 34864 - DNA, 1350 bp, Arabidopsis thaliana
  misc_feature (1)..(1350): Ceres Seq. ID no. 12579879
  misc_feature: MA Experiment ID: 108461 Result: Down-regulated in Transcription
  misc_feature: MA Experiment 108461 PARAMETER Experiment Name: At_Germinating_Seeds_cDNA_P Parameter: Age (day) Value: 1 vs. 0
  misc_feature: MA Experiment 108461 PARAMETER Experiment Name: At_Germinating_Seeds_cDNA_P Parameter: Tissue Value: Germinating Seeds
  misc_feature: MA Experiment ID: 108473 Result: Up-regulated in Transcription
  misc_feature: MA Experiment 108473 PARAMETER Experiment Name: At_Drought_Flowers_cDNA_P Parameter: Timepoint (hr) Value: 7 d
  misc_feature: MA Experiment 108473 PARAMETER Experiment Name: At_Drought_Flowers_cDNA_P Parameter: Tissue Value: Flower
  misc_feature: MA Experiment 108473 PARAMETER Experiment Name: At_Drought_Flowers_cDNA_P Parameter: Treatment Value: Drought vs. No Drought
  misc_feature: MA Experiment ID: 108561 Result: Up-regulated in Transcription
  misc_feature: MA Experiment 108561 PARAMETER Experiment Name: At_100uM_ABA_cDNA_P Parameter: Timepoint (hr) Value: 6
  misc_feature: MA Experiment 108561 PARAMETER Experiment Name: At_100uM_ABA_cDNA_P Parameter: Tissue Value: Aerial
  misc_feature: MA Experiment 108561 PARAMETER Experiment Name: At_100uM_ABA_cDNA_P Parameter: Treatment Value: 100uM ABA vs. No Treatment
  misc_feature: MA Experiment ID: 108572 Result: Up-regulated in Transcription
  misc_feature: MA Experiment 108572 PARAMETER Experiment Name: At_Drought_cDNA_P Parameter: Timepoint (hr) Value: 1
  misc_feature: MA Experiment 108572 PARAMETER Experiment Name: At_Drought_cDNA_P Parameter: Tissue Value: Aerial
  misc_feature: MA Experiment 108572 PARAMETER Experiment Name: At_Drought_cDNA_P Parameter: Treatment Value: Drought vs. No Drought
  misc_feature: MA Experiment ID: 108573 Result: Up-regulated in Transcription
  misc_feature: MA Experiment 108573 PARAMETER Experiment Name: At_Drought_cDNA_P Parameter: Timepoint (hr) Value: 6
  misc_feature: MA Experiment 108573 PARAMETER Experiment Name: At_Drought_cDNA_P Parameter: Tissue Value: Aerial
  misc_feature: MA Experiment 108573 PARAMETER Experiment Name: At_Drought_cDNA_P Parameter: Treatment Value: Drought vs. No Drought
  misc_feature: MA Experiment ID: 108574 Result: Up-regulated in Transcription
  misc_feature: MA Experiment 108574 PARAMETER Experiment Name: At_Wounding__cDNA_P Parameter: Timepoint (hr) Value: 1
  misc_feature: MA Experiment 108574 PARAMETER Experiment Name: At_Wounding__cDNA_P Parameter: Tissue Value: Aerial
  misc_feature: MA Experiment 108574 PARAMETER Experiment Name: At_Wounding__cDNA_P Parameter: Treatment Value: Wounding vs. No Wounding
  misc_feature: MA Experiment ID: 108576 Result: Up-regulated in Transcription
  misc_feature: MA Experiment 108576 PARAMETER Experiment Name: At_42deg_Heat_cDNA_P Parameter: Temperature (deg C) Value: 42 vs. 22
  misc_feature: MA Experiment 108576 PARAMETER Experiment Name: At_42deg_Heat_cDNA_P Parameter: Timepoint (hr) Value: 1
  misc_feature: MA Experiment 108576 PARAMETER Experiment Name: At_42deg_Heat_cDNA_P Parameter: Tissue Value: Aerial
  misc_feature: MA Experiment ID: 108577 Result: Up-regulated in Transcription
  misc_feature: MA Experiment 108577 PARAMETER Experiment Name: At_42deg_Heat_cDNA_P Parameter: Temperature (deg C) Value: 42 vs. 22
  misc_feature: MA Experiment 108577 PARAMETER Experiment Name: At_42deg_Heat_cDNA_P Parameter: Timepoint (hr) Value: 6
  misc_feature: MA Experiment 108577 PARAMETER Experiment Name: At_42deg_Heat_cDNA_P Parameter: Tissue Value: Aerial
  misc_feature: MA Experiment ID: 108585 Result: Up-regulated in Transcription
  misc_feature: MA Experiment 108585 PARAMETER Experiment Name: At_5mM_NaNP_cDNA_P Parameter: Timepoint (hr) Value: 6
  misc_feature: MA Experiment 108585 PARAMETER Experiment Name: At_5mM_NaNP_cDNA_P Parameter: Tissue Value: Aerial
  misc_feature: MA Experiment 108585 PARAMETER Experiment Name: At_5mM_NaNP_cDNA_P Parameter: Treatment Value: null
  misc_feature: MA Experiment ID: 108594 Result: Down-regulated in Transcription
  misc_feature: MA Experiment 108594 PARAMETER Experiment Name: At_Ler-rhl_Root_cDNA_P Parameter: Plant Line Value: null
  misc_feature: MA Experiment ID: 108595 Result: Up-regulated in Transcription
  misc_feature: MA Experiment 108595 PARAMETER Experiment Name: At_Ler-pi_Ovule_cDNA_P Parameter: Plant Line Value: null
  misc_feature: MA Experiment ID: 108607 Result: Up-regulated in Transcription
  misc_feature: MA Experiment 108607 PARAMETER Experiment Name: At_100uM_ABA_cDNA_P Parameter: Timepoint (hr) Value: 4
  misc_feature: MA Experiment 108607 PARAMETER Experiment Name: At_100uM_ABA_cDNA_P Parameter: Tissue Value: Aerial
  misc_feature: MA Experiment 108607 PARAMETER Experiment Name: At_100uM_ABA_cDNA_P Parameter: Treatment Value: 100uM ABA vs. No Treatment
  misc_feature: MA Experiment ID: 108608 Result: Up-regulated in Transcription
  misc_feature: MA Experiment 108608 PARAMETER Experiment Name: At_100uM_ABA_cDNA_P Parameter: Timepoint (hr) Value: 1
  misc_feature: MA Experiment 108608 PARAMETER Experiment Name: At_100uM_ABA_cDNA_P Parameter: Tissue Value: Aerial
  misc_feature: MA Experiment 108608 PARAMETER Experiment Name: At_100uM_ABA_cDNA_P Parameter: Treatment Value: 100uM ABA vs. No Treatment
  misc_feature: MA Experiment ID: 20000093 Result: Up-regulated in Transcription
  misc_feature: MA Experiment 20000093 PARAMETER Experiment Name: At_42deg_Heat_cDNA_P Parameter: Temperature (deg C) Value: 42 vs. 22
  misc_feature: MA Experiment 20000093 PARAMETER Experiment Name: At_42deg_Heat_cDNA_P Parameter: Timepoint (hr) Value: 0.5
  misc_feature: MA Experiment 20000093 PARAMETER Experiment Name: At_42deg_Heat_cDNA_P Parameter: Tissue Value: Aerial
  misc_feature: MA Experiment ID: 20000111 Result: Up-regulated in Transcription
  misc_feature: MA Experiment 20000111 PARAMETER Experiment Name: At_42deg_Heat_cDNA_P Parameter: Temperature (deg C) Value: 42 vs. 22
  misc_feature: MA Experiment 20000111 PARAMETER Experiment Name: At_42deg_Heat_cDNA_P Parameter: Timepoint (hr) Value: 6
  misc_feature: MA Experiment 20000111 PARAMETER Experiment Name: At_42deg_Heat_cDNA_P Parameter: Tissue Value: Aerial
  misc_feature: MA Experiment ID: 20000113 Result: Up-regulated in Transcription
  misc_feature: MA Experiment 20000113 PARAMETER Experiment Name: At_42deg_Heat_cDNA_P Parameter: Temperature (deg C) Value: 42 vs. 22
  misc_feature: MA Experiment 20000113 PARAMETER Experiment Name: At_42deg_Heat_cDNA_P Parameter: Timepoint (hr) Value: 8
  misc_feature: MA Experiment 20000113 PARAMETER Experiment Name: At_42deg_Heat_cDNA_P Parameter: Tissue Value: Aerial
  misc_feature: MA Experiment ID: 20000144 Result: Up-regulated in Transcription
  misc_feature: MA Experiment 20000144 PARAMETER Experiment Name: At_42deg_Heat_cDNA_P Parameter: Temperature (deg C) Value: 42 vs. 22
  misc_feature: MA Experiment 20000144 PARAMETER Experiment Name: At_42deg_Heat_cDNA_P Parameter: Timepoint (hr) Value: 1
  misc_feature: MA Experiment 20000144 PARAMETER Experiment Name: At_42deg_Heat_cDNA_P Parameter: Tissue Value: Aerial
  misc_feature: MA Experiment ID: 20000166 Result: Up-regulated in Transcription
  misc_feature: MA Experiment 20000166 PARAMETER Experiment Name: At_100uM_ABA_P Parameter: Age (day) Value: 14
  misc_feature: MA Experiment 20000166 PARAMETER Experiment Name: At_100uM_ABA_P Parameter: Organism Value: A. thaliana
  misc_feature: MA Experiment 20000166 PARAMETER Experiment Name: At_100uM_ABA_P Parameter: Plant Line Value: WS
  misc_feature: MA Experiment 20000166 PARAMETER Experiment Name: At_100uM_ABA_P Parameter: Timepoint (hr) Value: 1
  misc_feature: MA Experiment 20000166 PARAMETER Experiment Name: At_100uM_ABA_P Parameter: Tissue Value: Aerial
  misc_feature: MA Experiment 20000166 PARAMETER Experiment Name: At_100uM_ABA_P Parameter: Treatment Value: 100uM ABA vs. No Treatment
  misc_feature: MA Experiment ID: 20000173 Result: Up-regulated in Transcription
  misc_feature: MA Experiment 20000173 PARAMETER Experiment Name: At_42deg_Heat_P Parameter: Age (day) Value: 14
  misc_feature: MA Experiment 20000173 PARAMETER Experiment Name: At_42deg_Heat_P Parameter: Organism Value: A. thaliana
  misc_feature: MA Experiment 20000173 PARAMETER Experiment Name: At_42deg_Heat_P Parameter: Plant Line Value: WS
  misc_feature: MA Experiment 20000173 PARAMETER Experiment Name: At_42deg_Heat_P Parameter: Temperature (deg C) Value: 42 vs. 22
  misc_feature: MA Experiment 20000173 PARAMETER Experiment Name: At_42deg_Heat_P Parameter: Timepoint (hr) Value: 6
  misc_feature: MA Experiment 20000173 PARAMETER Experiment Name: At_42deg_Heat_P Parameter: Tissue Value: Aerial
  misc_feature: MA Experiment ID: 20000182 Result: Up-regulated in Transcription
  misc_feature: MA Experiment 20000182 PARAMETER Experiment Name: At_2mM_SA_P Parameter: Age (day) Value: 14
  misc_feature: MA Experiment 20000182 PARAMETER Experiment Name: At_2mM_SA_P Parameter: Organism Value: A. thaliana
  misc_feature: MA Experiment 20000182 PARAMETER Experiment Name: At_2mM_SA_P Parameter: Plant Line Value: WS
  misc_feature: MA Experiment 20000182 PARAMETER Experiment Name: At_2mM_SA_P Parameter: Timepoint (hr) Value: 6
  misc_feature: MA Experiment 20000182 PARAMETER Experiment Name: At_2mM_SA_P Parameter: Tissue Value: Aerial
  misc_feature: MA Experiment 20000182 PARAMETER Experiment Name: At_2mM_SA_P Parameter: Treatment Value: 2mM SA vs. No Treatment
  misc_feature: MA Experiment ID: 20000268 Result: Up-regulated in Transcription
  misc_feature: MA Experiment 20000268 PARAMETER Experiment Name: At_100mM_NaCl__P Parameter: Age (day) Value: 14
  misc_feature: MA Experiment 20000268 PARAMETER Experiment Name: At_100mM_NaCl__P Parameter: Organism Value: A. thaliana
  misc_feature: MA Experiment 20000268 PARAMETER Experiment Name: At_100mM_NaCl__P Parameter: Plant Line Value: WS
  misc_feature: MA Experiment 20000268 PARAMETER Experiment Name: At_100mM_NaCl__P Parameter: Timepoint (hr) Value: 6
  misc_feature: MA Experiment 20000268 PARAMETER Experiment Name: At_100mM_NaCl__P Parameter: Tissue Value: Whole Plant
  misc_feature: MA Experiment 20000268 PARAMETER Experiment Name: At_100mM_NaCl__P Parameter: Treatment Value: 100mM NaCl vs. No Treatment
  misc_feature: MA Experiment ID: 20000286 Result: Down-regulated in Transcription
  misc_feature: MA Experiment 20000286 PARAMETER Experiment Name: At_Open_Flower_P Parameter: Age (day) Value: 21
  misc_feature: MA Experiment 20000286 PARAMETER Experiment Name: At_Open_Flower_P Parameter: Plant Line Value: WS
  misc_feature: MA Experiment 20000286 PARAMETER Experiment Name: At_Open_Flower_P Parameter: Tissue Value: Half Open vs. Whole Plant
  misc_feature: MA Experiment ID: 20000306 Result: Down-regulated in Transcription
  misc_feature: MA Experiment 20000306 PARAMETER Experiment Name: At_Germinating_Seeds_Sub_P Parameter: Age (hr) Value: 6 vs. 0
  misc_feature: MA Experiment 20000306 PARAMETER Experiment Name: At_Germinating_Seeds_Sub_P Parameter: Organism Value: A. thaliana
  misc_feature: MA Experiment 20000306 PARAMETER Experiment Name: At_Germinating_Seeds_Sub_P Parameter: Plant Line Value: WS
  misc_feature: MA Experiment 20000306 PARAMETER Experiment Name: At_Germinating_Seeds_Sub_P Parameter: Tissue Value: Germinating Seeds
  misc_feature: MA Experiment ID: 20000307 Result: Down-regulated in Transcription
  misc_feature: MA Experiment 20000307 PARAMETER Experiment Name: At_Germinating_Seeds_Sub_P Parameter: Age (hr) Value: 24 vs. 0
  misc_feature: MA Experiment 20000307 PARAMETER Experiment Name: At_Germinating_Seeds_Sub_P Parameter: Organism Value: A. thaliana
  misc_feature: MA Experiment 20000307 PARAMETER Experiment Name: At_Germinating_Seeds_Sub_P Parameter: Plant Line Value: WS
  misc_feature: MA Experiment 20000307 PARAMETER Experiment Name: At_Germinating_Seeds_Sub_P Parameter: Tissue Value: Germinating Seeds
  misc_feature: MA Experiment ID: 20000327 Result: Up-regulated in Transcription
  misc_feature: MA Experiment 20000327 PARAMETER Experiment Name: At_42deg_Heat_Sub_P Parameter: Age (day) Value: 14
  misc_feature: MA Experiment 20000327 PARAMETER Experiment Name: At_42deg_Heat_Sub_P Parameter: Organism Value: A. thaliana
  misc_feature: MA Experiment 20000327 PARAMETER Experiment Name: At_42deg_Heat_Sub_P Parameter: Plant Line Value: WS
  misc_feature: MA Experiment 20000327 PARAMETER Experiment Name: At_42deg_Heat_Sub_P Parameter: Temperature (deg C) Value: 42 vs. 22
  misc_feature: MA Experiment 20000327 PARAMETER Experiment Name: At_42deg_Heat_Sub_P Parameter: Timepoint (hr) Value: 1
  misc_feature: MA Experiment 20000327 PARAMETER Experiment Name: At_42deg_Heat_Sub_P Parameter: Tissue Value: Aerial
  misc_feature: MA Experiment ID: 20000328 Result: Up-regulated in Transcription
  misc_feature: MA Experiment 20000328 PARAMETER Experiment Name: At_42deg_Heat_Sub_P Parameter: Age (day) Value: 14
  misc_feature: MA Experiment 20000328 PARAMETER Experiment Name: At_42deg_Heat_Sub_P Parameter: Organism Value: A. thaliana
  misc_feature: MA Experiment 20000328 PARAMETER Experiment Name: At_42deg_Heat_Sub_P Parameter: Plant Line Value: WS
  misc_feature: MA Experiment 20000328 PARAMETER Experiment Name: At_42deg_Heat_Sub_P Parameter: Temperature (deg C) Value: 42 vs. 22
  misc_feature: MA Experiment 20000328 PARAMETER Experiment Name: At_42deg_Heat_Sub_P Parameter: Timepoint (hr) Value: 6
  misc_feature: MA Experiment 20000328 PARAMETER Experiment Name: At_42deg_Heat_Sub_P Parameter: Tissue Value: Aerial
  misc_feature: MA Experiment ID: 20000346 Result: Up-regulated in Transcription
  misc_feature: MA Experiment 20000346 PARAMETER Experiment Name: At_2mM_SA_Sub_P Parameter: Age (day) Value: 14
  misc_feature: MA Experiment 20000346 PARAMETER Experiment Name: At_2mM_SA_Sub_P Parameter: Organism Value: A. thaliana
  misc_feature: MA Experiment 20000346 PARAMETER Experiment Name: At_2mM_SA_Sub_P Parameter: Plant Line Value: WS
  misc_feature: MA Experiment 20000346 PARAMETER Experiment Name: At_2mM_SA_Sub_P Parameter: Timepoint (hr) Value: 1
  misc_feature: MA Experiment 20000346 PARAMETER Experiment Name: At_2mM_SA_Sub_P Parameter: Tissue Value: Aerial
  misc_feature: MA Experiment 20000346 PARAMETER Experiment Name: At_2mM_SA_Sub_P Parameter: Treatment Value: 2mM SA vs. No Treatment
  misc_feature: MA Experiment ID: 20000347 Result: Up-regulated in Transcription
  misc_feature: MA Experiment 20000347 PARAMETER Experiment Name: At_2mM_SA_Sub_P Parameter: Age (day) Value: 14
  misc_feature: MA Experiment 20000347 PARAMETER Experiment Name: At_2mM_SA_Sub_P Parameter: Organism Value: A. thaliana
  misc_feature: MA Experiment 20000347 PARAMETER Experiment Name: At_2mM_SA_Sub_P Parameter: Plant Line Value: WS
  misc_feature: MA Experiment 20000347 PARAMETER Experiment Name: At_2mM_SA_Sub_P Parameter: Timepoint (hr) Value: 6
  misc_feature: MA Experiment 20000347 PARAMETER Experiment Name: At_2mM_SA_Sub_P Parameter: Tissue Value: Aerial
  misc_feature: MA Experiment 20000347 PARAMETER Experiment Name: At_2mM_SA_Sub_P Parameter: Treatment Value: 2mM SA vs. No Treatment
  misc_feature: MA Experiment ID: 20000355 Result: Down-regulated in Transcription
  misc_feature: MA Experiment 20000355 PARAMETER Experiment Name: At_Siliques_Sub_P Parameter: Age (day) Value: 21
  misc_feature: MA Experiment 20000355 PARAMETER Experiment Name: At_Siliques_Sub_P Parameter: Organism Value: A. thaliana
  misc_feature: MA Experiment 20000355 PARAMETER Experiment Name: At_Siliques_Sub_P Parameter: Plant Line Value: WS
  misc_feature: MA Experiment 20000355 PARAMETER Experiment Name: At_Siliques_Sub_P Parameter: Tissue Value: Less Than 5mm Siliques vs. Whole Plant
  misc_feature: MA Experiment ID: 20000436 Result: Up-regulated in Transcription
  misc_feature: MA Experiment 20000436 PARAMETER Experiment Name: At_Drought_P Parameter: Age (day) Value: 7
  misc_feature: MA Experiment 20000436 PARAMETER Experiment Name: At_Drought_P Parameter: Organism Value: A. thaliana
  misc_feature: MA Experiment 20000436 PARAMETER Experiment Name: At_Drought_P Parameter: Plant Line Value: WS
  misc_feature: MA Experiment 20000436 PARAMETER Experiment Name: At_Drought_P Parameter: Timepoint (hr) Value: 12
  misc_feature: MA Experiment 20000436 PARAMETER Experiment Name: At_Drought_P Parameter: Tissue Value: Whole Plant
  misc_feature: MA Experiment 20000436 PARAMETER Experiment Name: At_Drought_P Parameter: Treatment Value: Drought vs. No Drought
  misc_feature: MA Experiment ID: 20000437 Result: Up-regulated in Transcription
  misc_feature: MA Experiment 20000437 PARAMETER Experiment Name: At_Drought_P Parameter: Age (day) Value: 8
  misc_feature: MA Experiment 20000437 PARAMETER Experiment Name: At_Drought_P Parameter: Organism Value: A. thaliana
  misc_feature: MA Experiment 20000437 PARAMETER Experiment Name: At_Drought_P Parameter: Plant Line Value: WS
  misc_feature: MA Experiment 20000437 PARAMETER Experiment Name: At_Drought_P Parameter: Timepoint (hr) Value: 24
  misc_feature: MA Experiment 20000437 PARAMETER Experiment Name: At_Drought_P Parameter: Tissue Value: Whole Plant
  misc_feature: MA Experiment 20000437 PARAMETER Experiment Name: At_Drought_P Parameter: Treatment Value: Drought vs. No Drought
  misc_feature: MA Experiment ID: 20001556 Result: Up-regulated in Transcription
  misc_feature: MA Experiment 20001556 PARAMETER Experiment Name: At_Drought_Soil_Dry_P Parameter: Age (day) Value: 26
  misc_feature: MA Experiment 20001556 PARAMETER Experiment Name: At_Drought_Soil_Dry_P Parameter: Organism Value: A. thaliana
  misc_feature: MA Experiment 20001556 PARAMETER Experiment Name: At_Drought_Soil_Dry_P Parameter: Plant Line Value: WS
  misc_feature: MA Experiment 20001556 PARAMETER Experiment Name: At_Drought_Soil_Dry_P Parameter: Post Timepoint (hr) Value: None
  misc_feature: MA Experiment 20001556 PARAMETER Experiment Name: At_Drought_Soil_Dry_P Parameter: Post-Treatment Value: None
  misc_feature: MA Experiment 20001556 PARAMETER Experiment Name: At_Drought_Soil_Dry_P Parameter: Timepoint (day) Value: 12
  misc_feature: MA Experiment 20001556 PARAMETER Experiment Name: At_Drought_Soil_Dry_P Parameter: Treatment Value: Drought vs. No Drought
  misc_feature: MA Experiment ID: 20001557 Result: Up-regulated in Transcription
  misc_feature: MA Experiment 20001557 PARAMETER Experiment Name: At_Drought_Soil_Dry_P Parameter: Age (day) Value: 27
  misc_feature: MA Experiment 20001557 PARAMETER Experiment Name: At_Drought_Soil_Dry_P Parameter: Organism Value: A. thaliana
  misc_feature: MA Experiment 20001557 PARAMETER Experiment Name: At_Drought_Soil_Dry_P Parameter: Plant Line Value: WS
  misc_feature: MA Experiment 20001557 PARAMETER Experiment Name: At_Drought_Soil_Dry_P Parameter: Post Timepoint (hr) Value: 3
  misc_feature: MA Experiment 20001557 PARAMETER Experiment Name: At_Drought_Soil_Dry_P Parameter: Post-Treatment Value: Re-Water vs. No Drought
  misc_feature: MA Experiment 20001557 PARAMETER Experiment Name: At_Drought_Soil_Dry_P Parameter: Timepoint (day) Value: 13
  misc_feature: MA Experiment 20001557 PARAMETER Experiment Name: At_Drought_Soil_Dry_P Parameter: Treatment Value: Drought vs. No Drought
  misc_feature: MA Experiment ID: 20001559 Result: Up-regulated in Transcription
  misc_feature: MA Experiment 20001559 PARAMETER Experiment Name: At_Drought_Soil_Dry_P Parameter: Age (day) Value: 28
  misc_feature: MA Experiment 20001559 PARAMETER Experiment Name: At_Drought_Soil_Dry_P Parameter: Organism Value: A. thaliana
  misc_feature: MA Experiment 20001559 PARAMETER Experiment Name: At_Drought_Soil_Dry_P Parameter: Plant Line Value: WS
  misc_feature: MA Experiment 20001559 PARAMETER Experiment Name: At_Drought_Soil_Dry_P Parameter: Post Timepoint (hr) Value: 29
  misc_feature: MA Experiment 20001559 PARAMETER Experiment Name: At_Drought_Soil_Dry_P Parameter: Post-Treatment Value: Re-Water vs. No Drought
  misc_feature: MA Experiment 20001559 PARAMETER Experiment Name: At_Drought_Soil_Dry_P Parameter: Timepoint (day) Value: 14
  misc_feature: MA Experiment 20001559 PARAMETER Experiment Name: At_Drought_Soil_Dry_P Parameter: Treatment Value: Drought vs. No Drought
  misc_feature: MA Experiment ID: 20001560 Result: Up-regulated in Transcription
  misc_feature: MA Experiment 20001560 PARAMETER Experiment Name: At_Drought_Soil_Dry_P Parameter: Age (day) Value: 28
  misc_feature: MA Experiment 20001560 PARAMETER Experiment Name: At_Drought_Soil_Dry_P Parameter: Organism Value: A. thaliana
  misc_feature: MA Experiment 20001560 PARAMETER Experiment Name: At_Drought_Soil_Dry_P Parameter: Plant Line Value: WS
  misc_feature: MA Experiment 20001560 PARAMETER Experiment Name: At_Drought_Soil_Dry_P Parameter: Post Timepoint (hr) Value: None
  misc_feature: MA Experiment 20001560 PARAMETER Experiment Name: At_Drought_Soil_Dry_P Parameter: Post-Treatment Value: None
  misc_feature: MA Experiment 20001560 PARAMETER Experiment Name: At_Drought_Soil_Dry_P Parameter: Timepoint (day) Value: 14
  misc_feature: MA Experiment 20001560 PARAMETER Experiment Name: At_Drought_Soil_Dry_P Parameter: Treatment Value: Drought vs. No Drought
  misc_feature: MA Experiment ID: 20001904 Result: Up-regulated in Transcription
  misc_feature: MA Experiment 20001904 PARAMETER Experiment Name: At_Drought_Reproduction_P Parameter: Age (day) Value: 37
  misc_feature: MA Experiment 20001904 PARAMETER Experiment Name: At_Drought_Reproduction_P Parameter: Organism Value: A. thaliana
  misc_feature: MA Experiment 20001904 PARAMETER Experiment Name: At_Drought_Reproduction_P Parameter: Plant Line Value: WS
  misc_feature: MA Experiment 20001904 PARAMETER Experiment Name: At_Drought_Reproduction_P Parameter: Timepoint (day) Value: 7
  misc_feature: MA Experiment 20001904 PARAMETER Experiment Name: At_Drought_Reproduction_P Parameter: Tissue Value: Rosettes
  misc_feature: MA Experiment 20001904 PARAMETER Experiment Name: At_Drought_Reproduction_P Parameter: Treatment Value: Drought vs. No Drought
  misc_feature: MA Experiment ID: 20001905 Result: Up-regulated in Transcription
  misc_feature: MA Experiment 20001905 PARAMETER Experiment Name: At_Drought_Reproduction_P Parameter: Age (day) Value: 40
  misc_feature: MA Experiment 20001905 PARAMETER Experiment Name: At_Drought_Reproduction_P Parameter: Organism Value: A. thaliana
  misc_feature: MA Experiment 20001905 PARAMETER Experiment Name: At_Drought_Reproduction_P Parameter: Plant Line Value: WS
  misc_feature: MA Experiment 20001905 PARAMETER Experiment Name: At_Drought_Reproduction_P Parameter: Timepoint (day) Value: 10
  misc_feature: MA Experiment 20001905 PARAMETER Experiment Name: At_Drought_Reproduction_P Parameter: Tissue Value: Rosettes
  misc_feature: MA Experiment 20001905 PARAMETER Experiment Name: At_Drought_Reproduction_P Parameter: Treatment Value: Drought vs. No Drought
  misc_feature: MA Experiment ID: 20001906 Result: Up-regulated in Transcription
  misc_feature: MA Experiment 20001906 PARAMETER Experiment Name: At_Drought_Reproduction_P Parameter: Age (day) Value: 35
  misc_feature: MA Experiment 20001906 PARAMETER Experiment Name: At_Drought_Reproduction_P Parameter: Organism Value: A. thaliana
  misc_feature: MA Experiment 20001906 PARAMETER Experiment Name: At_Drought_Reproduction_P Parameter: Plant Line Value: WS
  misc_feature: MA Experiment 20001906 PARAMETER Experiment Name: At_Drought_Reproduction_P Parameter: Timepoint (day) Value: 5
  misc_feature: MA Experiment 20001906 PARAMETER Experiment Name: At_Drought_Reproduction_P Parameter: Tissue Value: Siliques
  misc_feature: MA Experiment 20001906 PARAMETER Experiment Name: At_Drought_Reproduction_P Parameter: Treatment Value: Drought vs. No Drought
  misc_feature: MA Experiment ID: 20001908 Result: Up-regulated in Transcription
  misc_feature: MA Experiment 20001908 PARAMETER Experiment Name: At_Drought_Reproduction_P Parameter: Age (day) Value: 40
  misc_feature: MA Experiment 20001908 PARAMETER Experiment Name: At_Drought_Reproduction_P Parameter: Organism Value: A. thaliana
  misc_feature: MA Experiment 20001908 PARAMETER Experiment Name: At_Drought_Reproduction_P Parameter: Plant Line Value: WS
  misc_feature: MA Experiment 20001908 PARAMETER Experiment Name: At_Drought_Reproduction_P Parameter: Timepoint (day) Value: 10
  misc_feature: MA Experiment 20001908 PARAMETER Experiment Name: At_Drought_Reproduction_P Parameter: Tissue Value: Siliques
  misc_feature: MA Experiment 20001908 PARAMETER Experiment Name: At_Drought_Reproduction_P Parameter: Treatment Value: Drought vs. No Drought
  misc_feature: MA Experiment ID: 20001911 Result: Up-regulated in Transcription
  misc_feature: MA Experiment 20001911 PARAMETER Experiment Name: At_Drought_Reproduction_P Parameter: Age (day) Value: 40
  misc_feature: MA Experiment 20001911 PARAMETER Experiment Name: At_Drought_Reproduction_P Parameter: Organism Value: A. thaliana
  misc_feature: MA Experiment 20001911 PARAMETER Experiment Name: At_Drought_Reproduction_P Parameter: Plant Line Value: WS
  misc_feature: MA Experiment 20001911 PARAMETER Experiment Name: At_Drought_Reproduction_P Parameter: Timepoint (day) Value: 10
  misc_feature: MA Experiment 20001911 PARAMETER Experiment Name: At_Drought_Reproduction_P Parameter: Tissue Value: Flowers
  misc_feature: MA Experiment 20001911 PARAMETER Experiment Name: At_Drought_Reproduction_P Parameter: Treatment Value: Drought vs. No Drought
aagtttcaaaaacgccaagtttcagaggtagagagagagatactacaattgattaggataggatcaggatcatcctcaacaacctcctcctaattcctcctccattcatagtaacaataatattaagaaagagggtaaactatgtcagaattattacagttgcctccaggtttccgatttcaccctaccgatgaagagcttgtcatgcactatctctgccgcaaatgtgcctctcagtccatcgccgttccgatcatcgctgagatcgatctctacaaatacgatccatgggagcttcctggtttagccttgtatggtgagaaggaatggtacttcttctctcccagggacagaaaatatcccaacggttcgcgtcctaaccggtccgctggttctggttactggaaagctaccggagctgataaaccgatcggactacctaaaccggtcggaattaagaaagctcttgttttctacgccggcaaagctccaaagggagagaaaaccaattggatcatgcacgagtaccgtctcgccgacgttgaccggtccgttcgcaagaagaagaatagtctcaggctggatgattgggttctctgccggatttacaacaaaaaaggagctaccgagaggcggggaccaccgcctccggttgtttacggcgacgaaatcatggaggagaagccgaaggtgacggagatggttatgcctccgccgccgcaacagacaagtgagttcgcgtatttcgacacgtcggattcggtgccgaagctgcatactacggattcgagttgctcggagcaggtggtgtcgccggagttcacgagcgaggttcagagcgagcccaagtggaaagattggtcggccgtaagtaatgacaataacaatacccttgattttgggtttaattacattgatgccaccgtggataacgcgtttggaggaggagggagtagtaatcagatgtttccgctacaggatatgttcatgtacatgcagaagccttactagaagggaattcctttcctgccgccgaaacgcaacgcaaaacgaccctcgtttttgcgtttatggcaacacgagaccgttttatatggtcaatgagtgtgccgattcggccattagatttctgttcagtcttcgtttattctatagaccgtccgatttcagatcatccctaatcggacggtggtcgttggatgtatcagtagtgtattactgtgttaggtagaagaaaatccacttgttcttaaattggcataaaagtcagaagctaatatttatatgtgccgcaatcaatttaataaaaaaaaaaaaaaaaaaaaaaccctgacgtagctcgaggaattc

SEQ ID NO: 34865 - protein, 289 aa, Arabidopsis thaliana
  peptide (1)..(289): Ceres Seq. ID no. 12579880
  misc_feature (7)..(132): Pfam Name: No apical meristem (NAM) protein Pfam Description: No apical meristem (NAM) protein
  misc_feature (5)..(165): Homolog of NCBI NO: 15223963 NR Description: GRAB1-like protein
  misc_feature (1)..(237): Homolog of NCBI NO: 22326685 NR Description: Expressed protein
  misc_feature (1)..(289): Homolog of NCBI NO: 14485513 NR Description: putative NAC domain protein [Solanum tuberosum]
  misc_feature (1)..(289): Homolog of NCBI NO: 40647397 NR Description: NAC domain protein [Lycopersicon esculentum]
  misc_feature (5)..(289): Homolog of NCBI NO: 25458553 NR Description: OsNAC6 protein [imported] - rice
  misc_feature (1)..(289): Homolog of NCBI NO: 21105748 NR Description: nam-like protein 10 [Petunia x hybrida]
  misc_feature (61)..(289): Homolog of NCBI NO: 480618 NR Description: ATAF1 protein - Arabidopsis thaliana (fragment)
  misc_feature (1)..(289): Homolog of NCBI NO: 31322578 NR Description: NAC-domain protein 18 [Brassica napus]
  misc_feature (1)..(289): Homolog of NCBI NO: 31322576 NR Description: NAC-domain protein 5-11 [Brassica napus]
  misc_feature (1)..(289): Homolog of NCBI NO: 15223456 NR Description: NAC domain protein, putative
MSELLQLPPGFRFHPTDEELVMHYLCRKCASQSIAVPIIAEIDLYKYDPWELPGLALYGEKEWYFFSPRDRKYPNGSRPNRSAGSGYWKATGADKPIGLPKPVGIKKALVFYAGKAPKGEKTNWIMHEYRLADVDRSVRKKKNSLRLDDWVLCRIYNKKGATERRGPPPPVVYGDEIMEEKPKVTEMVMPPPPQQTSEFAYFDTSDSVPKLHTTDSSCSEQVVSPEFTSEVQSEPKWKDWSAVSNDNNNTLDFGFNYIDATVDNAFGGGGSSNQMFPLQDMFMYMQKPY

SEQ ID NO: 34866 - protein, 268 aa, Arabidopsis thaliana
  peptide (1)..(268): Ceres Seq. ID no. 12579881
  misc_feature (1)..(111): Pfam Name: No apical meristem (NAM) protein Pfam Description: No apical meristem (NAM) protein
  misc_feature (1)..(144): Homolog of NCBI NO: 15223963 NR Description: GRAB1-like protein
  misc_feature (1)..(216): Homolog of NCBI NO: 22326685 NR Description: Expressed protein
  misc_feature (1)..(268): Homolog of NCBI NO: 14485513 NR Description: putative NAC domain protein [Solanum tuberosum]
  misc_feature (1)..(268): Homolog of NCBI NO: 40647397 NR Description: NAC domain protein [Lycopersicon esculentum]
  misc_feature (1)..(268): Homolog of NCBI NO: 25458553 NR Description: OsNAC6 protein [imported] - rice
  misc_feature (1)..(268): Homolog of NCBI NO: 21105748 NR Description: nam-like protein 10 [Petunia x hybrida]
  misc_feature (40)..(268): Homolog of NCBI NO: 480618 NR Description: ATAF1 protein - Arabidopsis thaliana (fragment)
  misc_feature (1)..(268): Homolog of NCBI NO: 31322578 NR Description: NAC-domain protein 18 [Brassica napus]
  misc_feature (1)..(268): Homolog of NCBI NO: 31322576 NR Description: NAC-domain protein 5-11 [Brassica napus]
  misc_feature (1)..(268): Homolog of NCBI NO: 15223456 NR Description: NAC domain protein, putative
MHYLCRKCASQSIAVPIIAEIDLYKYDPWELPGLALYGEKEWYFFSPRDRKYPNGSRPNRSAGSGYWKATGADKPIGLPKPVGIKKALVFYAGKAPKGEKTNWIMHEYRLADVDRSVRKKKNSLRLDDWVLCRIYNKKGATERRGPPPPVVYGDEIMEEKPKVTEMVMPPPPQQTSEFAYFDTSDSVPKLHTTDSSCSEQVVSPEFTSEVQSEPKWKDWSAVSNDNNNTLDFGFNYIDATVDNAFGGGGSSNQMFPLQDMFMYMQKPY

SEQ ID NO: 34867 - protein, 164 aa, Arabidopsis thaliana
  peptide (1)..(164): Ceres Seq. ID no. 12579882
  misc_feature (1)..(40): Homolog of NCBI NO: 15223963 NR Description: GRAB1-like protein
  misc_feature (1)..(112): Homolog of NCBI NO: 22326685 NR Description: Expressed protein
  misc_feature (1)..(164): Homolog of NCBI NO: 14485513 NR Description: putative NAC domain protein [Solanum tuberosum]
  misc_feature (1)..(164): Homolog of NCBI NO: 40647397 NR Description: NAC domain protein [Lycopersicon esculentum]
  misc_feature (1)..(164): Homolog of NCBI NO: 25458553 NR Description: OsNAC6 protein [imported] - rice
  misc_feature (1)..(164): Homolog of NCBI NO: 21105748 NR Description: nam-like protein 10 [Petunia x hybrida]
  misc_feature (1)..(164): Homolog of NCBI NO: 480618 NR Description: ATAF1 protein - Arabidopsis thaliana (fragment)
  misc_feature (1)..(164): Homolog of NCBI NO: 31322578 NR Description: NAC-domain protein 18 [Brassica napus]
  misc_feature (1)..(164): Homolog of NCBI NO: 31322576 NR Description: NAC-domain protein 5-11 [Brassica napus]
  misc_feature (1)..(164): Homolog of NCBI NO: 15223456 NR Description: NAC domain protein, putative
MHEYRLADVDRSVRKKKNSLRLDDWVLCRIYNKKGATERRGPPPPVVYGDEIMEEKPKVTEMVMPPPPQQTSEFAYFDTSDSVPKLHTTDSSCSEQVVSPEFTSEVQSEPKWKDWSAVSNDNNNTLDFGFNYIDATVDNAFGGGGSSNQMFPLQDMFMYMQKPY

SEQ ID NO: 34868 - DNA, 1665 bp, Arabidopsis thaliana
  misc_feature (1)..(1665): Ceres Seq. ID no. 12335652
  misc_feature: MA Experiment ID: 108585 Result: Up-regulated in Transcription
  misc_feature: MA Experiment 108585 PARAMETER Experiment Name: At_5mM_NaNP_cDNA_P Parameter: Timepoint (hr) Value: 6
  misc_feature: MA Experiment 108585 PARAMETER Experiment Name: At_5mM_NaNP_cDNA_P Parameter: Tissue Value: Aerial
  misc_feature: MA Experiment 108585 PARAMETER Experiment Name: At_5mM_NaNP_cDNA_P Parameter: Treatment Value: null
  misc_feature: MA Experiment ID: 20000087 Result: Down-regulated in Transcription
  misc_feature: MA Experiment 20000087 PARAMETER Experiment Name: At_100uM_ABA_Mutants_cDNA_P Parameter: Plant Line Value: WS
  misc_feature: MA Experiment 20000087 PARAMETER Experiment Name: At_100uM_ABA_Mutants_cDNA_P Parameter: Timepoint (hr) Value: 6
  misc_feature: MA Experiment 20000087 PARAMETER Experiment Name: At_100uM_ABA_Mutants_cDNA_P Parameter: Tissue Value: Aerial
  misc_feature: MA Experiment 20000087 PARAMETER Experiment Name: At_100uM_ABA_Mutants_cDNA_P Parameter: Treatment Value: 100uM ABA vs. No Treatment
  misc_feature: MA Experiment ID: 20000113 Result: Down-regulated in Transcription
  misc_feature: MA Experiment 20000113 PARAMETER Experiment Name: At_42deg_Heat_cDNA_P Parameter: Temperature (deg C) Value: 42 vs. 22
  misc_feature: MA Experiment 20000113 PARAMETER Experiment Name: At_42deg_Heat_cDNA_P Parameter: Timepoint (hr) Value: 8
  misc_feature: MA Experiment 20000113 PARAMETER Experiment Name: At_42deg_Heat_cDNA_P Parameter: Tissue Value: Aerial
  misc_feature: MA Experiment ID: 20000437 Result: Up-regulated in Transcription
  misc_feature: MA Experiment 20000437 PARAMETER Experiment Name: At_Drought_P Parameter: Age (day) Value: 8
  misc_feature: MA Experiment 20000437 PARAMETER Experiment Name: At_Drought_P Parameter: Organism Value: A. thaliana
  misc_feature: MA Experiment 20000437 PARAMETER Experiment Name: At_Drought_P Parameter: Plant Line Value: WS
  misc_feature: MA Experiment 20000437 PARAMETER Experiment Name: At_Drought_P Parameter: Timepoint (hr) Value: 24
  misc_feature: MA Experiment 20000437 PARAMETER Experiment Name: At_Drought_P Parameter: Tissue Value: Whole Plant
  misc_feature: MA Experiment 20000437 PARAMETER Experiment Name: At_Drought_P Parameter: Treatment Value: Drought vs. No Drought
  misc_feature: MA Experiment ID: 20000794 Result: Up-regulated in Transcription
  misc_feature: MA Experiment 20000794 PARAMETER Experiment Name: At_Petals_P Parameter: Age (day) Value: 23-25 days
  misc_feature: MA Experiment 20000794 PARAMETER Experiment Name: At_Petals_P Parameter: Plant Line Value: WS
  misc_feature: MA Experiment 20000794 PARAMETER Experiment Name: At_Petals_P Parameter: Tissue Value: Petals vs. Whole plant
ctgattacgattcaatcctctccgatcgttggcctcctgtttccgttttactcgacatcgttccgacgacttttgacctggaatcgacgcagtgacttcaattcaactattgcacttggtttgttggcaatggacaaaggagcacctcctagtatttttgtgaatgatgggtcattcatggaaagattcagacagcttcaacaggagaaagataaagacaaggataaggttgtccaagttgaggattctaagccggtgaagattatatcaaatcccaaacctgctgctaataaaatttccattggattaaagcccaatgatgcccagaagaaaggtggtaagcttgctttcagcttgaagcaaaagtctaagcttcttgcacctcctgtgaagcttggtacagaagaagatgaggatgatgaggatgttaaacatgaacaaggctttggatccgtaaagcgtcaaaagttagagcagagagacacacctgtaaagtcagcaaaagtatcggatgttgcaccacctccgcccagtgatcctactgtgaagaaagttgctgataaactagcaagttttgttgctaagcatggaaggccatttgagcacattacacggcaaaagaatcctggggatacaccatttaaatttctttttgacgagaactgtgcggactacaagtactatgtattcaggctggctgaagaggaaaaattaatttcacaaaccaaggattctggtgtacttcacagtggtgatgcaggctcgcgaacgtccacagcagcaatccctttgcaaaagccagcttatcaacaaacaggatatcagatccctgcctcagctctctatgatactcctgtggaacctggagcttcttctagatctgctcaggcatcaattacaagacccagcgacagtgactcctttagtgggccgaggggtgcagaccctctatcaatgatggagttttacatgaagaaggctgcccaagaagagaaaatgagacgtcctaggcagtcaaaagacgaaatgcctccaccagcttcccttcaaggcccatctgaaacttcctccacagaccctggaaagagaggtcatcacatgggtgattatatcccacttgaggagctagataagttcctttcaaagtgcaatgacgcagctgcacaaaaagccacaaaggaggctgctgagaaagcgaagatccaagcagataatgttggacataaactcttgtcaaaaatgggttggaaagaaggtgaaggtataggaagctccagaaagggtatggcagaccctataatggcaggcgatgtaaagacaaacaacttgggagttggtgcttccgctccaggagaagtcaagcctgaggatgatatatacgagcagtacaagaagcggatgatgctgggttacaaacacagacccaatccactgggaaatcccaggaaggcgtattactaaggatcaaatcaatgtgttatgcgcaattattatctttggttcacctcagcaccgtctgagctttgcttttctattataaagaatgttcaagcttttagattactgatatattgaagtgttggtatgcattgaatttgcgtttcagtgtgcaaatagatctctttgacagacatatcagttgaaatacaatggatttgttattgc

SEQ ID NO: 34869 - protein, 486 aa, Arabidopsis thaliana
  peptide (1)..(486): Ceres Seq. ID no. 12335653
  misc_feature (183)..(237): Pfam Name: Surp module Pfam Description: Surp module
  misc_feature (358)..(486): Homolog of NCBI NO: 18482486 NR Description: RNA-binding protein splice variant a [Homo
  misc_feature (144)..(303): Homolog of NCBI NO: 18482486 NR Description: RNA-binding protein splice variant a [Homo
  misc_feature (179)..(303): Homolog of NCBI NO: 34877669 NR Description: similar to splicing factor 4 [Rattus norvegicus]
  misc_feature (358)..(486): Homolog of NCBI NO: 34877669 NR Description: similar to splicing factor 4 [Rattus norvegicus]
  misc_feature (358)..(486): Homolog of NCBI NO: 7512956 NR Description: hypothetical protein F23858_1 - human (fragment)
  misc_feature (144)..(303): Homolog of NCBI NO: 7512956 NR Description: hypothetical protein F23858_1 - human (fragment)
  misc_feature (176)..(303): Homolog of NCBI NO: 6807742 NR Description: hypothetical protein [Homo sapiens]
  misc_feature (358)..(486): Homolog of NCBI NO: 6807742 NR Description: hypothetical protein [Homo sapiens]
  misc_feature (44)..(486): Homolog of NCBI NO: 18409491 NR Description: gamma response I protein
  misc_feature (9)..(486): Homolog of NCBI NO: 11357298 NR Description: gamma response I protein - Arabidopsis thaliana
LITIQSSPIVGLLFPFYSTSFRRLLTWNRRSDFNSTIALGLLAMDKGAPPSIFVNDGSFMERFRQLQQEKDKDKDKVVQVEDSKPVKIISNPKPAANKISIGLKPNDAQKKGGKLAFSLKQKSKLLAPPVKLGTEEDEDDEDVKHEQGFGSVKRQKLEQRDTPVKSAKVSDVAPPPPSDPTVKKVADKLASFVAKHGRPFEHITRQKNPGDTPFKFLFDENCADYKYYVFRLAEEEKLISQTKDSGVLHSGDAGSRTSTAAIPLQKPAYQQTGYQIPASALYDTPVEPGASSRSAQASITRPSDSDSFSGPRGADPLSMMEFYMKKAAQEEKMRRPRQSKDEMPPPASLQGPSETSSTDPGKRGHHMGDYIPLEELDKFLSKCNDAAAQKATKEAAEKAKIQADNVGHKLLSKMGWKEGEGIGSSRKGMADPIMAGDVKTNNLGVGASAPGEVKPEDDIYEQYKKRMMLGYKHRPNPLGNPRKAYY

SEQ ID NO: 34870 - protein, 443 aa, Arabidopsis thaliana
  peptide (1)..(443): Ceres Seq. ID no. 12335654
  misc_feature (140)..(194): Pfam Name: Surp module Pfam Description: Surp module
  misc_feature (315)..(443): Homolog of NCBI NO: 18482486 NR Description: RNA-binding protein splice variant a [Homo
  misc_feature (101)..(260): Homolog of NCBI NO: 18482486 NR Description: RNA-binding protein splice variant a [Homo
  misc_feature (136)..(260): Homolog of NCBI NO: 34877669 NR Description: similar to splicing factor 4 [Rattus norvegicus]
  misc_feature (315)..(443): Homolog of NCBI NO: 34877669 NR Description: similar to splicing factor 4 [Rattus norvegicus]
  misc_feature (315)..(443): Homolog of NCBI NO: 7512956 NR Description: hypothetical protein F23858_1 - human (fragment)
  misc_feature (101)..(260): Homolog of NCBI NO: 7512956 NR Description: hypothetical protein F23858_1 - human (fragment)
  misc_feature (133)..(260): Homolog of NCBI NO: 6807742 NR Description: hypothetical protein [Homo sapiens]
  misc_feature (315)..(443): Homolog of NCBI NO: 6807742 NR Description: hypothetical protein [Homo sapiens]
  misc_feature (1)..(443): Homolog of NCBI NO: 18409491 NR Description: gamma response I protein
  misc_feature (1)..(443): Homolog of NCBI NO: 11357298 NR Description: gamma response I protein - Arabidopsis thaliana
MDKGAPPSIFVNDGSFMERFRQLQQEKDKDKDKVVQVEDSKPVKIISNPKPAANKISIGLKPNDAQKKGGKLAFSLKQKSKLLAPPVKLGTEEDEDDEDVKHEQGFGSVKRQKLEQRDTPVKSAKVSDVAPPPPSDPTVKKVADKLASFVAKHGRPFEHITRQKNPGDTPFKFLFDENCADYKYYVFRLAEEEKLISQTKDSGVLHSGDAGSRTSTAAIPLQKPAYQQTGYQIPASALYDTPVEPGASSRSAQASITRPSDSDSFSGPRGADPLSMMEFYMKKAAQEEKMRRPRQSKDEMPPPASLQGPSETSSTDPGKRGHHMGDYIPLEELDKFLSKCNDAAAQKATKEAAEKAKIQADNVGHKLLSKMGWKEGEGIGSSRKGMADPIMAGDVKTNNLGVGASAPGEVKPEDDIYEQYKKRMMLGYKHRPNPLGNPRKAYY

SEQ ID NO: 34871 - protein, 427 aa, Arabidopsis thaliana
  peptide (1)..(427): Ceres Seq. ID no. 12335655
  misc_feature (124)..(178): Pfam Name: Surp module Pfam Description: Surp module
  misc_feature (299)..(427): Homolog of NCBI NO: 18482486 NR Description: RNA-binding protein splice variant a [Homo
  misc_feature (85)..(244): Homolog of NCBI NO: 18482486 NR Description: RNA-binding protein splice variant a [Homo
  misc_feature (120)..(244): Homolog of NCBI NO: 34877669 NR Description: similar to splicing factor 4 [Rattus norvegicus]
  misc_feature (299)..(427): Homolog of NCBI NO: 34877669 NR Description: similar to splicing factor 4 [Rattus norvegicus]
  misc_feature (299)..(427): Homolog of NCBI NO: 7512956 NR Description: hypothetical protein F23858_1 - human (fragment)
  misc_feature (85)..(244): Homolog of NCBI NO: 7512956 NR Description: hypothetical protein F23858_1 - human (fragment)
  misc_feature (117)..(244): Homolog of NCBI NO: 6807742 NR Description: hypothetical protein [Homo sapiens]
  misc_feature (299)..(427): Homolog of NCBI NO: 6807742 NR Description: hypothetical protein [Homo sapiens]
  misc_feature (1)..(427): Homolog of NCBI NO: 18409491 NR Description: gamma response I protein
  misc_feature (1)..(427): Homolog of NCBI NO: 11357298 NR Description: gamma response I protein - Arabidopsis thaliana
MERFRQLQQEKDKDKDKVVQVEDSKPVKIISNPKPAANKISIGLKPNDAQKKGGKLAFSLKQKSKLLAPPVKLGTEEDEDDEDVKHEQGFGSVKRQKLEQRDTPVKSAKVSDVAPPPPSDPTVKKVADKLASFVAKHGRPFEHITRQKNPGDTPFKFLFDENCADYKYYVFRLAEEEKLISQTKDSGVLHSGDAGSRTSTAAIPLQKPAYQQTGYQIPASALYDTPVEPGASSRSAQASITRPSDSDSFSGPRGADPLSMMEFYMKKAAQEEKMRRPRQSKDEMPPPASLQGPSETSSTDPGKRGHHMGDYIPLEELDKFLSKCNDAAAQKATKEAAEKAKIQADNVGHKLLSKMGWKEGEGIGSSRKGMADPIMAGDVKTNNLGVGASAPGEVKPEDDIYEQYKKRMMLGYKHRPNPLGNPRKAYY

SEQ ID NO: 34872 - DNA, 1425 bp, Arabidopsis thaliana
  misc_feature (1)..(1425): Ceres Seq. ID no. 12333941
  misc_feature: MA Experiment ID: 108434 Result: Up-regulated in Transcription
  misc_feature: MA Experiment 108434 PARAMETER Experiment Name: At_Root_Tips_cDNA_P Parameter: Tissue Value: Root Tips
  misc_feature: MA Experiment ID: 108462 Result: Down-regulated in Transcription
  misc_feature: MA Experiment 108462 PARAMETER Experiment Name: At_Germinating_Seeds_cDNA_P Parameter: Age (day) Value: 2 vs. 0
  misc_feature: MA Experiment 108462 PARAMETER Experiment Name: At_Germinating_Seeds_cDNA_P Parameter: Tissue Value: Germinating Seeds
  misc_feature: MA Experiment ID: 108463 Result: Down-regulated in Transcription
  misc_feature: MA Experiment 108463 PARAMETER Experiment Name: At_Germinating_Seeds_cDNA_P Parameter: Age (day) Value: 3 vs. 0
  misc_feature: MA Experiment 108463 PARAMETER Experiment Name: At_Germinating_Seeds_cDNA_P Parameter: Tissue Value: Germinating Seeds
  misc_feature: MA Experiment ID: 108464 Result: Down-regulated in Transcription
  misc_feature: MA Experiment 108464 PARAMETER Experiment Name: At_Germinating_Seeds_cDNA_P Parameter: Age (day) Value: 4 vs. 0
  misc_feature: MA Experiment 108464 PARAMETER Experiment Name: At_Germinating_Seeds_cDNA_P Parameter: Tissue Value: Germinating Seeds
  misc_feature: MA Experiment ID: 108573 Result: Down-regulated in Transcription
  misc_feature: MA Experiment 108573 PARAMETER Experiment Name: At_Drought_cDNA_P Parameter: Timepoint (hr) Value: 6
  misc_feature: MA Experiment 108573 PARAMETER Experiment Name: At_Drought_cDNA_P Parameter: Tissue Value: Aerial
  misc_feature: MA Experiment 108573 PARAMETER Experiment Name: At_Drought_cDNA_P Parameter: Treatment Value: Drought vs. No Drought
  misc_feature: MA Experiment ID: 108595 Result: Down-regulated in Transcription
  misc_feature: MA Experiment 108595 PARAMETER Experiment Name: At_Ler-pi_Ovule_cDNA_P Parameter: Plant Line Value: null
  misc_feature: MA Experiment ID: 20000030 Result: Down-regulated in Transcription
  misc_feature: MA Experiment 20000030 PARAMETER Experiment Name: At_CS6630_Roots_cDNA_P Parameter: Plant Line Value: CS6630 vs. WS
  misc_feature: MA Experiment 20000030 PARAMETER Experiment Name: At_CS6630_Roots_cDNA_P Parameter: Tissue Value: Roots
  misc_feature: MA Experiment ID: 20000224 Result: Up-regulated in Transcription
  misc_feature: MA Experiment ID: 20000440 Result: Up-regulated in Transcription
  misc_feature: MA Experiment 20000440 PARAMETER Experiment Name: At_Closed-Flower__Sub_P Parameter: Tissue Value: Closed Flower vs. Whole Plant
accatgagaggagctctcttcagaaatgcatctctctgcgctcgcggaatcattgtttctcctcgaatatcccccaatgttccctttctcactccaatcgcagctctggctcctcccaaattcagatttttctcttccgattccggtgagaactcgactactgccactgagtcttcgccgactgattcatccgataagaaggatctcgttgtagaggatgtcagcaacaaagagcttaaaagccgtatagagaagtatttcaatgagggtaatgaagatgctttacctgcagttattgaagcacttctacagagaagacttgtagacaaacacgcagagactgatgatgaattgatggaaaaaatcgagagtctacctttcaaagatgacgtcaaggatgaagagtttgaatccgatttcgaggaagcgcattctactgacgaagaacttgaggatttgtacaactctcccgagtatgtagctgaaaagatgaggaagaatgaatttttcaacatggacgataacaagtgggatcacatgattagagaaggtatccaacatggctgtcttaccgatactaaacaatgcgaggagattcttgaggatatgctcaaatgggatcagcttcttcctgatgatttgaagaaaaaagttgaagcaaagtttaatgagctcggggatatgtgtgaaagaggtgaaattgaggccgaagcagcttatgagcttttcaaggaatttgaagatgagatggtaattcagtatgggggtcagatggaagctgagggtcctccccaatttggtgaaacagatacatctgacaggaatactgacttggatgatccccccggtaaaggcccaatcctcaggtggcaatcaaggatagtttttgctcctggaggcgatgcgtggcatccaaagaacaggaaagttaaaatgtctgttacagtgaaagagcttgggctctcaaagcatcaggctaaaaggctaagggaacttgtgggaaaaagataccattcagggaaagacgagctaacaatcaccagcgagaggtttgaacaccgagaagaaaacaggaaagactgcttgagaactctttacgggttgatagaggaagctgggaaagccaacaagatcgctgaagacataagaacttcatatgttagacagagactccgagccagtccagcttttatgcagaaattacaagccaagatcataaggtctaaagagtcagatgccatcgacgcttgaaaaacacttttcccggttcgcgcctttcttcttgtttcaccaaataatctgtggatcgtctctttaatcggagaacgatgcaatgttggtaaaaatagacaatgaatgaaactttttcatgtataaaaatatatgtaaacttggggttgataatgaattgttcatgttaagact

SEQ ID NO: 34873 - protein, 416 aa, Arabidopsis thaliana
  peptide (1)..(416): Ceres Seq. ID no. 12333942
  misc_feature (2)..(151): Homolog of NCBI NO: 15219546 NR Description: hypothetical protein; protein id: At1g73770.1
  misc_feature (23)..(416): Homolog of NCBI NO: 7485722 NR Description: hypothetical protein F18E5.80 - Arabidopsis
  misc_feature (2)..(416): Homolog of NCBI NO: 18401816 NR Description: expressed protein
  misc_feature (2)..(416): Homolog of NCBI NO: 18415698 NR Description: putative protein
TMRGALFRNASLCARGIIVSPRISPNVPFLTPIAALAPPKFRFFSSDSGENSTTATESSPTDSSDKKDLVVEDVSNKELKSRIEKYFNEGNEDALPAVIEALLQRRLVDKHAETDDELMEKIESLPFKDDVKDEEFESDFEEAHSTDEELEDLYNSPEYVAEKMRKNEFFNMDDNKWDHMIREGIQHGCLTDTKQCEEILEDMLKWDQLLPDDLKKKVEAKFNELGDMCERGEIEAEAAYELFKEFEDEMVIQYGGQMEAEGPPQFGETDTSDRNTDLDDPPGKGPILRWQSRIVFAPGGDAWHPKNRKVKMSVTVKELGLSKHQAKRLRELVGKRYHSGKDELTITSERFEHREENRKDCLRTLYGLIEEAGKANKIAEDIRTSYVRQRLRASPAFMQKLQAKIIRSKESDAIDA

SEQ ID NO: 34874 - protein, 415 aa, Arabidopsis thaliana
  peptide (1)..(415): Ceres Seq. ID no. 12333943
  misc_feature (1)..(150): Homolog of NCBI NO: 15219546 NR Description: hypothetical protein; protein id: At1g73770.1
  misc_feature (22)..(415): Homolog of NCBI NO: 7485722 NR Description: hypothetical protein F18E5.80 - Arabidopsis
  misc_feature (1)..(415): Homolog of NCBI NO: 18401816 NR Description: expressed protein
  misc_feature (1)..(415): Homolog of NCBI NO: 18415698 NR Description: putative protein
MRGALFRNASLCARGIIVSPRISPNVPFLTPIAALAPPKFRFFSSDSGENSTTATESSPTDSSDKKDLVVEDVSNKELKSRIEKYFNEGNEDALPAVIEALLQRRLVDKHAETDDELMEKIESLPFKDDVKDEEFESDFEEAHSTDEELEDLYNSPEYVAEKMRKNEFFNMDDNKWDHMIREGIQHGCLTDTKQCEEILEDMLKWDQLLPDDLKKKVEAKFNELGDMCERGEIEAEAAYELFKEFEDEMVIQYGGQMEAEGPPQFGETDTSDRNTDLDDPPGKGPILRWQSRIVFAPGGDAWHPKNRKVKMSVTVKELGLSKHQAKRLRELVGKRYHSGKDELTITSERFEHREENRKDCLRTLYGLIEEAGKANKIAEDIRTSYVRQRLRASPAFMQKLQAKIIRSKESDAIDA

SEQ ID NO: 34875 - protein, 298 aa, Arabidopsis thaliana
  peptide (1)..(298): Ceres Seq. ID no. 12333944
  misc_feature (1)..(33): Homolog of NCBI NO: 15219546 NR Description: hypothetical protein; protein id: At1g73770.1
  misc_feature (1)..(298): Homolog of NCBI NO: 7485722 NR Description: hypothetical protein F18E5.80 - Arabidopsis
  misc_feature (1)..(298): Homolog of NCBI NO: 18401816 NR Description: expressed protein
  misc_feature (1)..(298): Homolog of NCBI NO: 18415698 NR Description: putative protein
MEKIESLPFKDDVKDEEFESDFEEAHSTDEELEDLYNSPEYVAEKMRKNEFFNMDDNKWDHMIREGIQHGCLTDTKQCEEILEDMLKWDQLLPDDLKKKVEAKFNELGDMCERGEIEAEAAYELFKEFEDEMVIQYGGQMEAEGPPQFGETDTSDRNTDLDDPPGKGPILRWQSRIVFAPGGDAWHPKNRKVKMSVTVKELGLSKHQAKRLRELVGKRYHSGKDELTITSERFEHREENRKDCLRTLYGLIEEAGKANKIAEDIRTSYVRQRLRASPAFMQKLQAKIIRSKESDAIDA

SEQ ID NO: 34876 - DNA, 1150 bp, Arabidopsis thaliana
  misc_feature (1)..(1150): Ceres Seq. ID no. 13497072
  misc_feature: MA Experiment ID: 20000180 Result: Up-regulated in Transcription
  misc_feature: MA Experiment 20000180 PARAMETER Experiment Name: At_Germinating_Seeds_P Parameter: Age (hr) Value: 24 vs. 0
  misc_feature: MA Experiment 20000180 PARAMETER Experiment Name: At_Germinating_Seeds_P Parameter: Tissue Value: Germinating Seeds
  misc_feature: MA Experiment ID: 20000185 Result: Down-regulated in Transcription
  misc_feature: MA Experiment 20000185 PARAMETER Experiment Name: At_Roots__P Parameter: Age (day) Value: 7 vs. 21
  misc_feature: MA Experiment 20000185 PARAMETER Experiment Name: At_Roots__P Parameter: Organism Value: A. thaliana
  misc_feature: MA Experiment 20000185 PARAMETER Experiment Name: At_Roots__P Parameter: Tissue Value: Roots vs. Whole Plant
  misc_feature: MA Experiment ID: 20000234 Result: Up-regulated in Transcription
  misc_feature: MA Experiment 20000234 PARAMETER Experiment Name: At_Siliques_P Parameter: Age (day) Value: 21
  misc_feature: MA Experiment 20000234 PARAMETER Experiment Name: At_Siliques_P Parameter: Organism Value: A. thaliana
  misc_feature: MA Experiment 20000234 PARAMETER Experiment Name: At_Siliques_P Parameter: Plant Line Value: WS
  misc_feature: MA Experiment 20000234 PARAMETER Experiment Name: At_Siliques_P Parameter: Tissue Value: Less Than 5mm Siliques vs. Whole Plant
  misc_feature: MA Experiment ID: 20000265 Result: Up-regulated in Transcription
  misc_feature: MA Experiment 20000265 PARAMETER Experiment Name: At_Open_Flower_P Parameter: Age (day) Value: 21
  misc_feature: MA Experiment 20000265 PARAMETER Experiment Name: At_Open_Flower_P Parameter: Plant Line Value: WS
  misc_feature: MA Experiment 20000265 PARAMETER Experiment Name: At_Open_Flower_P Parameter: Tissue Value: Closed Flower vs. Whole Plant
  misc_feature: MA Experiment ID: 20000286 Result: Up-regulated in Transcription
  misc_feature: MA Experiment 20000286 PARAMETER Experiment Name: At_Open_Flower_P Parameter: Age (day) Value: 21
  misc_feature: MA Experiment 20000286 PARAMETER Experiment Name: At_Open_Flower_P Parameter: Plant Line Value: WS
  misc_feature: MA Experiment 20000286 PARAMETER Experiment Name: At_Open_Flower_P Parameter: Tissue Value: Half Open vs. Whole Plant
  misc_feature: MA Experiment ID: 20000437 Result: Down-regulated in Transcription
  misc_feature: MA Experiment 20000437 PARAMETER Experiment Name: At_Drought_P Parameter: Age (day) Value: 8
  misc_feature: MA Experiment 20000437 PARAMETER Experiment Name: At_Drought_P Parameter: Organism Value: A. thaliana
  misc_feature: MA Experiment 20000437 PARAMETER Experiment Name: At_Drought_P Parameter: Plant Line Value: WS
  misc_feature: MA Experiment 20000437 PARAMETER Experiment Name: At_Drought_P Parameter: Timepoint (hr) Value: 24
  misc_feature: MA Experiment 20000437 PARAMETER Experiment Name: At_Drought_P Parameter: Tissue Value: Whole Plant
  misc_feature: MA Experiment 20000437 PARAMETER Experiment Name: At_Drought_P Parameter: Treatment Value: Drought vs. No Drought
  misc_feature: MA Experiment ID: 20000439 Result: Down-regulated in Transcription
  misc_feature: MA Experiment 20000439 PARAMETER Experiment Name: At_Roots__P Parameter: Age (day) Value: 14 vs. 21
  misc_feature: MA Experiment 20000439 PARAMETER Experiment Name: At_Roots__P Parameter: Organism Value: A. thaliana
  misc_feature: MA Experiment 20000439 PARAMETER Experiment Name: At_Roots__P Parameter: Tissue Value: Roots vs. Whole Plant
  misc_feature: MA Experiment ID: 20000495 Result: Up-regulated in Transcription
  misc_feature: MA Experiment 20000495 PARAMETER Experiment Name: At_Guard_Cells_P Parameter: Harvest Date Value: 8/2/2002
  misc_feature: MA Experiment 20000495 PARAMETER Experiment Name: At_Guard_Cells_P Parameter: Organism Value: A. thaliana
  misc_feature: MA Experiment 20000495 PARAMETER Experiment Name: At_Guard_Cells_P Parameter: Tissue Value: Guard Cells vs. Leaves
  misc_feature: MA Experiment ID: 20001248 Result: Down-regulated in Transcription
  misc_feature: MA Experiment 20001248 PARAMETER Experiment Name: At_Far-red-induction_P Parameter: Age (day) Value: 7
  misc_feature: MA Experiment 20001248 PARAMETER Experiment Name: At_Far-red-induction_P Parameter: Light Value: Far-red vs. White
  misc_feature: MA Experiment 20001248 PARAMETER Experiment Name: At_Far-red-induction_P Parameter: Organism Value: A. thaliana
  misc_feature: MA Experiment 20001248 PARAMETER Experiment Name: At_Far-red-induction_P Parameter: Plant Line Value: Columbia
  misc_feature: MA Experiment 20001248 PARAMETER Experiment Name: At_Far-red-induction_P Parameter: Timepoint (hr) Value: 4
  misc_feature: MA Experiment 20001248 PARAMETER Experiment Name: At_Far-red-induction_P Parameter: Tissue Value: Whole Plant
  misc_feature: MA Experiment ID: 20001555 Result: Down-regulated in Transcription
  misc_feature: MA Experiment 20001555 PARAMETER Experiment Name: At_Drought_Soil_Dry_P Parameter: Age (day) Value: 24
  misc_feature: MA Experiment 20001555 PARAMETER Experiment Name: At_Drought_Soil_Dry_P Parameter: Organism Value: A. thaliana
  misc_feature: MA Experiment 20001555 PARAMETER Experiment Name: At_Drought_Soil_Dry_P Parameter: Plant Line Value: WS
  misc_feature: MA Experiment 20001555 PARAMETER Experiment Name: At_Drought_Soil_Dry_P Parameter: Post Timepoint (hr) Value: None
  misc_feature: MA Experiment 20001555 PARAMETER Experiment Name: At_Drought_Soil_Dry_P Parameter: Post-Treatment Value: None
  misc_feature: MA Experiment 20001555 PARAMETER Experiment Name: At_Drought_Soil_Dry_P Parameter: Timepoint (day) Value: 10
  misc_feature: MA Experiment 20001555 PARAMETER Experiment Name: At_Drought_Soil_Dry_P Parameter: Treatment Value: Drought vs. No Drought
acacatcttaaaaagtaaaaacacattcatctatccaacaaaaaaaaaaaaaaaaaggagaaatggaaggaatcgatcatagaatggtgagtgtcaatggcataactatgcacattgccgagaaaggtcccaaagaaggacctgtggtgcttctcctccatggattccctgatctctggtacacgtggcgtcaccagattagtgggttatcatctctaggttaccgcgctgtagctccagacctccgaggctacggagactctgattcgccagagtctttctccgagtacacgtgtcttaacgtcgttggggacctcgtagctcttctggacagtgttgctggaaatcaagagaaggtgtttctggtcggtcatgattggggagccattatcggatggtttctctgtttgtttcgacctgaaaagattaacggctttgtgtgtttgagtgtgccgtatagatcaagaaaccctaaagtcaagcccgttcaagggttcaaggctgtatttggagatgattactacatttgtagatttcaggaaccggggaagattgaaggagagattgcaagtgcagatccaagaatatttctgaggaacctcttcacagggaggacactcggtccgccgattttacctaaggataatccctttggggaaaaacctaaccctaatagcgaaaacattgaattgcctgaatggttttctaagaaagatctcgatttctatgtctccaaattcgagaaggcaggatttaccggtggattgaactactacagagccatggatctgaattgggagctcactgcaccatggaccggagctaagattcaagttccagtgaagttcatgacaggtgacttcgacatggtttacaccacaccagggatgaaagagtacatacggtggtggatttgctgcagatgttccaactcttcaagagatagtggtgattgaagatgctgggcacttcgttaaccaagagaaacctcaagaggtcactgctcacatcaatgacttcttcaccaagcttcgggacaacaacaaaagcttttagagttctcgtttggttctattatgttggctctcaaaacaagttggttcttgcatgtgttgtttcgacaagattttgaataagacttggcattatg

SEQ ID NO: 34877 - protein, 297 aa, Arabidopsis thaliana
  peptide (1)..(297): Ceres Seq. ID no. 13497073
  misc_feature (54)..(280): Pfam Name: alpha/beta hydrolase fold Pfam Description: alpha/beta hydrolase fold
  misc_feature (1)..(280): Homolog of NCBI NO: 15230018 NR Description: epoxide hydrolase, putative [Arabidopsis
MEGIDHRMVSVNGITMHIAEKGPKEGPVVLLLHGFPDLWYTWRHQISGLSSLGYRAVAPDLRGYGDSDSPESFSEYTCLNVVGDLVALLDSVAGNQEKVFLVGHDWGAIIGWFLCLFRPEKINGFVCLSVPYRSRNPKVKPVQGFKAVFGDDYYICRFQEPGKIEGEIASADPRIFLRNLFTGRTLGPPILPKDNPFGEKPNPNSENIELPEWFSKKDLDFYVSKFEKAGFTGGLNYYRAMDLNWELTAPWTGAKIQVPVKFMTGDFDMVYTTPGMKEYIRWWICCRCSNSSRDSGD

SEQ ID NO: 34878 - protein, 290 aa, Arabidopsis thaliana
  peptide (1)..(290): Ceres Seq. ID no. 13497074
  misc_feature (47)..(273): Pfam Name: alpha/beta hydrolase fold Pfam Description: alpha/beta hydrolase fold
  misc_feature (1)..(273): Homolog of NCBI NO: 15230018 NR Description: epoxide hydrolase, putative [Arabidopsis
MVSVNGITMHIAEKGPKEGPVVLLLHGFPDLWYTWRHQISGLSSLGYRAVAPDLRGYGDSDSPESFSEYTCLNVVGDLVALLDSVAGNQEKVFLVGHDWGAIIGWFLCLFRPEKINGFVCLSVPYRSRNPKVKPVQGFKAVFGDDYYICRFQEPGKIEGEIASADPRIFLRNLFTGRTLGPPILPKDNPFGEKPNPNSENIELPEWFSKKDLDFYVSKFEKAGFTGGLNYYRAMDLNWELTAPWTGAKIQVPVKFMTGDFDMVYTTPGMKEYIRWWICCRCSNSSRDSGD

SEQ ID NO: 34879 - protein, 282 aa, Arabidopsis thaliana
  peptide (1)..(282): Ceres Seq. ID no. 13497075
  misc_feature (39)..(265): Pfam Name: alpha/beta hydrolase fold Pfam Description: alpha/beta hydrolase fold
  misc_feature (1)..(265): Homolog of NCBI NO: 15230018 NR Description: epoxide hydrolase, putative [Arabidopsis
MHIAEKGPKEGPVVLLLHGFPDLWYTWRHQISGLSSLGYRAVAPDLRGYGDSDSPESFSEYTCLNVVGDLVALLDSVAGNQEKVFLVGHDWGAIIGWFLCLFRPEKINGFVCLSVPYRSRNPKVKPVQGFKAVFGDDYYICRFQEPGKIEGEIASADPRIFLRNLFTGRTLGPPILPKDNPFGEKPNPNSENIELPEWFSKKDLDFYVSKFEKAGFTGGLNYYRAMDLNWELTAPWTGAKIQVPVKFMTGDFDMVYTTPGMKEYIRWWICCRCSNSSRDSGD

SEQ ID NO: 34880 - DNA, 1299 bp, Arabidopsis thaliana
  misc_feature (1)..(1299): Ceres Seq. ID no. 13490711
  misc_feature: MA Experiment ID: 108434 Result: Down-regulated in Transcription
  misc_feature: MA Experiment 108434 PARAMETER Experiment Name: At_Root_Tips_cDNA_P Parameter: Tissue Value: Root Tips
  misc_feature: MA Experiment ID: 108573 Result: Up-regulated in Transcription
  misc_feature: MA Experiment 108573 PARAMETER Experiment Name: At_Drought_cDNA_P Parameter: Timepoint (hr) Value: 6
  misc_feature: MA Experiment 108573 PARAMETER Experiment Name: At_Drought_cDNA_P Parameter: Tissue Value: Aerial
  misc_feature: MA Experiment 108573 PARAMETER Experiment Name: At_Drought_cDNA_P Parameter: Treatment Value: Drought vs. No Drought
  misc_feature: MA Experiment ID: 108576 Result: Up-regulated in Transcription
  misc_feature: MA Experiment 108576 PARAMETER Experiment Name: At_42deg_Heat_cDNA_P Parameter: Temperature (deg C) Value: 42 vs. 22
  misc_feature: MA Experiment 108576 PARAMETER Experiment Name: At_42deg_Heat_cDNA_P Parameter: Timepoint (hr) Value: 1
  misc_feature: MA Experiment 108576 PARAMETER Experiment Name: At_42deg_Heat_cDNA_P Parameter: Tissue Value: Aerial
  misc_feature: MA Experiment ID: 108579 Result: Up-regulated in Transcription
  misc_feature: MA Experiment 108579 PARAMETER Experiment Name: At_4deg_Cold_cDNA_P Parameter: Temperature (deg C) Value: 4 vs. 22
  misc_feature: MA Experiment 108579 PARAMETER Experiment Name: At_4deg_Cold_cDNA_P Parameter: Timepoint (hr) Value: 6
  misc_feature: MA Experiment 108579 PARAMETER Experiment Name: At_4deg_Cold_cDNA_P Parameter: Tissue Value: Aerial
  misc_feature: MA Experiment ID: 108595 Result: Down-regulated in Transcription
  misc_feature: MA Experiment 108595 PARAMETER Experiment Name: At_Ler-pi_Ovule_cDNA_P Parameter: Plant Line Value: null
  misc_feature: MA Experiment ID: 108668 Result: Down-regulated in Transcription
  misc_feature: MA Experiment 108668 PARAMETER Experiment Name: At_2mM_SA_cDNA_P Parameter: Plant Line Value: WS
  misc_feature: MA Experiment 108668 PARAMETER Experiment Name: At_2mM_SA_cDNA_P Parameter: Timepoint (hr) Value: 6
  misc_feature: MA Experiment 108668 PARAMETER Experiment Name: At_2mM_SA_cDNA_P Parameter: Treatment Value: 2mM SA vs. No Treatment
  misc_feature: MA Experiment ID: 20000069 Result: Up-regulated in Transcription
  misc_feature: MA Experiment 20000069 PARAMETER Experiment Name: At_100uM_ABA_Mutants_cDNA_P Parameter: Plant Line Value: CS23
  misc_feature: MA Experiment 20000069 PARAMETER Experiment Name: At_100uM_ABA_Mutants_cDNA_P Parameter: Timepoint (hr) Value: 6
  misc_feature: MA Experiment 20000069 PARAMETER Experiment Name: At_100uM_ABA_Mutants_cDNA_P Parameter: Tissue Value: Aerial
  misc_feature: MA Experiment 20000069 PARAMETER Experiment Name: At_100uM_ABA_Mutants_cDNA_P Parameter: Treatment Value: 100uM ABA vs. No Treatment
  misc_feature: MA Experiment ID: 20000086 Result: Up-regulated in Transcription
  misc_feature: MA Experiment 20000086 PARAMETER Experiment Name: At_100uM_ABA_Mutants_cDNA_P Parameter: Plant Line Value: CS22
  misc_feature: MA Experiment 20000086 PARAMETER Experiment Name: At_100uM_ABA_Mutants_cDNA_P Parameter: Timepoint (hr) Value: 6
  misc_feature: MA Experiment 20000086 PARAMETER Experiment Name: At_100uM_ABA_Mutants_cDNA_P Parameter: Tissue Value: Aerial
  misc_feature: MA Experiment 20000086 PARAMETER Experiment Name: At_100uM_ABA_Mutants_cDNA_P Parameter: Treatment Value: 100uM ABA vs. No Treatment
  misc_feature: MA Experiment ID: 20000088 Result: Up-regulated in Transcription
  misc_feature: MA Experiment 20000088 PARAMETER Experiment Name: At_100uM_ABA_Mutants_cDNA_P Parameter: Plant Line Value: Landsberg
  misc_feature: MA Experiment 20000088 PARAMETER Experiment Name: At_100uM_ABA_Mutants_cDNA_P Parameter: Timepoint (hr) Value: 6
  misc_feature: MA Experiment 20000088 PARAMETER Experiment Name: At_100uM_ABA_Mutants_cDNA_P Parameter: Tissue Value: Aerial
  misc_feature: MA Experiment 20000088 PARAMETER Experiment Name: At_100uM_ABA_Mutants_cDNA_P Parameter: Treatment Value: 100uM ABA vs. No Treatment
  misc_feature: MA Experiment ID: 20000089 Result: Up-regulated in Transcription
  misc_feature: MA Experiment ID: 20000117 Result: Up-regulated in Transcription
  misc_feature: MA Experiment 20000117 PARAMETER Experiment Name: At_100uM_ABA_Mutants_cDNA_P Parameter: Plant Line Value: Columbia
  misc_feature: MA Experiment 20000117 PARAMETER Experiment Name: At_100uM_ABA_Mutants_cDNA_P Parameter: Timepoint (hr) Value: 6
  misc_feature: MA Experiment 20000117 PARAMETER Experiment Name: At_100uM_ABA_Mutants_cDNA_P Parameter: Tissue Value: Aerial
  misc_feature: MA Experiment 20000117 PARAMETER Experiment Name: At_100uM_ABA_Mutants_cDNA_P Parameter: Treatment Value: 100uM ABA vs. No Treatment
  misc_feature: MA Experiment ID: 20000171 Result: Up-regulated in Transcription
  misc_feature: MA Experiment 20000171 PARAMETER Experiment Name: At_42deg_Heat_P Parameter: Age (day) Value: 14
  misc_feature: MA Experiment 20000171 PARAMETER Experiment Name: At_42deg_Heat_P Parameter: Organism Value: A. thaliana
  misc_feature: MA Experiment 20000171 PARAMETER Experiment Name: At_42deg_Heat_P Parameter: Plant Line Value: WS
  misc_feature: MA Experiment 20000171 PARAMETER Experiment Name: At_42deg_Heat_P Parameter: Temperature (deg C) Value: 42 vs. 22
  misc_feature: MA Experiment 20000171 PARAMETER Experiment Name: At_42deg_Heat_P Parameter: Timepoint (hr) Value: 1
  misc_feature: MA Experiment 20000171 PARAMETER Experiment Name: At_42deg_Heat_P Parameter: Tissue Value: Aerial
  misc_feature: MA Experiment ID: 20000182 Result: Down-regulated in Transcription
  misc_feature: MA Experiment 20000182 PARAMETER Experiment Name: At_2mM_SA_P Parameter: Age (day) Value: 14
  misc_feature: MA Experiment 20000182 PARAMETER Experiment Name: At_2mM_SA_P Parameter: Organism Value: A. thaliana
  misc_feature: MA Experiment 20000182 PARAMETER Experiment Name: At_2mM_SA_P Parameter: Plant Line Value: WS
  misc_feature: MA Experiment 20000182 PARAMETER Experiment Name: At_2mM_SA_P Parameter: Timepoint (hr) Value: 6
  misc_feature: MA Experiment 20000182 PARAMETER Experiment Name: At_2mM_SA_P Parameter: Tissue Value: Aerial
  misc_feature: MA Experiment 20000182 PARAMETER Experiment Name: At_2mM_SA_P Parameter: Treatment Value: 2mM SA vs. No Treatment
  misc_feature: MA Experiment ID: 20000184 Result: Down-regulated in Transcription
  misc_feature: MA Experiment 20000184 PARAMETER Experiment Name: At_Shoots__P Parameter: Age (day) Value: 7
  misc_feature: MA Experiment 20000184 PARAMETER Experiment Name: At_Shoots__P Parameter: Tissue Value: Shoots vs. Whole Plant
  misc_feature: MA Experiment ID: 20000185 Result: Down-regulated in Transcription
  misc_feature: MA Experiment 20000185 PARAMETER Experiment Name: At_Roots__P Parameter: Age (day) Value: 7 vs. 21
  misc_feature: MA Experiment 20000185 PARAMETER Experiment Name: At_Roots__P Parameter: Organism Value: A. thaliana
  misc_feature: MA Experiment 20000185 PARAMETER Experiment Name: At_Roots__P Parameter: Tissue Value: Roots vs. Whole Plant
  misc_feature: MA Experiment ID: 20000213 Result: Up-regulated in Transcription
  misc_feature: MA Experiment 20000213 PARAMETER Experiment Name: At_4deg_Cold_P Parameter: Timepoint (hr) Value: 2
  misc_feature: MA Experiment ID: 20000438 Result: Down-regulated in Transcription
  misc_feature: MA Experiment 20000438 PARAMETER Experiment Name: At_Shoots__P Parameter: Age (day) Value: 14
  misc_feature: MA Experiment 20000438 PARAMETER Experiment Name: At_Shoots__P Parameter: Tissue Value: Shoots vs. Whole Plant
  misc_feature: MA Experiment ID: 20000452 Result: Down-regulated in Transcription
  misc_feature: MA Experiment 20000452 PARAMETER Experiment Name: At_CS6879_Shoots-Roots_P Parameter: Age (day) Value: 14
  misc_feature: MA Experiment 20000452 PARAMETER Experiment Name: At_CS6879_Shoots-Roots_P Parameter: Organism Value: A. thaliana
  misc_feature: MA Experiment 20000452 PARAMETER Experiment Name: At_CS6879_Shoots-Roots_P Parameter: Plant Line Value: CS6879 vs. WS
  misc_feature: MA Experiment 20000452 PARAMETER Experiment Name: At_CS6879_Shoots-Roots_P Parameter: Tissue Value: Shoots
  misc_feature: MA Experiment ID: 20001248 Result: Up-regulated in Transcription
  misc_feature: MA Experiment 20001248 PARAMETER Experiment Name: At_Far-red-induction_P Parameter: Age (day) Value: 7
  misc_feature: MA Experiment 20001248 PARAMETER Experiment Name: At_Far-red-induction_P Parameter: Light Value: Far-red vs. White
  misc_feature: MA Experiment 20001248 PARAMETER Experiment Name: At_Far-red-induction_P Parameter: Organism Value: A. thaliana
  misc_feature: MA Experiment 20001248 PARAMETER Experiment Name: At_Far-red-induction_P Parameter: Plant Line Value: Columbia
  misc_feature: MA Experiment 20001248 PARAMETER Experiment Name: At_Far-red-induction_P Parameter: Timepoint (hr) Value: 4
  misc_feature: MA Experiment 20001248 PARAMETER Experiment Name: At_Far-red-induction_P Parameter: Tissue Value: Whole Plant
  misc_feature: MA Experiment ID: 20001459 Result: Down-regulated in Transcription
  misc_feature: MA Experiment 20001459 PARAMETER Experiment Name: At_50mM_NH4NO3_L-to-H_P Parameter: Age (day) Value: Undefined
  misc_feature: MA Experiment 20001459 PARAMETER Experiment Name: At_50mM_NH4NO3_L-to-H_P Parameter: Organism Value: Undefined
  misc_feature: MA Experiment 20001459 PARAMETER Experiment Name: At_50mM_NH4NO3_L-to-H_P Parameter: Plant Line Value: Undefined
  misc_feature: MA Experiment 20001459 PARAMETER Experiment Name: At_50mM_NH4NO3_L-to-H_P Parameter: Timepoint (hr) Value: 4
  misc_feature: MA Experiment 20001459 PARAMETER Experiment Name: At_50mM_NH4NO3_L-to-H_P Parameter: Tissue Value: Siliques
  misc_feature: MA Experiment 20001459 PARAMETER Experiment Name: At_50mM_NH4NO3_L-to-H_P Parameter: Treatment Value: 50mM NH4NO3 vs. 100mM Manitol
  misc_feature: MA Experiment ID: 20001904 Result: Down-regulated in Transcription
  misc_feature: MA Experiment 20001904 PARAMETER Experiment Name: At_Drought_Reproduction_P Parameter: Age (day) Value: 37
  misc_feature: MA Experiment 20001904 PARAMETER Experiment Name: At_Drought_Reproduction_P Parameter: Organism Value: A. thaliana
  misc_feature: MA Experiment 20001904 PARAMETER Experiment Name: At_Drought_Reproduction_P Parameter: Plant Line Value: WS
  misc_feature: MA Experiment 20001904 PARAMETER Experiment Name: At_Drought_Reproduction_P Parameter: Timepoint (day) Value: 7
  misc_feature: MA Experiment 20001904 PARAMETER Experiment Name: At_Drought_Reproduction_P Parameter: Tissue Value: Rosettes
  misc_feature: MA Experiment 20001904 PARAMETER Experiment Name: At_Drought_Reproduction_P Parameter: Treatment Value: Drought vs. No Drought
  misc_feature: MA Experiment ID: 20001905 Result: Down-regulated in Transcription
  misc_feature: MA Experiment 20001905 PARAMETER Experiment Name: At_Drought_Reproduction_P Parameter: Age (day) Value: 40
  misc_feature: MA Experiment 20001905 PARAMETER Experiment Name: At_Drought_Reproduction_P Parameter: Organism Value: A. thaliana
  misc_feature: MA Experiment 20001905 PARAMETER Experiment Name: At_Drought_Reproduction_P Parameter: Plant Line Value: WS
  misc_feature: MA Experiment 20001905 PARAMETER Experiment Name: At_Drought_Reproduction_P Parameter: Timepoint (day) Value: 10
  misc_feature: MA Experiment 20001905 PARAMETER Experiment Name: At_Drought_Reproduction_P Parameter: Tissue Value: Rosettes
  misc_feature: MA Experiment 20001905 PARAMETER Experiment Name: At_Drought_Reproduction_P Parameter: Treatment Value: Drought vs. No Drought
accccttctttattgctctgttctttgagcaaacaattttgatttcttcgcgagcgaagaaacctcaaagacgaaaagtctcgaaatttcataactttttcttgaagatctatctagatcacccattttcttaaaaacctcttgagatttttctatctcgtgaaaagaggttttaaggtttagatgggtgtggctcactctgatcttcacaatgatttgtcttcttcatcttgttttggggatcggaatatcttgaagcctggtttaggagatttaccagaggcgtgtgtggctataattgttgagaatttggatcctgttgagatctgtagattctcaaagctcaatagagcatttcgcggcgcttcttgggctgattgtgtttgggaatcgaaacttcctcagaattacagagatgttctcgagaaaatccttggtggcttccctgaaaatttgcaaaaaagacacctttatgcttttctctccaggattaactcattcgatgatgccaccaagaaggtatggatagataaacgaaccagtggtgtttgtctatccatttcagccaaaggattatccattacaggcattgatgatcgtagatattggagtcatatccccactgatgaatctcggttttcttctgtagcttatctccaacaaatctggtggtttgaagttgatggtgaaatcgatttcccattcccggttggaacctacagcattttcttcaggcttcaattaggccggtcgggcaagtggtttggtcgacgggtctgtaacacagaacaagtccatggttgggacattaaaccggttcgatttcaactctggactgaagatggtcaatattcctcatctcaatgtatgttaactgagcggggaaactggattcattaccacgccggagacgttgttgtccgggaatcgaataggtcatcgacaaagattaagttttcgatgactcagatcgattgtacacataccaaaggcgggttatctctagactctgtagtcgtgtacccgagctcgtgtaaagaccagttgaagcggttttaatgtttcaaccggatccggtttagtgagaggttaaagcagggttttttgttatgcaggtctttagccccttctatagatgtagttagagcttctatttagagagcttttgttttgtaacttcattgagatttgaggcaaactgtaataatatgttgtggttatgaaactaaaccatctgttataacttgttattagttacgttaagaatgattaatcgttacaaagtttaacttcagatcc

SEQ ID NO: 34881 - protein, 291 aa, Arabidopsis thaliana
  peptide (1)..(291): Ceres Seq. ID no. 13490712
  misc_feature (27)..(289): Homolog of NCBI NO: 15242282 NR Description: F-box protein (SKP1 interacting partner
  misc_feature (1)..(290): Homolog of NCBI NO: 15231726 NR Description: F-box protein (SKP1 interacting partner
  misc_feature (31)..(77): Homolog of NCBI NO: 38567911 NR Description: OSJNBa0088I22.7 [Oryza sativa (japonica
  misc_feature (93)..(281): Homolog of NCBI NO: 38567911 NR Description: OSJNBa0088I22.7 [Oryza sativa (japonica
  misc_feature (27)..(287): Homolog of NCBI NO: 37536186 NR Description: unknown protein [Oryza sativa (japonica
  misc_feature (104)..(288): Homolog of NCBI NO: 27754673 NR Description: unknown protein [Arabidopsis thaliana]
  misc_feature (28)..(288): Homolog of NCBI NO: 23397334 NR Description: unknown protein [Arabidopsis thaliana]
  misc_feature (28)..(288): Homolog of NCBI NO: 30695337 NR Description: F-box protein (lectin-related) [Arabidopsis
  misc_feature (1)..(288): Homolog of NCBI NO: 15221677 NR Description: F-box protein (SKP1 interacting partner
  misc_feature (1)..(291): Homolog of NCBI NO: 15222051 NR Description: F-box protein (SKP1 interacting partner
MGVAHSDLHNDLSSSSCFGDRNILKPGLGDLPEACVAIIVENLDPVEICRFSKLNRAFRGASWADCVWESKLPQNYRDVLEKILGGFPENLQKRHLYAFLSRINSFDDATKKVWIDKRTSGVCLSISAKGLSITGIDDRRYWSHIPTDESRFSSVAYLQQIWWFEVDGEIDFPFPVGTYSIFFRLQLGRSGKWFGRRVCNTEQVHGWDIKPVRFQLWTEDGQYSSSQCMLTERGNWIHYHAGDVVVRESNRSSTKIKFSMTQIDCTHTKGGLSLDSVVVYPSSCKDQLKRF

SEQ ID NO: 34882 - DNA, 958 bp, Arabidopsis thaliana
  misc_feature (1)..(958): Ceres Seq. ID no. 13509164
  misc_feature: MA Experiment ID: 20000184 Result: Up-regulated in Transcription
  misc_feature: MA Experiment 20000184 PARAMETER Experiment Name: At_Shoots__P Parameter: Age (day) Value: 7
  misc_feature: MA Experiment 20000184 PARAMETER Experiment Name: At_Shoots__P Parameter: Tissue Value: Shoots vs. Whole Plant
  misc_feature: MA Experiment ID: 20000185 Result: Down-regulated in Transcription
  misc_feature: MA Experiment 20000185 PARAMETER Experiment Name: At_Roots__P Parameter: Age (day) Value: 7 vs. 21
  misc_feature: MA Experiment 20000185 PARAMETER Experiment Name: At_Roots__P Parameter: Organism Value: A. thaliana
  misc_feature: MA Experiment 20000185 PARAMETER Experiment Name: At_Roots__P Parameter: Tissue Value: Roots vs. Whole Plant
  misc_feature: MA Experiment ID: 20000439 Result: Down-regulated in Transcription
  misc_feature: MA Experiment 20000439 PARAMETER Experiment Name: At_Roots__P Parameter: Age (day) Value: 14 vs. 21
  misc_feature: MA Experiment 20000439 PARAMETER Experiment Name: At_Roots__P Parameter: Organism Value: A. thaliana
  misc_feature: MA Experiment 20000439 PARAMETER Experiment Name: At_Roots__P Parameter: Tissue Value: Roots vs. Whole Plant
acacaccacatatttctctcccgcctaatcctccgcgttcccaagccgacgcgccgatctttcttctactacttgtcctccggcaataacaaactaaccatttcgaaaagtaattatctatggctctctcctcgttgatctcagccactccgctctccctttcggtgccgagatatctcgtgttacccacgcgccgccgtttccacttgccgttagcaactcttgactcatcgcctccagagtcatccgcatcatcatcgattcctacctcgattcccgtcaacggaaacacgttacctagttcttacggaactcgcaaagacgacagcccgtttgctcagttctttcgctccaccgaatccaacgttgagaggataatatttgatttccggttcctagcgcttttggcagtaggaggttcgctggctggttcgctactctgctttctcaatgggtgtgtctacatagtggaggcatataaagtctactggactaactgttcaaaaggcatccataccggccaaatggttttacgcctagtcgaagctatcgatgtttatctagctgggactgtgatgttaatatttagtatgggtttgtatggactcttcatcagtcactcgcctcatgatgttccaccggaatccgatcgtgcccttagatcctcttccctctttggtatgtttgcaatgaaggagagaccaaaatggatgaagatcagctcacttgatgagcttaaaaccaaagtgggacatgtcattgttatgattctgctagtgaagatgttcgagagaagcaagatggttactatcgccaccggtctagatttgcttagttattccgtttgcatcttcttgtcctctgcttctctgtatatcctccataatctccacaaaggagagacatgaacccatattatgtacagacccaatatatccaatatatgtgtttactctgt

SEQ ID NO: 34883 - protein, 262 aa, Arabidopsis thaliana
  peptide (1)..(262): Ceres Seq. ID no. 13509165
  misc_feature (80)..(185): Homolog of NCBI NO: 15792349 NR Description: putative integral membrane protein [Campylobacter
  misc_feature (80)..(257): Homolog of NCBI NO: 31126772 NR Description: unknown protein [Oryza sativa (japonica
  misc_feature (12)..(258): Homolog of NCBI NO: 7487716 NR Description: hypothetical protein T5K18.170 - Arabidopsis
  misc_feature (12)..(258): Homolog of NCBI NO: 15810053 NR Description: AT4g19390/T5K18_170 [Arabidopsis thaliana]
  misc_feature (12)..(258): Homolog of NCBI NO: 18415304 NR Description: expressed protein [Arabidopsis thaliana]
  misc_feature (78)..(261): Homolog of NCBI NO: 34899024 NR Description: hypothetical protein~similar to Arabidopsis
  misc_feature (78)..(261): Homolog of NCBI NO: 34395260 NR Description: unknown protein [Oryza sativa (japonica
  misc_feature (78)..(262): Homolog of NCBI NO: 34899026 NR Description: contains ESTs
  misc_feature (1)..(262): Homolog of NCBI NO: 20465418 NR Description: unknown protein [Arabidopsis thaliana]
  misc_feature (1)..(262): Homolog of NCBI NO: 15240692 NR Description: expressed protein [Arabidopsis thaliana]
MALSSLISATPLSLSVPRYLVLPTRRRFHLPLATLDSSPPESSASSSIPTSIPVNGNTLPSSYGTRKDDSPFAQFFRSTESNVERIIFDFRFLALLAVGGSLAGSLLCFLNGCVYIVEAYKVYWTNCSKGIHTGQMVLRLVEAIDVYLAGTVMLIFSMGLYGLFISHSPHDVPPESDRALRSSSLFGMFAMKERPKWMKISSLDELKTKVGHVIVMILLVKMFERSKMVTIATGLDLLSYSVCIFLSSASLYILHNLHKGET

SEQ ID NO: 34884 - DNA, 1309 bp, Arabidopsis thaliana
  misc_feature (1)..(1309): Ceres Seq. ID no. 13580427
  misc_feature: MA Experiment ID: 108461 Result: Down-regulated in Transcription
  misc_feature: MA Experiment 108461 PARAMETER Experiment Name: At_Germinating_Seeds_cDNA_P Parameter: Age (day) Value: 1 vs. 0
  misc_feature: MA Experiment 108461 PARAMETER Experiment Name: At_Germinating_Seeds_cDNA_P Parameter: Tissue Value: Germinating Seeds
  misc_feature: MA Experiment ID: 108462 Result: Down-regulated in Transcription
  misc_feature: MA Experiment 108462 PARAMETER Experiment Name: At_Germinating_Seeds_cDNA_P Parameter: Age (day) Value: 2 vs. 0
  misc_feature: MA Experiment 108462 PARAMETER Experiment Name: At_Germinating_Seeds_cDNA_P Parameter: Tissue Value: Germinating Seeds
  misc_feature: MA Experiment ID: 108464 Result: Down-regulated in Transcription
  misc_feature: MA Experiment 108464 PARAMETER Experiment Name: At_Germinating_Seeds_cDNA_P Parameter: Age (day) Value: 4 vs. 0
  misc_feature: MA Experiment 108464 PARAMETER Experiment Name: At_Germinating_Seeds_cDNA_P Parameter: Tissue Value: Germinating Seeds
  misc_feature: MA Experiment ID: 20000180 Result: Down-regulated in Transcription
  misc_feature: MA Experiment 20000180 PARAMETER Experiment Name: At_Germinating_Seeds_P Parameter: Age (hr) Value: 24 vs. 0
  misc_feature: MA Experiment 20000180 PARAMETER Experiment Name: At_Germinating_Seeds_P Parameter: Tissue Value: Germinating Seeds
  misc_feature: MA Experiment ID: 20000184 Result: Down-regulated in Transcription
  misc_feature: MA Experiment 20000184 PARAMETER Experiment Name: At_Shoots__P Parameter: Age (day) Value: 7
  misc_feature: MA Experiment 20000184 PARAMETER Experiment Name: At_Shoots__P Parameter: Tissue Value: Shoots vs. Whole Plant
  misc_feature: MA Experiment ID: 20000224 Result: Up-regulated in Transcription
  misc_feature: MA Experiment ID: 20000227 Result: Up-regulated in Transcription
  misc_feature: MA Experiment 20000227 PARAMETER Experiment Name: At_Root-Tips-vs-Tops_P Parameter: Tissue Value: Root Tips vs. Root Tops
  misc_feature: MA Experiment ID: 20000794 Result: Up-regulated in Transcription
  misc_feature: MA Experiment 20000794 PARAMETER Experiment Name: At_Petals_P Parameter: Age (day) Value: 23-25 days
  misc_feature: MA Experiment 20000794 PARAMETER Experiment Name: At_Petals_P Parameter: Plant Line Value: WS
  misc_feature: MA Experiment 20000794 PARAMETER Experiment Name: At_Petals_P Parameter: Tissue Value: Petals vs. Whole plant
  misc_feature: MA Experiment ID: 20001911 Result: Up-regulated in Transcription
  misc_feature: MA Experiment 20001911 PARAMETER Experiment Name: At_Drought_Reproduction_P Parameter: Age (day) Value: 40
  misc_feature: MA Experiment 20001911 PARAMETER Experiment Name: At_Drought_Reproduction_P Parameter: Organism Value: A. thaliana
  misc_feature: MA Experiment 20001911 PARAMETER Experiment Name: At_Drought_Reproduction_P Parameter: Plant Line Value: WS
  misc_feature: MA Experiment 20001911 PARAMETER Experiment Name: At_Drought_Reproduction_P Parameter: Timepoint (day) Value: 10
  misc_feature: MA Experiment 20001911 PARAMETER Experiment Name: At_Drought_Reproduction_P Parameter: Tissue Value: Flowers
  misc_feature: MA Experiment 20001911 PARAMETER Experiment Name: At_Drought_Reproduction_P Parameter: Treatment Value: Drought vs. No Drought
gattaagaatcaaaccatttttgaagaaccctaaaagttctcttcttcccccaaattttaatctgttcttgcaatcggattcgaaatccgaaagtcttagtctcgaatttgagctcaacagtttcttatggctccgaagaagtctgaaggaatcgctttgctttccgtttacagtgatgaagatgacgaagagatggaagacgccgaggaagaggaagaagaagatgagaagcagagaaatcagtaagagagtgaaaaaataattgaagaagatcaggtagaagaagcgaattatatggatgaagaagagaaaggaagaggaggagaagattctagaacgccgaggctattagatggtgttggagcttcttctagtgctcatgggactcctcgttcacttgataacgatgaatcatcgagacctgattggagtaatcgaatgattggtgagtctggagttgcggatggtgagagaggtgatgatgcttcaggggaaagtagtgatacgttattggatcagtttcttccgccaagaccgagagagaggtgctctgaggagctgcaaaggaaaatagataagtttctgagcttgaaaaagatggggaagagtttcaattcagaagtgaggaataggaaggaatacaggaatcctgacttcctattgcatgctgtatcttaccaagacattgaccagattggttcgtgtttcagtaaagatgtatttgatcccagtggatatgacccaagtgacttctgtgatgcaatagaaatcgacatgaagaatgagagggaaaggaaggaacaagaaagcaagaagaaccagaagcttgactttgtttctgctggtactcaacctggggcggttttcgctgctcaaaagcctaacatccccattccaggtattccagctttagctactagtggattgccttccataccaaccgaaattgctgctcgtgatggtagaccgaacaagaaatccaaatgggataaggttgatggggacgtaaagaatcctcctctagcagctggaactcaggattctatatcctcaatccggtctaatgcagctcttgtatctgctacaagtgctggttctggatactcagcttttgcgcaacaacggagacgagaggtggaaggaagaagatcttccgagaggaaattggagagaagaagttgagagacataaccagaacgaagcttttctatgttgtgattcatgtagcaagagtttctaaagaggttctagttcaatgtttcataacgagtacaaacttaaaatcaatgatatacagtaccttcattc

SEQ ID NO: 34885 - protein, 295 aa, Arabidopsis thaliana
  peptide (1)..(295): Ceres Seq. ID no. 13580428
  misc_feature (1)..(223): Homolog of NCBI NO: 19921898 NR Description: CG2063-PA [Drosophila melanogaster]
  misc_feature (77)..(188): Homolog of NCBI NO: 34875136 NR Description: similar to transcriptional regulator protein
  misc_feature (77)..(188): Homolog of NCBI NO: 20086427 NR Description: HCNGP [Homo sapiens]
  misc_feature (2)..(188): Homolog of NCBI NO: 21754486 NR Description: unnamed protein product [Homo sapiens]
  misc_feature (1)..(188): Homolog of NCBI NO: 9994179 NR Description: transcriptional regulator protein [Homo sapiens]
  misc_feature (1)..(188): Homolog of NCBI NO: 28856236 NR Description: Similar to transcriptional regulator protein
  misc_feature (1)..(295): Homolog of NCBI NO: 18396997 NR Description: expressed protein [Arabidopsis thaliana]
MDEEEKGRGGEDSRTPRLLDGVGASSSAHGTPRSLDNDESSRPDWSNRMIGESGVADGERGDDASGESSDTLLDQFLPPRPRERCSEELQRKIDKFLSLKKMGKSFNSEVRNRKEYRNPDFLLHAVSYQDIDQIGSCFSKDVFDPSGYDPSDFCDAIEIDMKNERERKEQESKKNQKLDFVSAGTQPGAVFAAQKPNIPIPGIPALATSGLPSIPTEIAARDGRPNKKSKWDKVDGDVKNPPLAAGTQDSISSIRSNAALVSATSAGSGYSAFAQQRRREVEGRRSSERKLERRS

SEQ ID NO: 34886 - protein, 247 aa, Arabidopsis thaliana
  peptide (1)..(247): Ceres Seq. ID no. 13580429
  misc_feature (1)..(175): Homolog of NCBI NO: 19921898 NR Description: CG2063-PA [Drosophila melanogaster]
  misc_feature (29)..(140): Homolog of NCBI NO: 34875136 NR Description: similar to transcriptional regulator protein
  misc_feature (29)..(140): Homolog of NCBI NO: 20086427 NR Description: HCNGP [Homo sapiens]
  misc_feature (1)..(140): Homolog of NCBI NO: 21754486 NR Description: unnamed protein product [Homo sapiens]
  misc_feature (1)..(140): Homolog of NCBI NO: 9994179 NR Description: transcriptional regulator protein [Homo sapiens]
  misc_feature (1)..(140): Homolog of NCBI NO: 28856236 NR Description: Similar to transcriptional regulator protein
  misc_feature (1)..(247): Homolog of NCBI NO: 18396997 NR Description: expressed protein [Arabidopsis thaliana]
MIGESGVADGERGDDASGESSDTLLDQFLPPRPRERCSEELQRKIDKFLSLKKMGKSFNSEVRNRKEYRNPDFLLHAVSYQDIDQIGSCFSKDVFDPSGYDPSDFCDAIEIDMKNERERKEQESKKNQKLDFVSAGTQPGAVFAAQKPNIPIPGIPALATSGLPSIPTEIAARDGRPNKKSKWDKVDGDVKNPPLAAGTQDSISSIRSNAALVSATSAGSGYSAFAQQRRREVEGRRSSERKLERRS

SEQ ID NO: 34887 - protein, 194 aa, Arabidopsis thaliana
  peptide (1)..(194): Ceres Seq. ID no. 13580430
  misc_feature (1)..(122): Homolog of NCBI NO: 19921898 NR Description: CG2063-PA [Drosophila melanogaster]
  misc_feature (1)..(87): Homolog of NCBI NO: 34875136 NR Description: similar to transcriptional regulator protein
  misc_feature (1)..(87): Homolog of NCBI NO: 20086427 NR Description: HCNGP [Homo sapiens]
  misc_feature (1)..(87): Homolog of NCBI NO: 21754486 NR Description: unnamed protein product [Homo sapiens]
  misc_feature (1)..(87): Homolog of NCBI NO: 9994179 NR Description: transcriptional regulator protein [Homo sapiens]
  misc_feature (1)..(87): Homolog of NCBI NO: 28856236 NR Description: Similar to transcriptional regulator protein
  misc_feature (1)..(194): Homolog of NCBI NO: 18396997 NR Description: expressed protein [Arabidopsis thaliana]
MGKSFNSEVRNRKEYRNPDFLLHAVSYQDIDQIGSCFSKDVFDPSGYDPSDFCDAIEIDMKNERERKEQESKKNQKLDFVSAGTQPGAVFAAQKPNIPIPGIPALATSGLPSIPTEIAARDGRPNKKSKWDKVDGDVKNPPLAAGTQDSISSIRSNAALVSATSAGSGYSAFAQQRRREVEGRRSSERKLERRS

SEQ ID NO: 34888 - DNA, 1219 bp, Arabidopsis thaliana
  misc_feature (1)..(1219): Ceres Seq. ID no. 12603201
  misc_feature: MA Experiment ID: 108461 Result: Up-regulated in Transcription
  misc_feature: MA Experiment 108461 PARAMETER Experiment Name: At_Germinating_Seeds_cDNA_P Parameter: Age (day) Value: 1 vs. 0
  misc_feature: MA Experiment 108461 PARAMETER Experiment Name: At_Germinating_Seeds_cDNA_P Parameter: Tissue Value: Germinating Seeds
  misc_feature: MA Experiment ID: 108462 Result: Up-regulated in Transcription
  misc_feature: MA Experiment 108462 PARAMETER Experiment Name: At_Germinating_Seeds_cDNA_P Parameter: Age (day) Value: 2 vs. 0
  misc_feature: MA Experiment 108462 PARAMETER Experiment Name: At_Germinating_Seeds_cDNA_P Parameter: Tissue Value: Germinating Seeds
  misc_feature: MA Experiment ID: 108569 Result: Up-regulated in Transcription
  misc_feature: MA Experiment 108569 PARAMETER Experiment Name: At_0.001%_MeJA__cDNA_P Parameter: Timepoint (hr) Value: 6
  misc_feature: MA Experiment 108569 PARAMETER Experiment Name: At_0.001%_MeJA__cDNA_P Parameter: Tissue Value: Aerial
  misc_feature: MA Experiment 108569 PARAMETER Experiment Name: At_0.001%_MeJA__cDNA_P Parameter: Treatment Value: 0.001% MeJA vs. No Treatment
  misc_feature: MA Experiment ID: 108573 Result: Up-regulated in Transcription
  misc_feature: MA Experiment 108573 PARAMETER Experiment Name: At_Drought_cDNA_P Parameter: Timepoint (hr) Value: 6
  misc_feature: MA Experiment 108573 PARAMETER Experiment Name: At_Drought_cDNA_P Parameter: Tissue Value: Aerial
  misc_feature: MA Experiment 108573 PARAMETER Experiment Name: At_Drought_cDNA_P Parameter: Treatment Value: Drought vs. No Drought
  misc_feature: MA Experiment ID: 108585 Result: Up-regulated in Transcription
  misc_feature: MA Experiment 108585 PARAMETER Experiment Name: At_5mM_NaNP_cDNA_P Parameter: Timepoint (hr) Value: 6
  misc_feature: MA Experiment 108585 PARAMETER Experiment Name: At_5mM_NaNP_cDNA_P Parameter: Tissue Value: Aerial
  misc_feature: MA Experiment 108585 PARAMETER Experiment Name: At_5mM_NaNP_cDNA_P Parameter: Treatment Value: null
  misc_feature: MA Experiment ID: 108594 Result: Down-regulated in Transcription
  misc_feature: MA Experiment 108594 PARAMETER Experiment Name: At_Ler-rhl_Root_cDNA_P Parameter: Plant Line Value: null
  misc_feature: MA Experiment ID: 20000173 Result: Down-regulated in Transcription
  misc_feature: MA Experiment 20000173 PARAMETER Experiment Name: At_42deg_Heat_P Parameter: Age (day) Value: 14
  misc_feature: MA Experiment 20000173 PARAMETER Experiment Name: At_42deg_Heat_P Parameter: Organism Value: A. thaliana
  misc_feature: MA Experiment 20000173 PARAMETER Experiment Name: At_42deg_Heat_P Parameter: Plant Line Value: WS
  misc_feature: MA Experiment 20000173 PARAMETER Experiment Name: At_42deg_Heat_P Parameter: Temperature (deg C) Value: 42 vs. 22
  misc_feature: MA Experiment 20000173 PARAMETER Experiment Name: At_42deg_Heat_P Parameter: Timepoint (hr) Value: 6
  misc_feature: MA Experiment 20000173 PARAMETER Experiment Name: At_42deg_Heat_P Parameter: Tissue Value: Aerial
  misc_feature: MA Experiment ID: 20000495 Result: Down-regulated in Transcription
  misc_feature: MA Experiment 20000495 PARAMETER Experiment Name: At_Guard_Cells_P Parameter: Harvest Date Value: 8/2/2002
  misc_feature: MA Experiment 20000495 PARAMETER Experiment Name: At_Guard_Cells_P Parameter: Organism Value: A. thaliana
  misc_feature: MA Experiment 20000495 PARAMETER Experiment Name: At_Guard_Cells_P Parameter: Tissue Value: Guard Cells vs. Leaves
  misc_feature: MA Experiment ID: 20001451 Result: Down-regulated in Transcription
  misc_feature: MA Experiment 20001451 PARAMETER Experiment Name: At_Far-red-induction_P Parameter: Age (day) Value: 7
  misc_feature: MA Experiment 20001451 PARAMETER Experiment Name: At_Far-red-induction_P Parameter: Light Value: Far-red vs. White
  misc_feature: MA Experiment 20001451 PARAMETER Experiment Name: At_Far-red-induction_P Parameter: Organism Value: A. thaliana
  misc_feature: MA Experiment 20001451 PARAMETER Experiment Name: At_Far-red-induction_P Parameter: Plant Line Value: Columbia
  misc_feature: MA Experiment 20001451 PARAMETER Experiment Name: At_Far-red-induction_P Parameter: Timepoint (hr) Value: 24
  misc_feature: MA Experiment 20001451 PARAMETER Experiment Name: At_Far-red-induction_P Parameter: Tissue Value: Whole Plant
attctaatcatccccttgaattttccaagttttctccttttgtcttctctaactattttcccttaaaataaaaatccaatttttctttgtttcagtcctctcttctgctcattgatcttttaattaactttgattctctccgtttatggattaaccatttgatcgagataactctccaagaaatcgactgagttcgtaacttgttgttgtctgatcttttaaagattcaaccttttttggtccgatcatggctgttgctgagaatgctggtgtcaaagtggactcttctggtcagaatttagacaacaacaacactgctgcttcagctaccgagacgacaaagccgccatgtcctgatgatgatcaaagccctaaatctgactcatccactcctcttaccatcgattcgactcctgaaactgacgatcggatcaatgagactgctcaaaaggttcagactttaaatgggtttagtggaaatggtgagagagataacaatggagagatcaaagatttggctgatgcgttttctaagcttaatccgatggctcaggagtttgttcctccttctcttgctcgaagtcaatctggggttttgagaaatggattagggtttactaacaattttgcagccccacctaaacttgctgatgggaatgatcattttcctagaaggagaaggagttttggccaagggaagcgaagaatgaacaaaaggacaagcttggctcagaaggatgatgtaatcaggacaactgtatatgtctctgacatcgaccaacaggttacagaggagaacctcgcaggtgtctttattaactgtggacaggttgttgattgtcgtgtatgcggtgatccaaattctgtccttcgtttcgctttcattgaatttaccaatgaagagggagctagagctgctttgagcatgtcgggtactgtgctaggtttttaccctcttaaggttcttccttccaaaacagctattgctcctgttaacccgacttttcttccacgatctgaggatgagcgtgagatgtgcgttaggactgtttactgtaccaacattgacaagcggatcactcaaattgacttgaaaggcttctttgaaatgctttgcggggaggttcatcgtctgaggcttggagactatcaccaccaaacccgtattgcttttgttgagtttgcgatggcggaaagcgcaattgctgcgcttcactgc

SEQ ID NO: 34889 - protein, 324 aa, Arabidopsis thaliana
  peptide (1)..(324): Ceres Seq. ID no. 12603202
  misc_feature (171)..(239): Pfam Name: RNA recognition motif. (a.k.a. RRM, RBD, or RNP domain) Pfam Description: RNA recognition motif. (a.k.a. RRM, RBD, or RNP
  misc_feature (171)..(239): Pfam Name: RNA recognition motif. (a.k.a. RRM, RBD, or RNP domain) Pfam Description: RNA recognition motif. (a.k.a. RRM, RBD, or RNP
  misc_feature (87)..(296): Homolog of NCBI NO: 34903832 NR Description: ATT4F9_7(AL049523|pid:g4539439) Arabidopsis
  misc_feature (94)..(323): Homolog of NCBI NO: 8671859 NR Description: Contains similarity to RNA-binding protein from thaliana gi|2129727 and contains RNA recognition PF|00076 domain.
  misc_feature (86)..(323): Homolog of NCBI NO: 15220902 NR Description: RNA-binding protein, putative; protein id:
  misc_feature (37)..(323): Homolog of NCBI NO: 15238531 NR Description: RNA-binding protein, putative; protein id:
  misc_feature (154)..(323): Homolog of NCBI NO: 14030687 NR Description: At1g32790 [Arabidopsis thaliana]
  misc_feature (87)..(296): Homolog of NCBI NO: 34903832 NR Description: ATT4F9_7(AL049523|pid:g4539439) Arabidopsis
  misc_feature (86)..(323): Homolog of NCBI NO: 15220902 NR Description: RNA-binding protein, putative; protein id:
  misc_feature (154)..(323): Homolog of NCBI NO: 14030687 NR Description: At1g32790 [Arabidopsis thaliana]
  misc_feature (1)..(323): Homolog of NCBI NO: 15229132 NR Description: RNA-binding protein, putative; protein id:
  misc_feature (1)..(323): Homolog of NCBI NO: 15223304 NR Description: RNA-binding protein, putative
  misc_feature (76)..(323): Homolog of NCBI NO: 15235177 NR Description: RNA-binding protein RBP37
  misc_feature (76)..(323): Homolog of NCBI NO: 1174153 NR Description: RNA-binding protein
  misc_feature (80)..(323): Homolog of NCBI NO: 15231858 NR Description: RNA-binding protein, putative; protein id:
  misc_feature (37)..(323): Homolog of NCBI NO: 15238531 NR Description: RNA-binding protein, putative; protein id:
  misc_feature (94)..(323): Homolog of NCBI NO: 8671859 NR Description: Contains similarity to RNA-binding protein from thaliana gi|2129727 and contains RNA recognition PF|00076 domain.
  misc_feature (80)..(323): Homolog of NCBI NO: 15231858 NR Description: RNA-binding protein, putative; protein id:
  misc_feature (76)..(323): Homolog of NCBI NO: 1174153 NR Description: RNA-binding protein
  misc_feature (76)..(323): Homolog of NCBI NO: 15235177 NR Description: RNA-binding protein RBP37
  misc_feature (1)..(323): Homolog of NCBI NO: 15223304 NR Description: RNA-binding protein, putative
  misc_feature (1)..(323): Homolog of NCBI NO: 15229132 NR Description: RNA-binding protein, putative; protein id:
MAVAENAGVKVDSSGQNLDNNNTAASATETTKPPCPDDDQSPKSDSSTPLTIDSTPETDDRINETAQKVQTLNGFSGNGERDNNGEIKDLADAFSKLNPMAQEFVPPSLARSQSGVLRNGLGFTNNFAAPPKLADGNDHFPRRRRSFGQGKRRMNKRTSLAQKDDVIRTTVYVSDIDQQVTEENLAGVFINCGQVVDCRVCGDPNSVLRFAFIEFTNEEGARAALSMSGTVLGFYPLKVLPSKTAIAPVNPTFLPRSEDEREMCVRTVYCTNIDKRITQIDLKGFFEMLCGEVHRLRLGDYHHQTRIAFVEFAMAESAIAALHC

SEQ ID NO: 34890 - protein, 225 aa, Arabidopsis thaliana
  peptide (1)..(225): Ceres Seq. ID no. 12603203
  misc_feature (72)..(140): Pfam Name: RNA recognition motif. (a.k.a. RRM, RBD, or RNP domain) Pfam Description: RNA recognition motif. (a.k.a. RRM, RBD, or RNP
  misc_feature (72)..(140): Pfam Name: RNA recognition motif. (a.k.a. RRM, RBD, or RNP domain) Pfam Description: RNA recognition motif. (a.k.a. RRM, RBD, or RNP
  misc_feature (1)..(197): Homolog of NCBI NO: 34903832 NR Description: ATT4F9_7(AL049523|pid:g4539439) Arabidopsis
  misc_feature (1)..(224): Homolog of NCBI NO: 8671859 NR Description: Contains similarity to RNA-binding protein from thaliana gi|2129727 and contains RNA recognition PF|00076 domain.
  misc_feature (1)..(224): Homolog of NCBI NO: 15220902 NR Description: RNA-binding protein, putative; protein id:
  misc_feature (1)..(224): Homolog of NCBI NO: 15238531 NR Description: RNA-binding protein, putative; protein id:
  misc_feature (55)..(224): Homolog of NCBI NO: 14030687 NR Description: At1g32790 [Arabidopsis thaliana]
  misc_feature (1)..(197): Homolog of NCBI NO: 34903832 NR Description: ATT4F9_7(AL049523|pid:g4539439) Arabidopsis
  misc_feature (1)..(224): Homolog of NCBI NO: 15220902 NR Description: RNA-binding protein, putative; protein id:
  misc_feature (55)..(224): Homolog of NCBI NO: 14030687 NR Description: At1g32790 [Arabidopsis thaliana]
  misc_feature (1)..(224): Homolog of NCBI NO: 15229132 NR Description: RNA-binding protein, putative; protein id:
  misc_feature (1)..(224): Homolog of NCBI NO: 15223304 NR Description: RNA-binding protein, putative
  misc_feature (1)..(224): Homolog of NCBI NO: 15235177 NR Description: RNA-binding protein RBP37
  misc_feature (1)..(224): Homolog of NCBI NO: 1174153 NR Description: RNA-binding protein
  misc_feature (1)..(224): Homolog of NCBI NO: 15231858 NR Description: RNA-binding protein, putative; protein id:
  misc_feature (1)..(224): Homolog of NCBI NO: 15238531 NR Description: RNA-binding protein, putative; protein id:
  misc_feature (1)..(224): Homolog of NCBI NO: 8671859 NR Description: Contains similarity to RNA-binding protein from thaliana gi|2129727 and contains RNA recognition PF|00076 domain.
  misc_feature (1)..(224): Homolog of NCBI NO: 15231858 NR Description: RNA-binding protein, putative; protein id:
  misc_feature (1)..(224): Homolog of NCBI NO: 1174153 NR Description: RNA-binding protein
  misc_feature (1)..(224): Homolog of NCBI NO: 15235177 NR Description: RNA-binding protein RBP37
  misc_feature (1)..(224): Homolog of NCBI NO: 15223304 NR Description: RNA-binding protein, putative
  misc_feature (1)..(224): Homolog of NCBI NO: 15229132 NR Description: RNA-binding protein, putative; protein id:
MAQEFVPPSLARSQSGVLRNGLGFTNNFAAPPKLADGNDHFPRRRRSFGQGKRRMNKRTSLAQKDDVIRTTVYVSDIDQQVTEENLAGVFINCGQVVDCRVCGDPNSVLRFAFIEFTNEEGARAALSMSGTVLGFYPLKVLPSKTAIAPVNPTFLPRSEDEREMCVRTVYCTNIDKRITQIDLKGFFEMLCGEVHRLRLGDYHHQTRIAFVEFAMAESAIAALHC

SEQ ID NO: 34891 - protein, 171 aa, Arabidopsis thaliana
  peptide (1)..(171): Ceres Seq. ID no. 12603204
  misc_feature (18)..(86): Pfam Name: RNA recognition motif. (a.k.a. RRM, RBD, or RNP domain) Pfam Description: RNA recognition motif. (a.k.a. RRM, RBD, or RNP
  misc_feature (18)..(86): Pfam Name: RNA recognition motif. (a.k.a. RRM, RBD, or RNP domain) Pfam Description: RNA recognition motif. (a.k.a. RRM, RBD, or RNP
  misc_feature (1)..(143): Homolog of NCBI NO: 34903832 NR Description: ATT4F9_7(AL049523|pid:g4539439) Arabidopsis
  misc_feature (1)..(170): Homolog of NCBI NO: 8671859 NR Description: Contains similarity to RNA-binding protein from thaliana gi|2129727 and contains RNA recognition PF|00076 domain.
  misc_feature (1)..(170): Homolog of NCBI NO: 15220902 NR Description: RNA-binding protein, putative; protein id:
  misc_feature (1)..(170): Homolog of NCBI NO: 15238531 NR Description: RNA-binding protein, putative; protein id:
  misc_feature (1)..(170): Homolog of NCBI NO: 14030687 NR Description: At1g32790 [Arabidopsis thaliana]
  misc_feature (1)..(143): Homolog of NCBI NO: 34903832 NR Description: ATT4F9_7(AL049523|pid:g4539439) Arabidopsis
  misc_feature (1)..(170): Homolog of NCBI NO: 15220902 NR Description: RNA-binding protein, putative; protein id:
  misc_feature (1)..(170): Homolog of NCBI NO: 14030687 NR Description: At1g32790 [Arabidopsis thaliana]
  misc_feature (1)..(170): Homolog of NCBI NO: 15229132 NR Description: RNA-binding protein, putative; protein id:
  misc_feature (1)..(170): Homolog of NCBI NO: 15223304 NR Description: RNA-binding protein, putative
  misc_feature (1)..(170): Homolog of NCBI NO: 15235177 NR Description: RNA-binding protein RBP37
  misc_feature (1)..(170): Homolog of NCBI NO: 1174153 NR Description: RNA-binding protein
  misc_feature (1)..(170): Homolog of NCBI NO: 15231858 NR Description: RNA-binding protein, putative; protein id:
  misc_feature (1)..(170): Homolog of NCBI NO: 15238531 NR Description: RNA-binding protein, putative; protein id:
  misc_feature (1)..(170): Homolog of NCBI NO: 8671859 NR Description: Contains similarity to RNA-binding protein from thaliana gi|2129727 and contains RNA recognition PF|00076 domain.
  misc_feature (1)..(170): Homolog of NCBI NO: 15231858 NR Description: RNA-binding protein, putative; protein id:
  misc_feature (1)..(170): Homolog of NCBI NO: 1174153 NR Description: RNA-binding protein
  misc_feature (1)..(170): Homolog of NCBI NO: 15235177 NR Description: RNA-binding protein RBP37
  misc_feature (1)..(170): Homolog of NCBI NO: 15223304 NR Description: RNA-binding protein, putative
  misc_feature (1)..(170): Homolog of NCBI NO: 15229132 NR Description: RNA-binding protein, putative; protein id:
MNKRTSLAQKDDVIRTTVYVSDIDQQVTEENLAGVFINCGQVVDCRVCGDPNSVLRFAFIEFTNEEGARAALSMSGTVLGFYPLKVLPSKTAIAPVNPTFLPRSEDEREMCVRTVYCTNIDKRITQIDLKGFFEMLCGEVHRLRLGDYHHQTRIAFVEFAMAESAIAALHC

SEQ ID NO: 34892 - DNA, 1163 bp, Arabidopsis thaliana
  misc_feature (1)..(1163): Ceres Seq. ID no. 12371417
  misc_feature: MA Experiment ID: 108462 Result: Down-regulated in Transcription
  misc_feature: MA Experiment 108462 PARAMETER Experiment Name: At_Germinating_Seeds_cDNA_P Parameter: Age (day) Value: 2 vs. 0
  misc_feature: MA Experiment 108462 PARAMETER Experiment Name: At_Germinating_Seeds_cDNA_P Parameter: Tissue Value: Germinating Seeds
  misc_feature: MA Experiment ID: 108463 Result: Down-regulated in Transcription
  misc_feature: MA Experiment 108463 PARAMETER Experiment Name: At_Germinating_Seeds_cDNA_P Parameter: Age (day) Value: 3 vs. 0
  misc_feature: MA Experiment 108463 PARAMETER Experiment Name: At_Germinating_Seeds_cDNA_P Parameter: Tissue Value: Germinating Seeds
  misc_feature: MA Experiment ID: 108464 Result: Down-regulated in Transcription
  misc_feature: MA Experiment 108464 PARAMETER Experiment Name: At_Germinating_Seeds_cDNA_P Parameter: Age (day) Value: 4 vs. 0
  misc_feature: MA Experiment 108464 PARAMETER Experiment Name: At_Germinating_Seeds_cDNA_P Parameter: Tissue Value: Germinating Seeds
  misc_feature: MA Experiment ID: 108488 Result: Up-regulated in Transcription
  misc_feature: MA Experiment ID: 108572 Result: Down-regulated in Transcription
  misc_feature: MA Experiment 108572 PARAMETER Experiment Name: At_Drought_cDNA_P Parameter: Timepoint (hr) Value: 1
  misc_feature: MA Experiment 108572 PARAMETER Experiment Name: At_Drought_cDNA_P Parameter: Tissue Value: Aerial
  misc_feature: MA Experiment 108572 PARAMETER Experiment Name: At_Drought_cDNA_P Parameter: Treatment Value: Drought vs. No Drought
  misc_feature: MA Experiment ID: 108577 Result: Up-regulated in Transcription
  misc_feature: MA Experiment 108577 PARAMETER Experiment Name: At_42deg_Heat_cDNA_P Parameter: Temperature (deg C) Value: 42 vs. 22
  misc_feature: MA Experiment 108577 PARAMETER Experiment Name: At_42deg_Heat_cDNA_P Parameter: Timepoint (hr) Value: 6
  misc_feature: MA Experiment 108577 PARAMETER Experiment Name: At_42deg_Heat_cDNA_P Parameter: Tissue Value: Aerial
  misc_feature: MA Experiment ID: 108579 Result: Up-regulated in Transcription
  misc_feature: MA Experiment 108579 PARAMETER Experiment Name: At_4deg_Cold_cDNA_P Parameter: Temperature (deg C) Value: 4 vs. 22
  misc_feature: MA Experiment 108579 PARAMETER Experiment Name: At_4deg_Cold_cDNA_P Parameter: Timepoint (hr) Value: 6
  misc_feature: MA Experiment 108579 PARAMETER Experiment Name: At_4deg_Cold_cDNA_P Parameter: Tissue Value: Aerial
  misc_feature: MA Experiment ID: 108595 Result: Down-regulated in Transcription
  misc_feature: MA Experiment 108595 PARAMETER Experiment Name: At_Ler-pi_Ovule_cDNA_P Parameter: Plant Line Value: null
  misc_feature: MA Experiment ID: 108605 Result: Down-regulated in Transcription
  misc_feature: MA Experiment 108605 PARAMETER Experiment Name: At_100uM_ABA_cDNA_P Parameter: Timepoint (hr) Value: 6
  misc_feature: MA Experiment 108605 PARAMETER Experiment Name: At_100uM_ABA_cDNA_P Parameter: Tissue Value: Aerial
  misc_feature: MA Experiment 108605 PARAMETER Experiment Name: At_100uM_ABA_cDNA_P Parameter: Treatment Value: 100uM ABA vs. No Treatment
  misc_feature: MA Experiment ID: 108607 Result: Down-regulated in Transcription
  misc_feature: MA Experiment 108607 PARAMETER Experiment Name: At_100uM_ABA_cDNA_P Parameter: Timepoint (hr) Value: 4
  misc_feature: MA Experiment 108607 PARAMETER Experiment Name: At_100uM_ABA_cDNA_P Parameter: Tissue Value: Aerial
  misc_feature: MA Experiment 108607 PARAMETER Experiment Name: At_100uM_ABA_cDNA_P Parameter: Treatment Value: 100uM ABA vs. No Treatment
  misc_feature: MA Experiment ID: 20000069 Result: Down-regulated in Transcription
  misc_feature: MA Experiment 20000069 PARAMETER Experiment Name: At_100uM_ABA_Mutants_cDNA_P Parameter: Plant Line Value: CS23
  misc_feature: MA Experiment 20000069 PARAMETER Experiment Name: At_100uM_ABA_Mutants_cDNA_P Parameter: Timepoint (hr) Value: 6
  misc_feature: MA Experiment 20000069 PARAMETER Experiment Name: At_100uM_ABA_Mutants_cDNA_P Parameter: Tissue Value: Aerial
  misc_feature: MA Experiment 20000069 PARAMETER Experiment Name: At_100uM_ABA_Mutants_cDNA_P Parameter: Treatment Value: 100uM ABA vs. No Treatment
  misc_feature: MA Experiment ID: 20000070 Result: Down-regulated in Transcription
  misc_feature: MA Experiment 20000070 PARAMETER Experiment Name: At_100uM_ABA_Mutants_cDNA_P Parameter: Plant Line Value: CS24
  misc_feature: MA Experiment 20000070 PARAMETER Experiment Name: At_100uM_ABA_Mutants_cDNA_P Parameter: Timepoint (hr) Value: 6
  misc_feature: MA Experiment 20000070 PARAMETER Experiment Name: At_100uM_ABA_Mutants_cDNA_P Parameter: Tissue Value: Aerial
  misc_feature: MA Experiment 20000070 PARAMETER Experiment Name: At_100uM_ABA_Mutants_cDNA_P Parameter: Treatment Value: 100uM ABA vs. No Treatment
  misc_feature: MA Experiment ID: 20000071 Result: Down-regulated in Transcription
  misc_feature: MA Experiment 20000071 PARAMETER Experiment Name: At_100uM_ABA_Mutants_cDNA_P Parameter: Plant Line Value: CS8104
  misc_feature: MA Experiment 20000071 PARAMETER Experiment Name: At_100uM_ABA_Mutants_cDNA_P Parameter: Timepoint (hr) Value: 6
  misc_feature: MA Experiment 20000071 PARAMETER Experiment Name: At_100uM_ABA_Mutants_cDNA_P Parameter: Tissue Value: Aerial
  misc_feature: MA Experiment 20000071 PARAMETER Experiment Name: At_100uM_ABA_Mutants_cDNA_P Parameter: Treatment Value: 100uM ABA vs. No Treatment
  misc_feature: MA Experiment ID: 20000072 Result: Down-regulated in Transcription
  misc_feature: MA Experiment 20000072 PARAMETER Experiment Name: At_100uM_ABA_Mutants_cDNA_P Parameter: Plant Line Value: CS8105
  misc_feature: MA Experiment 20000072 PARAMETER Experiment Name: At_100uM_ABA_Mutants_cDNA_P Parameter: Timepoint (hr) Value: 6
  misc_feature: MA Experiment 20000072 PARAMETER Experiment Name: At_100uM_ABA_Mutants_cDNA_P Parameter: Tissue Value: Aerial
  misc_feature: MA Experiment 20000072 PARAMETER Experiment Name: At_100uM_ABA_Mutants_cDNA_P Parameter: Treatment Value: 100uM ABA vs. No Treatment
  misc_feature: MA Experiment ID: 20000086 Result: Down-regulated in Transcription
  misc_feature: MA Experiment 20000086 PARAMETER Experiment Name: At_100uM_ABA_Mutants_cDNA_P Parameter: Plant Line Value: CS22
  misc_feature: MA Experiment 20000086 PARAMETER Experiment Name: At_100uM_ABA_Mutants_cDNA_P Parameter: Timepoint (hr) Value: 6
  misc_feature: MA Experiment 20000086 PARAMETER Experiment Name: At_100uM_ABA_Mutants_cDNA_P Parameter: Tissue Value: Aerial
  misc_feature: MA Experiment 20000086 PARAMETER Experiment Name: At_100uM_ABA_Mutants_cDNA_P Parameter: Treatment Value: 100uM ABA vs. No Treatment
  misc_feature: MA Experiment ID: 20000087 Result: Down-regulated in Transcription
  misc_feature: MA Experiment 20000087 PARAMETER Experiment Name: At_100uM_ABA_Mutants_cDNA_P Parameter: Plant Line Value: WS
  misc_feature: MA Experiment 20000087 PARAMETER Experiment Name: At_100uM_ABA_Mutants_cDNA_P Parameter: Timepoint (hr) Value: 6
  misc_feature: MA Experiment 20000087 PARAMETER Experiment Name: At_100uM_ABA_Mutants_cDNA_P Parameter: Tissue Value: Aerial
  misc_feature: MA Experiment 20000087 PARAMETER Experiment Name: At_100uM_ABA_Mutants_cDNA_P Parameter: Treatment Value: 100uM ABA vs. No Treatment
  misc_feature: MA Experiment ID: 20000088 Result: Down-regulated in Transcription
  misc_feature: MA Experiment 20000088 PARAMETER Experiment Name: At_100uM_ABA_Mutants_cDNA_P Parameter: Plant Line Value: Landsberg
  misc_feature: MA Experiment 20000088 PARAMETER Experiment Name: At_100uM_ABA_Mutants_cDNA_P Parameter: Timepoint (hr) Value: 6
  misc_feature: MA Experiment 20000088 PARAMETER Experiment Name: At_100uM_ABA_Mutants_cDNA_P Parameter: Tissue Value: Aerial
  misc_feature: MA Experiment 20000088 PARAMETER Experiment Name: At_100uM_ABA_Mutants_cDNA_P Parameter: Treatment Value: 100uM ABA vs. No Treatment
  misc_feature: MA Experiment ID: 20000089 Result: Down-regulated in Transcription
  misc_feature: MA Experiment ID: 20000090 Result: Down-regulated in Transcription
  misc_feature: MA Experiment ID: 20000111 Result: Up-regulated in Transcription
  misc_feature: MA Experiment 20000111 PARAMETER Experiment Name: At_42deg_Heat_cDNA_P Parameter: Temperature (deg C) Value: 42 vs. 22
  misc_feature: MA Experiment 20000111 PARAMETER Experiment Name: At_42deg_Heat_cDNA_P Parameter: Timepoint (hr) Value: 6
  misc_feature: MA Experiment 20000111 PARAMETER Experiment Name: At_42deg_Heat_cDNA_P Parameter: Tissue Value: Aerial
  misc_feature: MA Experiment ID: 20000112 Result: Up-regulated in Transcription
  misc_feature: MA Experiment 20000112 PARAMETER Experiment Name: At_42deg_Heat_cDNA_P Parameter: Temperature (deg C) Value: 42 vs. 22
  misc_feature: MA Experiment 20000112 PARAMETER Experiment Name: At_42deg_Heat_cDNA_P Parameter: Timepoint (hr) Value: 2
  misc_feature: MA Experiment 20000112 PARAMETER Experiment Name: At_42deg_Heat_cDNA_P Parameter: Tissue Value: Aerial
  misc_feature: MA Experiment ID: 20000113 Result: Up-regulated in Transcription
  misc_feature: MA Experiment 20000113 PARAMETER Experiment Name: At_42deg_Heat_cDNA_P Parameter: Temperature (deg C) Value: 42 vs. 22
  misc_feature: MA Experiment 20000113 PARAMETER Experiment Name: At_42deg_Heat_cDNA_P Parameter: Timepoint (hr) Value: 8
  misc_feature: MA Experiment 20000113 PARAMETER Experiment Name: At_42deg_Heat_cDNA_P Parameter: Tissue Value: Aerial
  misc_feature: MA Experiment ID: 20000117 Result: Down-regulated in Transcription
  misc_feature: MA Experiment 20000117 PARAMETER Experiment Name: At_100uM_ABA_Mutants_cDNA_P Parameter: Plant Line Value: Columbia
  misc_feature: MA Experiment 20000117 PARAMETER Experiment Name: At_100uM_ABA_Mutants_cDNA_P Parameter: Timepoint (hr) Value: 6
  misc_feature: MA Experiment 20000117 PARAMETER Experiment Name: At_100uM_ABA_Mutants_cDNA_P Parameter: Tissue Value: Aerial
  misc_feature: MA Experiment 20000117 PARAMETER Experiment Name: At_100uM_ABA_Mutants_cDNA_P Parameter: Treatment Value: 100uM ABA vs. No Treatment
  misc_feature: MA Experiment ID: 20000144 Result: Up-regulated in Transcription
  misc_feature: MA Experiment 20000144 PARAMETER Experiment Name: At_42deg_Heat_cDNA_P Parameter: Temperature (deg C) Value: 42 vs. 22
  misc_feature: MA Experiment 20000144 PARAMETER Experiment Name: At_42deg_Heat_cDNA_P Parameter: Timepoint (hr) Value: 1
  misc_feature: MA Experiment 20000144 PARAMETER Experiment Name: At_42deg_Heat_cDNA_P Parameter: Tissue Value: Aerial
  misc_feature: MA Experiment ID: 20000169 Result: Down-regulated in Transcription
  misc_feature: MA Experiment 20000169 PARAMETER Experiment Name: At_100uM_ABA_P Parameter: Age (day) Value: 14
  misc_feature: MA Experiment 20000169 PARAMETER Experiment Name: At_100uM_ABA_P Parameter: Organism Value: A. thaliana
  misc_feature: MA Experiment 20000169 PARAMETER Experiment Name: At_100uM_ABA_P Parameter: Plant Line Value: WS
  misc_feature: MA Experiment 20000169 PARAMETER Experiment Name: At_100uM_ABA_P Parameter: Timepoint (hr) Value: 6
  misc_feature: MA Experiment 20000169 PARAMETER Experiment Name: At_100uM_ABA_P Parameter: Tissue Value: Aerial
  misc_feature: MA Experiment 20000169 PARAMETER Experiment Name: At_100uM_ABA_P Parameter: Treatment Value: 100uM ABA vs. No Treatment
  misc_feature: MA Experiment ID: 20000173 Result: Up-regulated in Transcription
  misc_feature: MA Experiment 20000173 PARAMETER Experiment Name: At_42deg_Heat_P Parameter: Age (day) Value: 14
  misc_feature: MA Experiment 20000173 PARAMETER Experiment Name: At_42deg_Heat_P Parameter: Organism Value: A. thaliana
  misc_feature: MA Experiment 20000173 PARAMETER Experiment Name: At_42deg_Heat_P Parameter: Plant Line Value: WS
  misc_feature: MA Experiment 20000173 PARAMETER Experiment Name: At_42deg_Heat_P Parameter: Temperature (deg C) Value: 42 vs. 22
  misc_feature: MA Experiment 20000173 PARAMETER Experiment Name: At_42deg_Heat_P Parameter: Timepoint (hr) Value: 6
  misc_feature: MA Experiment 20000173 PARAMETER Experiment Name: At_42deg_Heat_P Parameter: Tissue Value: Aerial
  misc_feature: MA Experiment ID: 20000184 Result: Up-regulated in Transcription
  misc_feature: MA Experiment 20000184 PARAMETER Experiment Name: At_Shoots__P Parameter: Age (day) Value: 7
  misc_feature: MA Experiment 20000184 PARAMETER Experiment Name: At_Shoots__P Parameter: Tissue Value: Shoots vs. Whole Plant
  misc_feature: MA Experiment ID: 20000437 Result: Down-regulated in Transcription
  misc_feature: MA Experiment 20000437 PARAMETER Experiment Name: At_Drought_P Parameter: Age (day) Value: 8
  misc_feature: MA Experiment 20000437 PARAMETER Experiment Name: At_Drought_P Parameter: Organism Value: A. thaliana
  misc_feature: MA Experiment 20000437 PARAMETER Experiment Name: At_Drought_P Parameter: Plant Line Value: WS
  misc_feature: MA Experiment 20000437 PARAMETER Experiment Name: At_Drought_P Parameter: Timepoint (hr) Value: 24
  misc_feature: MA Experiment 20000437 PARAMETER Experiment Name: At_Drought_P Parameter: Tissue Value: Whole Plant
  misc_feature: MA Experiment 20000437 PARAMETER Experiment Name: At_Drought_P Parameter: Treatment Value: Drought vs. No Drought
  misc_feature: MA Experiment ID: 20001248 Result: Down-regulated in Transcription
  misc_feature: MA Experiment 20001248 PARAMETER Experiment Name: At_Far-red-induction_P Parameter: Age (day) Value: 7
  misc_feature: MA Experiment 20001248 PARAMETER Experiment Name: At_Far-red-induction_P Parameter: Light Value: Far-red vs. White
  misc_feature: MA Experiment 20001248 PARAMETER Experiment Name: At_Far-red-induction_P Parameter: Organism Value: A. thaliana
  misc_feature: MA Experiment 20001248 PARAMETER Experiment Name: At_Far-red-induction_P Parameter: Plant Line Value: Columbia
  misc_feature: MA Experiment 20001248 PARAMETER Experiment Name: At_Far-red-induction_P Parameter: Timepoint (hr) Value: 4
  misc_feature: MA Experiment 20001248 PARAMETER Experiment Name: At_Far-red-induction_P Parameter: Tissue Value: Whole Plant
  misc_feature: MA Experiment ID: 20001450 Result: Down-regulated in Transcription
  misc_feature: MA Experiment 20001450 PARAMETER Experiment Name: At_Far-red-induction_P Parameter: Age (day) Value: 7
  misc_feature: MA Experiment 20001450 PARAMETER Experiment Name: At_Far-red-induction_P Parameter: Light Value: Far-red vs. White
  misc_feature: MA Experiment 20001450 PARAMETER Experiment Name: At_Far-red-induction_P Parameter: Organism Value: A. thaliana
  misc_feature: MA Experiment 20001450 PARAMETER Experiment Name: At_Far-red-induction_P Parameter: Plant Line Value: Columbia
  misc_feature: MA Experiment 20001450 PARAMETER Experiment Name: At_Far-red-induction_P Parameter: Timepoint (hr) Value: 8
  misc_feature: MA Experiment 20001450 PARAMETER Experiment Name: At_Far-red-induction_P Parameter: Tissue Value: Whole Plant
ctataaagccgatccatagataaacgaggaccggccagaaatcgcttcaccattcccaaatctctcttccattttctccacacaaatttctcttcaatctccgataatggaaggaaccggcgttgtggcggtgtacggtaacggtgcgataacggaggcgaagaaatctcccttctccgtgaaggtcggtttggctcagatgctccgtggtggtgttatcatggatgtcgtcaacgccgagcaagctcgtatcgccgaggaggctggtgcttgcgccgtcatggctttggagcgtgttcctgctgatatccttgaagcaattggaatcgattacatcgatgagagcgaggttttgactcttgctgatgaagatcatcacatcaacaagcataatttccggatcccgttcgtttgcggttgccggaatctcggcgaggctctgaggaggatccgtgaaggtgcggcgatgattaggaccaaaggtgaagctggaaccggtaacattattgaagctgtgaggcatgtgaggtctgttaatggtgacattagggttttgcgaaacatggatgatgatgaggttttcactttcgctaagaaattagccgctccgtacgatctcgtgatgcagactaagcagcttggtcgtcttcctgtagtccaattcgccgccggtggagtggctactccggctgatgcagctctcatgatgcagcttggatgtgatggtgtctttgttggttctggtatcttcaagagcggtgacccagctcgtcgtgcacgtgccattgttcaggctgtgactcattacagtgaccctgagatgcttgtggaggtgagctgtgggcttggagaagccatggttgggatcaatctcaacgatgagaaggttgagaggttcgctaatcgctccgagtgatcaaagaaataaaaggtaaaatttctcagacgaaatggtttcagaattttctcagaccattttgcagtaatctctttgaaaagaagaagatgatgatattgttggtagtttgtatcctttgtgttttccttataatctttgatagtcttttgttattgtaatctcgtaatccctttgcaagaacaagtttgtcagttataataatgtactactctcttgatcgatcagttggttttgaatctgatat

SEQ ID NO: 34893 - protein, 269 aa, Arabidopsis thaliana
  peptide (1)..(269): Ceres Seq. ID no. 12371418
  misc_feature (34)..(188): Pfam Name: SOR/SNZ family Pfam Description: SOR/SNZ family
  misc_feature (34)..(267): Homolog of NCBI NO: 22970419 NR Description: hypothetical protein [Chloroflexus aurantiacus]
  misc_feature (80)..(269): Homolog of NCBI NO: 7488891 NR Description: ethylene-responsive protein 2 - Para rubber tree
  misc_feature (11)..(269): Homolog of NCBI NO: 37530308 NR Description: putative pyridoxine/pyridoxal 5-phosphate
  misc_feature (11)..(269): Homolog of NCBI NO: 13310484 NR Description: Sor-like protein [Ginkgo biloba]
  misc_feature (34)..(269): Homolog of NCBI NO: 15224470 NR Description: similar to SOR1 from the fungus Cercospora
  misc_feature (11)..(269): Homolog of NCBI NO: 34394152 NR Description: putative ethylene-inducible protein
  misc_feature (34)..(269): Homolog of NCBI NO: 10719739 NR Description: putative pyridoxine biosynthetic enzyme
  misc_feature (34)..(269): Homolog of NCBI NO: 2501578 NR Description: ETHYLENE-INDUCIBLE PROTEIN HEVER
  misc_feature (34)..(269): Homolog of NCBI NO: 21617922 NR Description: pyridoxine biosynthesis protein-like [Arabidopsis
  misc_feature (34)..(269): Homolog of NCBI NO: 15240972 NR Description: pyridoxine biosynthesis protein - like
MEGTGVVAVYGNGAITEAKKSPFSVKVGLAQMLRGGVIMDVVNAEQARIAEEAGACAVMALERVPADILEAIGIDYIDESEVLTLADEDHHINKHNFRIPFVCGCRNLGEALRRIREGAAMIRTKGEAGTGNIIEAVRHVRSVNGDIRVLRNMDDDEVFTFAKKLAAPYDLVMQTKQLGRLPVVQFAAGGVATPADAALMMQLGCDGVFVGSGIFKSGDPARRARAIVQAVTHYSDPEMLVEVSCGLGEAMVGINLNDEKVERFANRSE

SEQ ID NO: 34894 - protein, 238 aa, Arabidopsis thaliana
  peptide (1)..(238): Ceres Seq. ID no. 12371419
  misc_feature (3)..(157): Pfam Name: SOR/SNZ family Pfam Description: SOR/SNZ family
  misc_feature (3)..(236): Homolog of NCBI NO: 22970419 NR Description: hypothetical protein [Chloroflexus aurantiacus]
  misc_feature (49)..(238): Homolog of NCBI NO: 7488891 NR Description: ethylene-responsive protein 2 - Para rubber tree
  misc_feature (1)..(238): Homolog of NCBI NO: 37530308 NR Description: putative pyridoxine/pyridoxal 5-phosphate
  misc_feature (1)..(238): Homolog of NCBI NO: 13310484 NR Description: Sor-like protein [Ginkgo biloba]
  misc_feature (3)..(238): Homolog of NCBI NO: 15224470 NR Description: similar to SOR1 from the fungus Cercospora
  misc_feature (1)..(238): Homolog of NCBI NO: 34394152 NR Description: putative ethylene-inducible protein
  misc_feature (3)..(238): Homolog of NCBI NO: 10719739 NR Description: putative pyridoxine biosynthetic enzyme
  misc_feature (3)..(238): Homolog of NCBI NO: 2501578 NR Description: ETHYLENE-INDUCIBLE PROTEIN HEVER
  misc_feature (3)..(238): Homolog of NCBI NO: 21617922 NR Description: pyridoxine biosynthesis protein-like [Arabidopsis
  misc_feature (3)..(238): Homolog of NCBI NO: 15240972 NR Description: pyridoxine biosynthesis protein - like
MLRGGVIMDVVNAEQARIAEEAGACAVMALERVPADILEAIGIDYIDESEVLTLADEDHHINKHNFRIPFVCGCRNLGEALRRIREGAAMIRTKGEAGTGNIIEAVRHVRSVNGDIRVLRNMDDDEVFTFAKKLAAPYDLVMQTKQLGRLPVVQFAAGGVATPADAALMMQLGCDGVFVGSGIFKSGDPARRARAIVQAVTHYSDPEMLVEVSCGLGEAMVGINLNDEKVERFANRSE

SEQ ID NO: 34895 - protein, 231 aa, Arabidopsis thaliana
  peptide (1)..(231): Ceres Seq. ID no. 12371420
  misc_feature (1)..(150): Pfam Name: SOR/SNZ family Pfam Description: SOR/SNZ family
  misc_feature (1)..(229): Homolog of NCBI NO: 22970419 NR Description: hypothetical protein [Chloroflexus aurantiacus]
  misc_feature (42)..(231): Homolog of NCBI NO: 7488891 NR Description: ethylene-responsive protein 2 - Para rubber tree
  misc_feature (1)..(231): Homolog of NCBI NO: 37530308 NR Description: putative pyridoxine/pyridoxal 5-phosphate
  misc_feature (1)..(231): Homolog of NCBI NO: 13310484 NR Description: Sor-like protein [Ginkgo biloba]
  misc_feature (1)..(231): Homolog of NCBI NO: 15224470 NR Description: similar to SOR1 from the fungus Cercospora
  misc_feature (1)..(231): Homolog of NCBI NO: 34394152 NR Description: putative ethylene-inducible protein
  misc_feature (1)..(231): Homolog of NCBI NO: 10719739 NR Description: putative pyridoxine biosynthetic enzyme
  misc_feature (1)..(231): Homolog of NCBI NO: 2501578 NR Description: ETHYLENE-INDUCIBLE PROTEIN HEVER
  misc_feature (1)..(231): Homolog of NCBI NO: 21617922 NR Description: pyridoxine biosynthesis protein-like [Arabidopsis
  misc_feature (1)..(231): Homolog of NCBI NO: 15240972 NR Description: pyridoxine biosynthesis protein - like
MDVVNAEQARIAEEAGACAVMALERVPADILEAIGIDYIDESEVLTLADEDHHINKHNFRIPFVCGCRNLGEALRRIREGAAMIRTKGEAGTGNIIEAVRHVRSVNGDIRVLRNMDDDEVFTFAKKLAAPYDLVMQTKQLGRLPVVQFAAGGVATPADAALMMQLGCDGVFVGSGIFKSGDPARRARAIVQAVTHYSDPEMLVEVSCGLGEAMVGINLNDEKVERFANRSE

SEQ ID NO: 34896 - DNA, 1596 bp, Arabidopsis thaliana
  misc_feature (1)..(1596): Ceres Seq. ID no. 13487502
  misc_feature: MA Experiment ID: 108434 Result: Down-regulated in Transcription
  misc_feature: MA Experiment 108434 PARAMETER Experiment Name: At_Root_Tips_cDNA_P Parameter: Tissue Value: Root Tips
  misc_feature: MA Experiment ID: 108461 Result: Down-regulated in Transcription
  misc_feature: MA Experiment 108461 PARAMETER Experiment Name: At_Germinating_Seeds_cDNA_P Parameter: Age (day) Value: 1 vs. 0
  misc_feature: MA Experiment 108461 PARAMETER Experiment Name: At_Germinating_Seeds_cDNA_P Parameter: Tissue Value: Germinating Seeds
  misc_feature: MA Experiment ID: 108572 Result: Up-regulated in Transcription
  misc_feature: MA Experiment 108572 PARAMETER Experiment Name: At_Drought_cDNA_P Parameter: Timepoint (hr) Value: 1
  misc_feature: MA Experiment 108572 PARAMETER Experiment Name: At_Drought_cDNA_P Parameter: Tissue Value: Aerial
  misc_feature: MA Experiment 108572 PARAMETER Experiment Name: At_Drought_cDNA_P Parameter: Treatment Value: Drought vs. No Drought
  misc_feature: MA Experiment ID: 108573 Result: Up-regulated in Transcription
  misc_feature: MA Experiment 108573 PARAMETER Experiment Name: At_Drought_cDNA_P Parameter: Timepoint (hr) Value: 6
  misc_feature: MA Experiment 108573 PARAMETER Experiment Name: At_Drought_cDNA_P Parameter: Tissue Value: Aerial
  misc_feature: MA Experiment 108573 PARAMETER Experiment Name: At_Drought_cDNA_P Parameter: Treatment Value: Drought vs. No Drought
  misc_feature: MA Experiment ID: 108574 Result: Up-regulated in Transcription
  misc_feature: MA Experiment 108574 PARAMETER Experiment Name: At_Wounding__cDNA_P Parameter: Timepoint (hr) Value: 1
  misc_feature: MA Experiment 108574 PARAMETER Experiment Name: At_Wounding__cDNA_P Parameter: Tissue Value: Aerial
  misc_feature: MA Experiment 108574 PARAMETER Experiment Name: At_Wounding__cDNA_P Parameter: Treatment Value: Wounding vs. No Wounding
  misc_feature: MA Experiment ID: 108668 Result: Up-regulated in Transcription
  misc_feature: MA Experiment 108668 PARAMETER Experiment Name: At_2mM_SA_cDNA_P Parameter: Plant Line Value: WS
  misc_feature: MA Experiment 108668 PARAMETER Experiment Name: At_2mM_SA_cDNA_P Parameter: Timepoint (hr) Value: 6
  misc_feature: MA Experiment 108668 PARAMETER Experiment Name: At_2mM_SA_cDNA_P Parameter: Treatment Value: 2mM SA vs. No Treatment
  misc_feature: MA Experiment ID: 20000069 Result: Down-regulated in Transcription
  misc_feature: MA Experiment 20000069 PARAMETER Experiment Name: At_100uM_ABA_Mutants_cDNA_P Parameter: Plant Line Value: CS23
  misc_feature: MA Experiment 20000069 PARAMETER Experiment Name: At_100uM_ABA_Mutants_cDNA_P Parameter: Timepoint (hr) Value: 6
  misc_feature: MA Experiment 20000069 PARAMETER Experiment Name: At_100uM_ABA_Mutants_cDNA_P Parameter: Tissue Value: Aerial
  misc_feature: MA Experiment 20000069 PARAMETER Experiment Name: At_100uM_ABA_Mutants_cDNA_P Parameter: Treatment Value: 100uM ABA vs. No Treatment
  misc_feature: MA Experiment ID: 20000327 Result: Down-regulated in Transcription
  misc_feature: MA Experiment 20000327 PARAMETER Experiment Name: At_42deg_Heat_Sub_P Parameter: Age (day) Value: 14
  misc_feature: MA Experiment 20000327 PARAMETER Experiment Name: At_42deg_Heat_Sub_P Parameter: Organism Value: A. thaliana
  misc_feature: MA Experiment 20000327 PARAMETER Experiment Name: At_42deg_Heat_Sub_P Parameter: Plant Line Value: WS
  misc_feature: MA Experiment 20000327 PARAMETER Experiment Name: At_42deg_Heat_Sub_P Parameter: Temperature (deg C) Value: 42 vs. 22
  misc_feature: MA Experiment 20000327 PARAMETER Experiment Name: At_42deg_Heat_Sub_P Parameter: Timepoint (hr) Value: 1
  misc_feature: MA Experiment 20000327 PARAMETER Experiment Name: At_42deg_Heat_Sub_P Parameter: Tissue Value: Aerial
  misc_feature: MA Experiment ID: 20000328 Result: Down-regulated in Transcription
  misc_feature: MA Experiment 20000328 PARAMETER Experiment Name: At_42deg_Heat_Sub_P Parameter: Age (day) Value: 14
  misc_feature: MA Experiment 20000328 PARAMETER Experiment Name: At_42deg_Heat_Sub_P Parameter: Organism Value: A. thaliana
  misc_feature: MA Experiment 20000328 PARAMETER Experiment Name: At_42deg_Heat_Sub_P Parameter: Plant Line Value: WS
  misc_feature: MA Experiment 20000328 PARAMETER Experiment Name: At_42deg_Heat_Sub_P Parameter: Temperature (deg C) Value: 42 vs. 22
  misc_feature: MA Experiment 20000328 PARAMETER Experiment Name: At_42deg_Heat_Sub_P Parameter: Timepoint (hr) Value: 6
  misc_feature: MA Experiment 20000328 PARAMETER Experiment Name: At_42deg_Heat_Sub_P Parameter: Tissue Value: Aerial
  misc_feature: MA Experiment ID: 20000440 Result: Up-regulated in Transcription
  misc_feature: MA Experiment 20000440 PARAMETER Experiment Name: At_Closed-Flower__Sub_P Parameter: Tissue Value: Closed Flower vs. Whole Plant
aatgaaagaaactgttcaacaacttctgatttctaaaatctttttaaaatctctccgccacttctagttggacttgacttctcaccatagtctgtcccgttgttaccgaccatctattatatagggaaagtctcttagctacagagacacaataaccatttggagaggtcatgaactctaagaatcgcataaacaatgtcggggaaggtgttgatatcgaaatccctgacactgctcatcagattagcagcgattcatggtttcaggcagcgttcgttctgacaacaagtataaacagcgcatacgtgttgggatattcaggaacagtcatggttcctttaggatggattggtggtgtggttggtcttattcttgctactgcaatctcactctatgcaaacactctcgtagccaagcttcatgagtttggtggcaaaagacacattcgctatagagaccttgcgggattcatttacggtagaaaggcttattgtcttacatgggtgttgcaatatgtcaatcttttcatgattaattgtggtttcatcatactagctggttccgccttaaaggctgtttatgtgctttttagggatgatcatgccatgaagttacctcattttatagctattgcgggtctgatttgtgcggtttttgctattggaattcctcatttgtcggctcttgggatatggcttgcggtttcgactatcctcagcctgatctatatcgttgtggcaatcgtgctatcggttaaagatggagttaaagcaccttcaagagattacgagatacaaggatcaccactaagcaaactttttaccatcactggagcagccgctacactagttttcgtattcaacacagggatgcttccagaaattcaggcaacagtaaagcaaccagtagtaaaaaacatgatgaaggctctatactttcaattcacggtgggtgttttaccgatgtttgcggttgtattcatcgggtattgggcttacggatcctcgacctcgccctatctactaaacaacgttaatggtccactttgggttaaagcccttgctaacatctccgctatccttcaatccgttatctcgttgcacatttttgcaagtccaacatatgagtacatggacaccaagtttgggatcaaaggaaacccattggcattaaagaacttgttgtttaggatcatggcaagaggcgggtacatagcagttagtacgcttctctcagcactcttgccgttccttggggacttcatgagcctcactggtgcagtgagcacattcccccttacattcattctagccaaccacatgtactataaggctaagaacaataagctcaatactttgcaaaagctatgccattggctcaacgttgtcttcttcagtttgatgtctgttgctgccgccattgcagctcttaggctcatcgcccttgactccaaaaacttccacgtttttgcagatttgtaattcataatatatactcatcgtatttattcttagttggatttcttatcaataaaattaattttcaataaaacaatgtatatagaactatggttactaggggatggagatattatgc

SEQ ID NO: 34897 - protein, 436 aa, Arabidopsis thaliana
  peptide (1)..(436): Ceres Seq. ID no. 13487503
  misc_feature (1)..(436): Homolog of NCBI NO: 16215723 NR Description: proline transporter [Hordeum vulgare subsp.
  misc_feature (7)..(436): Homolog of NCBI NO: 11358950 NR Description: proline transport protein 3 [imported] - tomato
  misc_feature (16)..(436): Homolog of NCBI NO: 8571474 NR Description: proline/glycine betaine transporter [Atriplex
  misc_feature (14)..(436): Homolog of NCBI NO: 21069020 NR Description: betaine/proline transporter [Avicennia marina]
  misc_feature (6)..(436): Homolog of NCBI NO: 21069018 NR Description: betaine/proline transporter [Avicennia marina]
  misc_feature (1)..(436): Homolog of NCBI NO: 15228183 NR Description: proline transporter 2 (ProT2) [Arabidopsis
  misc_feature (3)..(436): Homolog of NCBI NO: 21593453 NR Description: proline transporter 1 [Arabidopsis thaliana]
  misc_feature (3)..(436): Homolog of NCBI NO: 15225591 NR Description: proline transporter 1 (ProT1) [Arabidopsis
  misc_feature (1)..(436): Homolog of NCBI NO: 21554196 NR Description: putative proline transporter [Arabidopsis
  misc_feature (1)..(436): Homolog of NCBI NO: 15228000 NR Description: proline transporter, putative [Arabidopsis
MNSKNRINNVGEGVDIEIPDTAHQISSDSWFQAAFVLTTSINSAYVLGYSGTVMVPLGWIGGVVGLILATAISLYANTLVAKLHEFGGKRHIRYRDLAGFIYGRKAYCLTWVLQYVNLFMINCGFIILAGSALKAVYVLFRDDHAMKLPHFIAIAGLICAVFAIGIPHLSALGIWLAVSTILSLIYIVVAIVLSVKDGVKAPSRDYEIQGSPLSKLFTITGAAATLVFVFNTGMLPEIQATVKQPVVKNMMKALYFQFTVGVLPMFAVVFIGYWAYGSSTSPYLLNNVNGPLWVKALANISAILQSVISLHIFASPTYEYMDTKFGIKGNPLALKNLLFRIMARGGYIAVSTLLSALLPFLGDFMSLTGAVSTFPLTFILANHMYYKAKNNKLNTLQKLCHWLNVVFFSLMSVAAAIAALRLIALDSKNFHVFADL

SEQ ID NO: 34898 - protein, 383 aa, Arabidopsis thaliana
  peptide (1)..(383): Ceres Seq. ID no. 13487504
  misc_feature (1)..(383): Homolog of NCBI NO: 16215723 NR Description: proline transporter [Hordeum vulgare subsp.
  misc_feature (1)..(383): Homolog of NCBI NO: 11358950 NR Description: proline transport protein 3 [imported] - tomato
  misc_feature (1)..(383): Homolog of NCBI NO: 8571474 NR Description: proline/glycine betaine transporter [Atriplex
  misc_feature (1)..(383): Homolog of NCBI NO: 21069020 NR Description: betaine/proline transporter [Avicennia marina]
  misc_feature (1)..(383): Homolog of NCBI NO: 21069018 NR Description: betaine/proline transporter [Avicennia marina]
  misc_feature (1)..(383): Homolog of NCBI NO: 15228183 NR Description: proline transporter 2 (ProT2) [Arabidopsis
  misc_feature (1)..(383): Homolog of NCBI NO: 21593453 NR Description: proline transporter 1 [Arabidopsis thaliana]
  misc_feature (1)..(383): Homolog of NCBI NO: 15225591 NR Description: proline transporter 1 (ProT1) [Arabidopsis
  misc_feature (1)..(383): Homolog of NCBI NO: 21554196 NR Description: putative proline transporter [Arabidopsis
  misc_feature (1)..(383): Homolog of NCBI NO: 15228000 NR Description: proline transporter, putative [Arabidopsis
MVPLGWIGGVVGLILATAISLYANTLVAKLHEFGGKRHIRYRDLAGFIYGRKAYCLTWVLQYVNLFMINCGFIILAGSALKAVYVLFRDDHAMKLPHFIAIAGLICAVFAIGIPHLSALGIWLAVSTILSLIYIVVAIVLSVKDGVKAPSRDYEIQGSPLSKLFTITGAAATLVFVFNTGMLPEIQATVKQPVVKNMMKALYFQFTVGVLPMFAVVFIGYWAYGSSTSPYLLNNVNGPLWVKALANISAILQSVISLHIFASPTYEYMDTKFGIKGNPLALKNLLFRIMARGGYIAVSTLLSALLPFLGDFMSLTGAVSTFPLTFILANHMYYKAKNNKLNTLQKLCHWLNVVFFSLMSVAAAIAALRLIALDSKNFHVFADL

SEQ ID NO: 34899 - protein, 317 aa, Arabidopsis thaliana
  peptide (1)..(317): Ceres Seq. ID no. 13487505
  misc_feature (1)..(317): Homolog of NCBI NO: 16215723 NR Description: proline transporter [Hordeum vulgare subsp.
  misc_feature (1)..(317): Homolog of NCBI NO: 11358950 NR Description: proline transport protein 3 [imported] - tomato
  misc_feature (1)..(317): Homolog of NCBI NO: 8571474 NR Description: proline/glycine betaine transporter [Atriplex
  misc_feature (1)..(317): Homolog of NCBI NO: 21069020 NR Description: betaine/proline transporter [Avicennia marina]
  misc_feature (1)..(317): Homolog of NCBI NO: 21069018 NR Description: betaine/proline transporter [Avicennia marina]
  misc_feature (1)..(317): Homolog of NCBI NO: 15228183 NR Description: proline transporter 2 (ProT2) [Arabidopsis
  misc_feature (1)..(317): Homolog of NCBI NO: 21593453 NR Description: proline transporter 1 [Arabidopsis thaliana]
  misc_feature (1)..(317): Homolog of NCBI NO: 15225591 NR Description: proline transporter 1 (ProT1) [Arabidopsis
  misc_feature (1)..(317): Homolog of NCBI NO: 21554196 NR Description: putative proline transporter [Arabidopsis
  misc_feature (1)..(317): Homolog of NCBI NO: 15228000 NR Description: proline transporter, putative [Arabidopsis
MINCGFIILAGSALKAVYVLFRDDHAMKLPHFIAIAGLICAVFAIGIPHLSALGIWLAVSTILSLIYIVVAIVLSVKDGVKAPSRDYEIQGSPLSKLFTITGAAATLVFVFNTGMLPEIQATVKQPVVKNMMKALYFQFTVGVLPMFAVVFIGYWAYGSSTSPYLLNNVNGPLWVKALANISAILQSVISLHIFASPTYEYMDTKFGIKGNPLALKNLLFRIMARGGYIAVSTLLSALLPFLGDFMSLTGAVSTFPLTFILANHMYYKAKNNKLNTLQKLCHWLNVVFFSLMSVAAAIAALRLIALDSKNFHVFADL

SEQ ID NO: 34900 - DNA, 822 bp, Arabidopsis thaliana
  misc_feature (1)..(822): Ceres Seq. ID no. 13504913
  misc_feature: MA Experiment ID: 108595 Result: Down-regulated in Transcription
  misc_feature: MA Experiment 108595 PARAMETER Experiment Name: At_Ler-pi_Ovule_cDNA_P Parameter: Plant Line Value: null
atgtttacttattcggactagagagcttccgcataaagctgaggaaaaaaaagagagaagacgcacaccgaagaaaacacacaagactccattattctcctgcttcttcgtctcttcaattattttctctgagactagctttgattcaaccatggctaatgcagcatcaggaatggcagtccatgatgactgcaagctgaaatttatggaattgaagacgaaaaggacacaccgtttcatcatttacaagattgaggagctgcagaaacaagtgattgttgagaaaatcggtgaaccgggtcaaacccatgaggaccttgctgcaagtcttccagctgatgaatgccgctatgccattttcgattttgattttgtcagttctgagggtgtcccaaggagcaggatttttttcgtggcatggtctccggacacagcaagagtgagaagcaagatgatctatgcgagctccaaggacaggttcaagagagaactagacggaattcaggtcgagcttcaggcaaccgatccaaccgagatggatcttgatgttttcaaaagccgagccaattgatgaaagaaatcccctgaaaatttcggttgaatcaaactttttcgtactattactcagtgatgctttttcctaaagtttgctgtgacggtaccaacctgaacagcttcattttatcagtttggtctttgtctttgtctttggtctcctttttgggtccttatagtgttgtcttaaaacttaaggaatctggcttgtgctctttaccattgtggaagaaatcgaaccctttattaaacaagaatcctattggc

SEQ ID NO: 34901 - protein, 189 aa, Arabidopsis thaliana
  peptide (1)..(189): Ceres Seq. ID no. 13504914
  misc_feature (62)..(189): Pfam Name: Cofilin/tropomyosin-type actin-binding protein Pfam Description: Cofilin/tropomyosin-type actin-binding protein
  misc_feature (62)..(189): Pfam Name: Cofilin/tropomyosin-type actin-binding protein Pfam Description: Cofilin/tropomyosin-type actin-binding protein
  misc_feature (58)..(189): Homolog of NCBI NO: 30697303 NR Description: actin depolymerizing factor 4 - like protein
  misc_feature (51)..(189): Homolog of NCBI NO: 18408116 NR Description: actin depolymerizing factor 2 (ADF2) [Arabidopsis
  misc_feature (51)..(189): Homolog of NCBI NO: 38564721 NR Description: putative actin-depolymerizing factor 2
  misc_feature (51)..(189): Homolog of NCBI NO: 17366768 NR Description: Actin-depolymerizing factor 1 (ADF 1)
  misc_feature (51)..(188): Homolog of NCBI NO: 17366765 NR Description: Actin-depolymerizing factor 2 (ADF 2)
  misc_feature (58)..(189): Homolog of NCBI NO: 30697303 NR Description: actin depolymerizing factor 4 - like protein
  misc_feature (51)..(189): Homolog of NCBI NO: 38564721 NR Description: putative actin-depolymerizing factor 2
  misc_feature (51)..(188): Homolog of NCBI NO: 17366765 NR Description: Actin-depolymerizing factor 2 (ADF 2)
  misc_feature (51)..(189): Homolog of NCBI NO: 30697295 NR Description: actin depolymerizing factor 3 - like protein
  misc_feature (51)..(189): Homolog of NCBI NO: 15231309 NR Description: actin depolymerizing factor 1 (ADF1) [Arabidopsis
  misc_feature (51)..(189): Homolog of NCBI NO: 30697300 NR Description: actin depolymerizing factor 4 - like protein
  misc_feature (51)..(189): Homolog of NCBI NO: 4185511 NR Description: actin depolymerizing factor 4 [Arabidopsis
  misc_feature (51)..(189): Homolog of NCBI NO: 30697298 NR Description: actin depolymerizing factor 3 - like protein
  misc_feature (51)..(189): Homolog of NCBI NO: 17366768 NR Description: Actin-depolymerizing factor 1 (ADF 1)
  misc_feature (51)..(189): Homolog of NCBI NO: 18408116 NR Description: actin depolymerizing factor 2 (ADF2) [Arabidopsis
  misc_feature (51)..(189): Homolog of NCBI NO: 30697298 NR Description: actin depolymerizing factor 3 - like protein
  misc_feature (51)..(189): Homolog of NCBI NO: 4185511 NR Description: actin depolymerizing factor 4 [Arabidopsis
  misc_feature (51)..(189): Homolog of NCBI NO: 30697300 NR Description: actin depolymerizing factor 4 - like protein
  misc_feature (51)..(189): Homolog of NCBI NO: 15231309 NR Description: actin depolymerizing factor 1 (ADF1) [Arabidopsis
  misc_feature (51)..(189): Homolog of NCBI NO: 30697295 NR Description: actin depolymerizing factor 3 - like protein
CLLIRTRELPHKAEEKKERRRTPKKTHKTPLFSCFFVSSIIFSETSFDSTMANAASGMAVHDDCKLKFMELKTKRTHRFIIYKIEELQKQVIVEKIGEPGQTHEDLAASLPADECRYAIFDFDFVSSEGVPRSRIFFVAWSPDTARVRSKMIYASSKDRFKRELDGIQVELQATDPTEMDLDVFKSRAN

SEQ ID NO: 34902 - protein, 139 aa, Arabidopsis thaliana
  peptide (1)..(139): Ceres Seq. ID no. 13504915
  misc_feature (12)..(139): Pfam Name: Cofilin/tropomyosin-type actin-binding protein Pfam Description: Cofilin/tropomyosin-type actin-binding protein
  misc_feature (12)..(139): Pfam Name: Cofilin/tropomyosin-type actin-binding protein Pfam Description: Cofilin/tropomyosin-type actin-binding protein
  misc_feature (8)..(139): Homolog of NCBI NO: 30697303 NR Description: actin depolymerizing factor 4 - like protein
  misc_feature (1)..(139): Homolog of NCBI NO: 18408116 NR Description: actin depolymerizing factor 2 (ADF2) [Arabidopsis
  misc_feature (1)..(139): Homolog of NCBI NO: 38564721 NR Description: putative actin-depolymerizing factor 2
  misc_feature (1)..(139): Homolog of NCBI NO: 17366768 NR Description: Actin-depolymerizing factor 1 (ADF 1)
  misc_feature (1)..(138): Homolog of NCBI NO: 17366765 NR Description: Actin-depolymerizing factor 2 (ADF 2)
  misc_feature (8)..(139): Homolog of NCBI NO: 30697303 NR Description: actin depolymerizing factor 4 - like protein
  misc_feature (1)..(139): Homolog of NCBI NO: 38564721 NR Description: putative actin-depolymerizing factor 2
  misc_feature (1)..(138): Homolog of NCBI NO: 17366765 NR Description: Actin-depolymerizing factor 2 (ADF 2)
  misc_feature (1)..(139): Homolog of NCBI NO: 30697295 NR Description: actin depolymerizing factor 3 - like protein
  misc_feature (1)..(139): Homolog of NCBI NO: 15231309 NR Description: actin depolymerizing factor 1 (ADF1) [Arabidopsis
  misc_feature (1)..(139): Homolog of NCBI NO: 30697300 NR Description: actin depolymerizing factor 4 - like protein
  misc_feature (1)..(139): Homolog of NCBI NO: 4185511 NR Description: actin depolymerizing factor 4 [Arabidopsis
  misc_feature (1)..(139): Homolog of NCBI NO: 30697298 NR Description: actin depolymerizing factor 3 - like protein
  misc_feature (1)..(139): Homolog of NCBI NO: 17366768 NR Description: Actin-depolymerizing factor 1 (ADF 1)
  misc_feature (1)..(139): Homolog of NCBI NO: 18408116 NR Description: actin depolymerizing factor 2 (ADF2) [Arabidopsis
  misc_feature (1)..(139): Homolog of NCBI NO: 30697298 NR Description: actin depolymerizing factor 3 - like protein
  misc_feature (1)..(139): Homolog of NCBI NO: 4185511 NR Description: actin depolymerizing factor 4 [Arabidopsis
  misc_feature (1)..(139): Homolog of NCBI NO: 30697300 NR Description: actin depolymerizing factor 4 - like protein
  misc_feature (1)..(139): Homolog of NCBI NO: 15231309 NR Description: actin depolymerizing factor 1 (ADF1) [Arabidopsis
  misc_feature (1)..(139): Homolog of NCBI NO: 30697295 NR Description: actin depolymerizing factor 3 - like protein
MANAASGMAVHDDCKLKFMELKTKRTHRFIIYKIEELQKQVIVEKIGEPGQTHEDLAASLPADECRYAIFDFDFVSSEGVPRSRIFFVAWSPDTARVRSKMIYASSKDRFKRELDGIQVELQATDPTEMDLDVFKSRAN

SEQ ID NO: 34903 - protein, 132 aa, Arabidopsis thaliana
  peptide (1)..(132): Ceres Seq. ID no. 13504916
  misc_feature (5)..(132): Pfam Name: Cofilin/tropomyosin-type actin-binding protein Pfam Description: Cofilin/tropomyosin-type actin-binding protein
  misc_feature (5)..(132): Pfam Name: Cofilin/tropomyosin-type actin-binding protein Pfam Description: Cofilin/tropomyosin-type actin-binding protein
  misc_feature (1)..(132): Homolog of NCBI NO: 30697303 NR Description: actin depolymerizing factor 4 - like protein
  misc_feature (1)..(132): Homolog of NCBI NO: 18408116 NR Description: actin depolymerizing factor 2 (ADF2) [Arabidopsis
  misc_feature (1)..(132): Homolog of NCBI NO: 38564721 NR Description: putative actin-depolymerizing factor 2
  misc_feature (1)..(132): Homolog of NCBI NO: 17366768 NR Description: Actin-depolymerizing factor 1 (ADF 1)
  misc_feature (1)..(131): Homolog of NCBI NO: 17366765 NR Description: Actin-depolymerizing factor 2 (ADF 2)
  misc_feature (1)..(132): Homolog of NCBI NO: 30697303 NR Description: actin depolymerizing factor 4 - like protein
  misc_feature (1)..(132): Homolog of NCBI NO: 38564721 NR Description: putative actin-depolymerizing factor 2
  misc_feature (1)..(131): Homolog of NCBI NO: 17366765 NR Description: Actin-depolymerizing factor 2 (ADF 2)
  misc_feature (1)..(132): Homolog of NCBI NO: 30697295 NR Description: actin depolymerizing factor 3 - like protein
  misc_feature (1)..(132): Homolog of NCBI NO: 15231309 NR Description: actin depolymerizing factor 1 (ADF1) [Arabidopsis
  misc_feature (1)..(132): Homolog of NCBI NO: 30697300 NR Description: actin depolymerizing factor 4 - like protein
  misc_feature (1)..(132): Homolog of NCBI NO: 4185511 NR Description: actin depolymerizing factor 4 [Arabidopsis
  misc_feature (1)..(132): Homolog of NCBI NO: 30697298 NR Description: actin depolymerizing factor 3 - like protein
  misc_feature (1)..(132): Homolog of NCBI NO: 17366768 NR Description: Actin-depolymerizing factor 1 (ADF 1)
  misc_feature (1)..(132): Homolog of NCBI NO: 18408116 NR Description: actin depolymerizing factor 2 (ADF2) [Arabidopsis
  misc_feature (1)..(132): Homolog of NCBI NO: 30697298 NR Description: actin depolymerizing factor 3 - like protein
  misc_feature (1)..(132): Homolog of NCBI NO: 4185511 NR Description: actin depolymerizing factor 4 [Arabidopsis
  misc_feature (1)..(132): Homolog of NCBI NO: 30697300 NR Description: actin depolymerizing factor 4 - like protein
  misc_feature (1)..(132): Homolog of NCBI NO: 15231309 NR Description: actin depolymerizing factor 1 (ADF1) [Arabidopsis
  misc_feature (1)..(132): Homolog of NCBI NO: 30697295 NR Description: actin depolymerizing factor 3 - like protein
MAVHDDCKLKFMELKTKRTHRFIIYKIEELQKQVIVEKIGEPGQTHEDLAASLPADECRYAIFDFDFVSSEGVPRSRIFFVAWSPDTARVRSKMIYASSKDRFKRELDGIQVELQATDPTEMDLDVFKSRAN

SEQ ID NO: 34904 - DNA, 742 bp, Arabidopsis thaliana
  misc_feature (1)..(742): Ceres Seq. ID no. 13592791
  misc_feature: MA Experiment ID: 20000180 Result: Up-regulated in Transcription
  misc_feature: MA Experiment 20000180 PARAMETER Experiment Name: At_Germinating_Seeds_P Parameter: Age (hr) Value: 24 vs. 0
  misc_feature: MA Experiment 20000180 PARAMETER Experiment Name: At_Germinating_Seeds_P Parameter: Tissue Value: Germinating Seeds
  misc_feature: MA Experiment ID: 20000184 Result: Down-regulated in Transcription
  misc_feature: MA Experiment 20000184 PARAMETER Experiment Name: At_Shoots__P Parameter: Age (day) Value: 7
  misc_feature: MA Experiment 20000184 PARAMETER Experiment Name: At_Shoots__P Parameter: Tissue Value: Shoots vs. Whole Plant
cttcgtcggagtcggagcagagaaaggttttggagatcgagaccaaactccgattgaaagaggatgcattcttttggttacagagcgaatgctctactcacattcgccgtcacgattctagctttcatttgcgcgattgcttccttctctgataacttcagtaaccaaaatccctctgctcagatccagatattgaatatcaattggtttcagaagcaacctcatggaaatgatgaggtcagtttgacactgaacataacagcagacttgcagtcgctatttacttggaacacaaagcaggtatttgcttttgtagcagcagagtatgaaacctccaagaacgccctgaatcaggtttcactatgggatgccataatacccgagagagagcatgccaaattctggatacaaatctcaaacaagtaccgtttcatagatcagggacataacctccgagggaaggactttaacttgacattgcactggcatgtcatgcccaagacaggcaagatgtttgctgacaaaatagttatgtctggttatcgtttacccaatgcatacagatgaagatgaagagcctcctcctgcatcatgtaaggttaacaaaaatctcttaaaactaggaaagaagagagttatatttcaggggttaagttagacttgctgatctatatactggcatgaagttaaaaacattgtttgggaatgaattatgagccaagaacatatgagattgtcgtcg

SEQ ID NO: 34905 - protein, 167 aa, Arabidopsis thaliana
  peptide (1)..(167): Ceres Seq. ID no. 15221153
  misc_feature (1)..(167): Pfam Name: Signal peptidase subunit Pfam Description: Signal peptidase subunit
  misc_feature (1)..(148): Homolog of NCBI NO: 39587410 NR Description: Hypothetical protein CBG22979 [Caenorhabditis
  misc_feature (1)..(148): Homolog of NCBI NO: 26346292 NR Description: unnamed protein product [Mus musculus]
  misc_feature (7)..(148): Homolog of NCBI NO: 26390287 NR Description: unnamed protein product [Mus musculus]
  misc_feature (7)..(148): Homolog of NCBI NO: 11345462 NR Description: hypothetical protein FLJ22649 similar to signal
  misc_feature (7)..(148): Homolog of NCBI NO: 134791 NR Description: Microsomal signal peptidase 23 kDa subunit (SPase
  misc_feature (1)..(166): Homolog of NCBI NO: 34895578 NR Description: unnamed protein product [Oryza sativa (japonica
  misc_feature (1)..(167): Homolog of NCBI NO: 28558783 NR Description: signal peptidase protein-like protein [Cucumis
  misc_feature (1)..(167): Homolog of NCBI NO: 18397160 NR Description: expressed protein [Arabidopsis thaliana]
  misc_feature (1)..(167): Homolog of NCBI NO: 15240934 NR Description: signal peptidase [Arabidopsis thaliana]
MHSFGYRANALLTFAVTILAFICAIASFSDNFSNQNPSAQIQILNINWFQKQPHGNDEVSLTLNITADLQSLFTWNTKQVFAFVAAEYETSKNALNQVSLWDAIIPEREHAKFWIQISNKYRFIDQGHNLRGKDFNLTLHWHVMPKTGKMFADKIVMSGYRLPNAYR

SEQ ID NO: 34906 - DNA, 1352 bp, Arabidopsis thaliana
  misc_feature (1)..(1352): Ceres Seq. ID no. 13486952
  misc_feature: MA Experiment ID: 108462 Result: Down-regulated in Transcription
  misc_feature: MA Experiment 108462 PARAMETER Experiment Name: At_Germinating_Seeds_cDNA_P Parameter: Age (day) Value: 2 vs. 0
  misc_feature: MA Experiment 108462 PARAMETER Experiment Name: At_Germinating_Seeds_cDNA_P Parameter: Tissue Value: Germinating Seeds
  misc_feature: MA Experiment ID: 108668 Result: Up-regulated in Transcription
  misc_feature: MA Experiment 108668 PARAMETER Experiment Name: At_2mM_SA_cDNA_P Parameter: Plant Line Value: WS
  misc_feature: MA Experiment 108668 PARAMETER Experiment Name: At_2mM_SA_cDNA_P Parameter: Timepoint (hr) Value: 6
  misc_feature: MA Experiment 108668 PARAMETER Experiment Name: At_2mM_SA_cDNA_P Parameter: Treatment Value: 2mM SA vs. No Treatment
gaaacggaacgtaattatttacgtgacttatgaaaagtcatcggcgattgtttctaatttgtcatcgccgccgttgaactatctcgccggcgataatgatctacgttggtggagtgcaatttctagacgagagtagctctttttcattgtcttcttcatcgcagggaagtagcttgcttgttgatgtaatgagtcatcctgtgataacgttagcttctgattcctttaagaatcttgaggaaaagaatgtttctttcgatgaaagtgattcagagagctcaacaaaagacagatatgtttacatattccaaagagaatttgctgttgtgaatccagctcttgttgattttgttggcaccgatgaagcaacaacttgtgtaggccttgttatccgcaacagaaaatctggaatgacgtctgttgcacacatggattcgccagagattgtggatttggggataagccagatgttgttattggttttacaggatgacgtagatgccgagttagatgtacatatggttggtggttatgaagatgtcgacataaaaaatgctgatggtgttggtgactatgccaaaccagagggttattcatttccgttgtgttgcaaattagtagaaactttgcagaagagaagagaaaactttcacattcaaaccctctttattcttgggcacaataccaagttggattcacaagcaaacacgtgccccatttttaatggatgcctggtgaataccagcaccggtgcaatcttgccagccagtttcaacagaacatctagatgtccggatgagatcgttagaagaattcgagtttcatcatcgtttgaagattctagctggaagggaaagttacttgacacatatgacacaaaaactgatagattcatcatcgcaccatgccgctggacaatgcgcttgattgaatatgtttgggaacttaatcagcttactgatgaagaaatcctcactaactgttccacctcaccttctgctgaaggtccagacttcgtaaacagtttaagaaggaattggggatatttactgaaatatccagaatggagcaaaacattcccaaggaggcaaccacgtgtgtttgaaagaactgtcgatggacactggaaaaaatgctgactttctcatctaatcatcatgacattatccagaaatctggctaaaaacaacggttagtgtatctaacattttgagatttatgtaaatggtcaagaacacatgtgattgattcttggacacagaaaatgtttgatttatctttttgactttttgtgtcaaacgttgcaagtttggttcctatgaaaatatgggccggatcaggcccggtagacc

SEQ ID NO: 34907 - protein, 347 aa, Arabidopsis thaliana
  peptide (1)..(347): Ceres Seq. ID no. 13486953
  misc_feature (119)..(346): Homolog of NCBI NO: 34868058 NR Description: similar to N-terminal asparagine amidohydrolase
  misc_feature (157)..(346): Homolog of NCBI NO: 33150674 NR Description: N-terminal asparagine amidohydrolase [Homo
  misc_feature (157)..(346): Homolog of NCBI NO: 27735049 NR Description: N-terminal Asn amidase [Homo sapiens]
  misc_feature (157)..(346): Homolog of NCBI NO: 2498798 NR Description: PROTEIN N-TERMINAL ASPARAGINE AMIDOHYDROLASE NH2-TERMINAL ASPARAGINE DEAMIDASE) (NTN-AMIDASE) (PNAD) (PROTEIN
  misc_feature (157)..(346): Homolog of NCBI NO: 6754902 NR Description: N-terminal Asn amidase; asparagine-specific
  misc_feature (157)..(346): Homolog of NCBI NO: 38382972 NR Description: Unknown (protein for MGC:77869) [Danio rerio]
  misc_feature (313)..(347): Homolog of NCBI NO: 7486430 NR Description: hypothetical protein At2g44420 [imported] -
  misc_feature (106)..(313): Homolog of NCBI NO: 7486430 NR Description: hypothetical protein At2g44420 [imported] -
  misc_feature (1)..(347): Homolog of NCBI NO: 21554202 NR Description: unknown [Arabidopsis thaliana]
  misc_feature (1)..(347): Homolog of NCBI NO: 18406532 NR Description: expressed protein [Arabidopsis thaliana]
MIYVGGVQFLDESSSFSLSSSSQGSSLLVDVMSHPVITLASDSFKNLEEKNVSFDESDSESSTKDRYVYIFQREFAVVNPALVDFVGTDEATTCVGLVIRNRKSGMTSVAHMDSPEIVDLGISQMLLLVLQDDVDAELDVHMVGGYEDVDIKNADGVGDYAKPEGYSFPLCCKLVETLQKRRENFHIQTLFILGHNTKLDSQANTCPIFNGCLVNTSTGAILPASFNRTSRCPDEIVRRIRVSSSFEDSSWKGKLLDTYDTKTDRFIIAPCRWTMRLIEYVWELNQLTDEEILTNCSTSPSAEGPDFVNSLRRNWGYLLKYPEWSKTFPRRQPRVFERTVDGHWKKC

SEQ ID NO: 34908 - protein, 316 aa, Arabidopsis thaliana
  peptide (1)..(316): Ceres Seq. ID no. 13486954
  misc_feature (88)..(315): Homolog of NCBI NO: 34868058 NR Description: similar to N-terminal asparagine amidohydrolase
  misc_feature (126)..(315): Homolog of NCBI NO: 33150674 NR Description: N-terminal asparagine amidohydrolase [Homo
  misc_feature (126)..(315): Homolog of NCBI NO: 27735049 NR Description: N-terminal Asn amidase [Homo sapiens]
  misc_feature (126)..(315): Homolog of NCBI NO: 2498798 NR Description: PROTEIN N-TERMINAL ASPARAGINE AMIDOHYDROLASE NH2-TERMINAL ASPARAGINE DEAMIDASE) (NTN-AMIDASE) (PNAD) (PROTEIN
  misc_feature (126)..(315): Homolog of NCBI NO: 6754902 NR Description: N-terminal Asn amidase; asparagine-specific
  misc_feature (126)..(315): Homolog of NCBI NO: 38382972 NR Description: Unknown (protein for MGC:77869) [Danio rerio]
  misc_feature (282)..(316): Homolog of NCBI NO: 7486430 NR Description: hypothetical protein At2g44420 [imported] -
  misc_feature (75)..(282): Homolog of NCBI NO: 7486430 NR Description: hypothetical protein At2g44420 [imported] -
  misc_feature (1)..(316): Homolog of NCBI NO: 21554202 NR Description: unknown [Arabidopsis thaliana]
  misc_feature (1)..(316): Homolog of NCBI NO: 18406532 NR Description: expressed protein [Arabidopsis thaliana]
MSHPVITLASDSFKNLEEKNVSFDESDSESSTKDRYVYIFQREFAVVNPALVDFVGTDEATTCVGLVIRNRKSGMTSVAHMDSPEIVDLGISQMLLLVLQDDVDAELDVHMVGGYEDVDIKNADGVGDYAKPEGYSFPLCCKLVETLQKRRENFHIQTLFILGHNTKLDSQANTCPIFNGCLVNTSTGAILPASFNRTSRCPDEIVRRIRVSSSFEDSSWKGKLLDTYDTKTDRFIIAPCRWTMRLIEYVWELNQLTDEEILTNCSTSPSAEGPDFVNSLRRNWGYLLKYPEWSKTFPRRQPRVFERTVDGHWKKC

SEQ ID NO: 34909 - protein, 242 aa, Arabidopsis thaliana
  peptide (1)..(242): Ceres Seq. ID no. 13486955
  misc_feature (14)..(241): Homolog of NCBI NO: 34868058 NR Description: similar to N-terminal asparagine amidohydrolase
  misc_feature (52)..(241): Homolog of NCBI NO: 33150674 NR Description: N-terminal asparagine amidohydrolase [Homo
  misc_feature (52)..(241): Homolog of NCBI NO: 27735049 NR Description: N-terminal Asn amidase [Homo sapiens]
  misc_feature (52)..(241): Homolog of NCBI NO: 2498798 NR Description: PROTEIN N-TERMINAL ASPARAGINE AMIDOHYDROLASE NH2-TERMINAL ASPARAGINE DEAMIDASE) (NTN-AMIDASE) (PNAD) (PROTEIN
  misc_feature (52)..(241): Homolog of NCBI NO: 6754902 NR Description: N-terminal Asn amidase; asparagine-specific
  misc_feature (52)..(241): Homolog of NCBI NO: 38382972 NR Description: Unknown (protein for MGC:77869) [Danio rerio]
  misc_feature (208)..(242): Homolog of NCBI NO: 7486430 NR Description: hypothetical protein At2g44420 [imported] -
  misc_feature (1)..(208): Homolog of NCBI NO: 7486430 NR Description: hypothetical protein At2g44420 [imported] -
  misc_feature (1)..(242): Homolog of NCBI NO: 21554202 NR Description: unknown [Arabidopsis thaliana]
  misc_feature (1)..(242): Homolog of NCBI NO: 18406532 NR Description: expressed protein [Arabidopsis thaliana]
MTSVAHMDSPEIVDLGISQMLLLVLQDDVDAELDVHMVGGYEDVDIKNADGVGDYAKPEGYSFPLCCKLVETLQKRRENFHIQTLFILGHNTKLDSQANTCPIFNGCLVNTSTGAILPASFNRTSRCPDEIVRRIRVSSSFEDSSWKGKLLDTYDTKTDRFIIAPCRWTMRLIEYVWELNQLTDEEILTNCSTSPSAEGPDFVNSLRRNWGYLLKYPEWSKTFPRRQPRVFERTVDGHWKKC

SEQ ID NO: 34910 - DNA, 1040 bp, Arabidopsis thaliana
  misc_feature (1)..(1040): Ceres Seq. ID no. 13501435
  misc_feature: MA Experiment ID: 108434 Result: Down-regulated in Transcription
  misc_feature: MA Experiment 108434 PARAMETER Experiment Name: At_Root_Tips_cDNA_P Parameter: Tissue Value: Root Tips
  misc_feature: MA Experiment ID: 108595 Result: Down-regulated in Transcription
  misc_feature: MA Experiment 108595 PARAMETER Experiment Name: At_Ler-pi_Ovule_cDNA_P Parameter: Plant Line Value: null
  misc_feature: MA Experiment ID: 20000069 Result: Up-regulated in Transcription
  misc_feature: MA Experiment 20000069 PARAMETER Experiment Name: At_100uM_ABA_Mutants_cDNA_P Parameter: Plant Line Value: CS23
  misc_feature: MA Experiment 20000069 PARAMETER Experiment Name: At_100uM_ABA_Mutants_cDNA_P Parameter: Timepoint (hr) Value: 6
  misc_feature: MA Experiment 20000069 PARAMETER Experiment Name: At_100uM_ABA_Mutants_cDNA_P Parameter: Tissue Value: Aerial
  misc_feature: MA Experiment 20000069 PARAMETER Experiment Name: At_100uM_ABA_Mutants_cDNA_P Parameter: Treatment Value: 100uM ABA vs. No Treatment
  misc_feature: MA Experiment ID: 20000071 Result: Up-regulated in Transcription
  misc_feature: MA Experiment 20000071 PARAMETER Experiment Name: At_100uM_ABA_Mutants_cDNA_P Parameter: Plant Line Value: CS8104
  misc_feature: MA Experiment 20000071 PARAMETER Experiment Name: At_100uM_ABA_Mutants_cDNA_P Parameter: Timepoint (hr) Value: 6
  misc_feature: MA Experiment 20000071 PARAMETER Experiment Name: At_100uM_ABA_Mutants_cDNA_P Parameter: Tissue Value: Aerial
  misc_feature: MA Experiment 20000071 PARAMETER Experiment Name: At_100uM_ABA_Mutants_cDNA_P Parameter: Treatment Value: 100uM ABA vs. No Treatment
  misc_feature: MA Experiment ID: 20000072 Result: Up-regulated in Transcription
  misc_feature: MA Experiment 20000072 PARAMETER Experiment Name: At_100uM_ABA_Mutants_cDNA_P Parameter: Plant Line Value: CS8105
  misc_feature: MA Experiment 20000072 PARAMETER Experiment Name: At_100uM_ABA_Mutants_cDNA_P Parameter: Timepoint (hr) Value: 6
  misc_feature: MA Experiment 20000072 PARAMETER Experiment Name: At_100uM_ABA_Mutants_cDNA_P Parameter: Tissue Value: Aerial
  misc_feature: MA Experiment 20000072 PARAMETER Experiment Name: At_100uM_ABA_Mutants_cDNA_P Parameter: Treatment Value: 100uM ABA vs. No Treatment
  misc_feature: MA Experiment ID: 20000117 Result: Up-regulated in Transcription
  misc_feature: MA Experiment 20000117 PARAMETER Experiment Name: At_100uM_ABA_Mutants_cDNA_P Parameter: Plant Line Value: Columbia
  misc_feature: MA Experiment 20000117 PARAMETER Experiment Name: At_100uM_ABA_Mutants_cDNA_P Parameter: Timepoint (hr) Value: 6
  misc_feature: MA Experiment 20000117 PARAMETER Experiment Name: At_100uM_ABA_Mutants_cDNA_P Parameter: Tissue Value: Aerial
  misc_feature: MA Experiment 20000117 PARAMETER Experiment Name: At_100uM_ABA_Mutants_cDNA_P Parameter: Treatment Value: 100uM ABA vs. No Treatment
  misc_feature: MA Experiment ID: 20000437 Result: Up-regulated in Transcription
  misc_feature: MA Experiment 20000437 PARAMETER Experiment Name: At_Drought_P Parameter: Age (day) Value: 8
  misc_feature: MA Experiment 20000437 PARAMETER Experiment Name: At_Drought_P Parameter: Organism Value: A. thaliana
  misc_feature: MA Experiment 20000437 PARAMETER Experiment Name: At_Drought_P Parameter: Plant Line Value: WS
  misc_feature: MA Experiment 20000437 PARAMETER Experiment Name: At_Drought_P Parameter: Timepoint (hr) Value: 24
  misc_feature: MA Experiment 20000437 PARAMETER Experiment Name: At_Drought_P Parameter: Tissue Value: Whole Plant
  misc_feature: MA Experiment 20000437 PARAMETER Experiment Name: At_Drought_P Parameter: Treatment Value: Drought vs. No Drought
attccgcaatttattgattcttctttatcgtgcttctgattgttttggttaacggatcaaattatcgaacgatgatggcttctctcgcgacttccataagtggaagcttcagaattctggttaaatcatcttcgacgaggaatgggtttcctgtaatctctgatcaaaacccgagtttcgtcttgtttgcgaataaacgcagacatatctctagaacggcgatttttcaccgatctgcgataagtggttcgagtcaaggagaaaagatatcacctttagcatctggtgtatcttcaggtttatattcagctcagacttttgatttgacgcctcaaaacgttgatttggtgcttgaggatgttagaccgttcttgatctctgatggtggaaacgtcgacgttgtctccgttgaagatggggtagtctctcttaagctccaaggagcatgtaccagctgtccaagttcttcaacaactatgacaatgggaatagagagggtactcaaggaaaagtttggagatgcattgaaagatattcgacaagtttttgatgaagaagtaaaacagataaccgtggaggcagtgaatgctcatctagatatactgaggccagctatcaagaactatggcggaagtgttgaagttttatcggttgaaggcgaggactgcgttgtaaaatatgttggaccggagtcgattggaatgggaatacaggcagcgattaaagaaaagtttaaggacatatctaatgtaacctttacaagctagaaagcatgaagaaagccactatattatgtaaaaacattattgctctttgtttgagctaatgtccacttcaatagtcgtcctctccataactgtccttagccatcttgccaggttgatcaagaacggtgtgtagacaaagtagcaagttgttgtccacgtaaccagtcccttcaccagcaaacaaaacaagaaagaaacagagtcatgtgtatgtttttgtttgatgatgtctgtataaacacttattacctggccaaagatttctatgtttgc

SEQ ID NO: 34911 - protein, 231 aa, Arabidopsis thaliana
  peptide (1)..(231): Ceres Seq. ID no. 13501436
  misc_feature (90)..(158): Pfam Name: NifU-like domain Pfam Description: NifU-like domain
  misc_feature (90)..(158): Pfam Name: NifU-like domain Pfam Description: NifU-like domain
  misc_feature (79)..(158): Homolog of NCBI NO: 33860975 NR Description: NifU-like protein
  misc_feature (79)..(159): Homolog of NCBI NO: 24414813 NR Description: putative NifU-like protein [Synechococcus sp. PCC
  misc_feature (85)..(223): Homolog of NCBI NO: 7485833 NR Description: hypothetical protein F20B18.20 - Arabidopsis
  misc_feature (68)..(223): Homolog of NCBI NO: 30698492 NR Description: NifU1 [Oryza sativa (japonica cultivar-group)]
  misc_feature (8)..(223): Homolog of NCBI NO: 18416645 NR Description: nitrogen fixation protein, putative  (NifU)
  misc_feature (79)..(158): Homolog of NCBI NO: 33860975 NR Description: NifU-like protein
  misc_feature (85)..(223): Homolog of NCBI NO: 7485833 NR Description: hypothetical protein F20B18.20 - Arabidopsis
  misc_feature (8)..(223): Homolog of NCBI NO: 18416645 NR Description: nitrogen fixation protein, putative  (NifU)
  misc_feature (1)..(231): Homolog of NCBI NO: 18411785 NR Description: NifU-related metallocluster assembly factor
  misc_feature (2)..(173): Homolog of NCBI NO: 25407141 NR Description: hypothetical protein AT4g01940 [imported] -
  misc_feature (84)..(158): Homolog of NCBI NO: 2688826 NR Description: putative NifU protein [Prunus armeniaca]
  misc_feature (85)..(223): Homolog of NCBI NO: 18423084 NR Description: expressed protein [Arabidopsis thaliana]
  misc_feature (8)..(223): Homolog of NCBI NO: 21554503 NR Description: nitrogen fixation like protein [Arabidopsis
  misc_feature (68)..(223): Homolog of NCBI NO: 30698492 NR Description: NifU1 [Oryza sativa (japonica cultivar-group)]
  misc_feature (79)..(159): Homolog of NCBI NO: 24414813 NR Description: putative NifU-like protein [Synechococcus sp. PCC
  misc_feature (8)..(223): Homolog of NCBI NO: 21554503 NR Description: nitrogen fixation like protein [Arabidopsis
  misc_feature (85)..(223): Homolog of NCBI NO: 18423084 NR Description: expressed protein [Arabidopsis thaliana]
  misc_feature (84)..(158): Homolog of NCBI NO: 2688826 NR Description: putative NifU protein [Prunus armeniaca]
  misc_feature (2)..(173): Homolog of NCBI NO: 25407141 NR Description: hypothetical protein AT4g01940 [imported] -
  misc_feature (1)..(231): Homolog of NCBI NO: 18411785 NR Description: NifU-related metallocluster assembly factor
MMASLATSISGSFRILVKSSSTRNGFPVISDQNPSFVLFANKRRHISRTAIFHRSAISGSSQGEKISPLASGVSSGLYSAQTFDLTPQNVDLVLEDVRPFLISDGGNVDVVSVEDGVVSLKLQGACTSCPSSSTTMTMGIERVLKEKFGDALKDIRQVFDEEVKQITVEAVNAHLDILRPAIKNYGGSVEVLSVEGEDCVVKYVGPESIGMGIQAAIKEKFKDISNVTFTS

SEQ ID NO: 34912 - protein, 230 aa, Arabidopsis thaliana
  peptide (1)..(230): Ceres Seq. ID no. 13501437
  misc_feature (89)..(157): Pfam Name: NifU-like domain Pfam Description: NifU-like domain
  misc_feature (89)..(157): Pfam Name: NifU-like domain Pfam Description: NifU-like domain
  misc_feature (78)..(157): Homolog of NCBI NO: 33860975 NR Description: NifU-like protein
  misc_feature (78)..(158): Homolog of NCBI NO: 24414813 NR Description: putative NifU-like protein [Synechococcus sp. PCC
  misc_feature (84)..(222): Homolog of NCBI NO: 7485833 NR Description: hypothetical protein F20B18.20 - Arabidopsis
  misc_feature (67)..(222): Homolog of NCBI NO: 30698492 NR Description: NifU1 [Oryza sativa (japonica cultivar-group)]
  misc_feature (7)..(222): Homolog of NCBI NO: 18416645 NR Description: nitrogen fixation protein, putative  (NifU)
  misc_feature (78)..(157): Homolog of NCBI NO: 33860975 NR Description: NifU-like protein
  misc_feature (84)..(222): Homolog of NCBI NO: 7485833 NR Description: hypothetical protein F20B18.20 - Arabidopsis
  misc_feature (7)..(222): Homolog of NCBI NO: 18416645 NR Description: nitrogen fixation protein, putative  (NifU)
  misc_feature (1)..(230): Homolog of NCBI NO: 18411785 NR Description: NifU-related metallocluster assembly factor
  misc_feature (1)..(172): Homolog of NCBI NO: 25407141 NR Description: hypothetical protein AT4g01940 [imported] -
  misc_feature (83)..(157): Homolog of NCBI NO: 2688826 NR Description: putative NifU protein [Prunus armeniaca]
  misc_feature (84)..(222): Homolog of NCBI NO: 18423084 NR Description: expressed protein [Arabidopsis thaliana]
  misc_feature (7)..(222): Homolog of NCBI NO: 21554503 NR Description: nitrogen fixation like protein [Arabidopsis
  misc_feature (67)..(222): Homolog of NCBI NO: 30698492 NR Description: NifU1 [Oryza sativa (japonica cultivar-group)]
  misc_feature (78)..(158): Homolog of NCBI NO: 24414813 NR Description: putative NifU-like protein [Synechococcus sp. PCC
  misc_feature (7)..(222): Homolog of NCBI NO: 21554503 NR Description: nitrogen fixation like protein [Arabidopsis
  misc_feature (84)..(222): Homolog of NCBI NO: 18423084 NR Description: expressed protein [Arabidopsis thaliana]
  misc_feature (83)..(157): Homolog of NCBI NO: 2688826 NR Description: putative NifU protein [Prunus armeniaca]
  misc_feature (1)..(172): Homolog of NCBI NO: 25407141 NR Description: hypothetical protein AT4g01940 [imported] -
  misc_feature (1)..(230): Homolog of NCBI NO: 18411785 NR Description: NifU-related metallocluster assembly factor
MASLATSISGSFRILVKSSSTRNGFPVISDQNPSFVLFANKRRHISRTAIFHRSAISGSSQGEKISPLASGVSSGLYSAQTFDLTPQNVDLVLEDVRPFLISDGGNVDVVSVEDGVVSLKLQGACTSCPSSSTTMTMGIERVLKEKFGDALKDIRQVFDEEVKQITVEAVNAHLDILRPAIKNYGGSVEVLSVEGEDCVVKYVGPESIGMGIQAAIKEKFKDISNVTFTS

SEQ ID NO: 34913 - DNA, 813 bp, Arabidopsis thaliana
  misc_feature (1)..(813): Ceres Seq. ID no. 12332025
  misc_feature: MA Experiment ID: 108434 Result: Up-regulated in Transcription
  misc_feature: MA Experiment 108434 PARAMETER Experiment Name: At_Root_Tips_cDNA_P Parameter: Tissue Value: Root Tips
  misc_feature: MA Experiment ID: 108488 Result: Up-regulated in Transcription
  misc_feature: MA Experiment ID: 108595 Result: Down-regulated in Transcription
  misc_feature: MA Experiment 108595 PARAMETER Experiment Name: At_Ler-pi_Ovule_cDNA_P Parameter: Plant Line Value: null
  misc_feature: MA Experiment ID: 20000185 Result: Down-regulated in Transcription
  misc_feature: MA Experiment 20000185 PARAMETER Experiment Name: At_Roots__P Parameter: Age (day) Value: 7 vs. 21
  misc_feature: MA Experiment 20000185 PARAMETER Experiment Name: At_Roots__P Parameter: Organism Value: A. thaliana
  misc_feature: MA Experiment 20000185 PARAMETER Experiment Name: At_Roots__P Parameter: Tissue Value: Roots vs. Whole Plant
  misc_feature: MA Experiment ID: 20000437 Result: Down-regulated in Transcription
  misc_feature: MA Experiment 20000437 PARAMETER Experiment Name: At_Drought_P Parameter: Age (day) Value: 8
  misc_feature: MA Experiment 20000437 PARAMETER Experiment Name: At_Drought_P Parameter: Organism Value: A. thaliana
  misc_feature: MA Experiment 20000437 PARAMETER Experiment Name: At_Drought_P Parameter: Plant Line Value: WS
  misc_feature: MA Experiment 20000437 PARAMETER Experiment Name: At_Drought_P Parameter: Timepoint (hr) Value: 24
  misc_feature: MA Experiment 20000437 PARAMETER Experiment Name: At_Drought_P Parameter: Tissue Value: Whole Plant
  misc_feature: MA Experiment 20000437 PARAMETER Experiment Name: At_Drought_P Parameter: Treatment Value: Drought vs. No Drought
  misc_feature: MA Experiment ID: 20000495 Result: Down-regulated in Transcription
  misc_feature: MA Experiment 20000495 PARAMETER Experiment Name: At_Guard_Cells_P Parameter: Harvest Date Value: 8/2/2002
  misc_feature: MA Experiment 20000495 PARAMETER Experiment Name: At_Guard_Cells_P Parameter: Organism Value: A. thaliana
  misc_feature: MA Experiment 20000495 PARAMETER Experiment Name: At_Guard_Cells_P Parameter: Tissue Value: Guard Cells vs. Leaves
  misc_feature: MA Experiment ID: 20000794 Result: Down-regulated in Transcription
  misc_feature: MA Experiment 20000794 PARAMETER Experiment Name: At_Petals_P Parameter: Age (day) Value: 23-25 days
  misc_feature: MA Experiment 20000794 PARAMETER Experiment Name: At_Petals_P Parameter: Plant Line Value: WS
  misc_feature: MA Experiment 20000794 PARAMETER Experiment Name: At_Petals_P Parameter: Tissue Value: Petals vs. Whole plant
  misc_feature: MA Experiment ID: 20001560 Result: Up-regulated in Transcription
  misc_feature: MA Experiment 20001560 PARAMETER Experiment Name: At_Drought_Soil_Dry_P Parameter: Age (day) Value: 28
  misc_feature: MA Experiment 20001560 PARAMETER Experiment Name: At_Drought_Soil_Dry_P Parameter: Organism Value: A. thaliana
  misc_feature: MA Experiment 20001560 PARAMETER Experiment Name: At_Drought_Soil_Dry_P Parameter: Plant Line Value: WS
  misc_feature: MA Experiment 20001560 PARAMETER Experiment Name: At_Drought_Soil_Dry_P Parameter: Post Timepoint (hr) Value: None
  misc_feature: MA Experiment 20001560 PARAMETER Experiment Name: At_Drought_Soil_Dry_P Parameter: Post-Treatment Value: None
  misc_feature: MA Experiment 20001560 PARAMETER Experiment Name: At_Drought_Soil_Dry_P Parameter: Timepoint (day) Value: 14
  misc_feature: MA Experiment 20001560 PARAMETER Experiment Name: At_Drought_Soil_Dry_P Parameter: Treatment Value: Drought vs. No Drought
  misc_feature: MA Experiment ID: 20001757 Result: Up-regulated in Transcription
  misc_feature: MA Experiment 20001757 PARAMETER Experiment Name: At_50mM_NH4NO3_L-to-H_P Parameter: Timepoint (hr) Value: 6
  misc_feature: MA Experiment 20001757 PARAMETER Experiment Name: At_50mM_NH4NO3_L-to-H_P Parameter: Tissue Value: Leaf
  misc_feature: MA Experiment 20001757 PARAMETER Experiment Name: At_50mM_NH4NO3_L-to-H_P Parameter: Treatment Value: 50mM NH4NO3 vs 100mM Mannitol
  misc_feature: MA Experiment ID: 20001905 Result: Down-regulated in Transcription
  misc_feature: MA Experiment 20001905 PARAMETER Experiment Name: At_Drought_Reproduction_P Parameter: Age (day) Value: 40
  misc_feature: MA Experiment 20001905 PARAMETER Experiment Name: At_Drought_Reproduction_P Parameter: Organism Value: A. thaliana
  misc_feature: MA Experiment 20001905 PARAMETER Experiment Name: At_Drought_Reproduction_P Parameter: Plant Line Value: WS
  misc_feature: MA Experiment 20001905 PARAMETER Experiment Name: At_Drought_Reproduction_P Parameter: Timepoint (day) Value: 10
  misc_feature: MA Experiment 20001905 PARAMETER Experiment Name: At_Drought_Reproduction_P Parameter: Tissue Value: Rosettes
  misc_feature: MA Experiment 20001905 PARAMETER Experiment Name: At_Drought_Reproduction_P Parameter: Treatment Value: Drought vs. No Drought
  misc_feature: MA Experiment ID: 20001906 Result: Down-regulated in Transcription
  misc_feature: MA Experiment 20001906 PARAMETER Experiment Name: At_Drought_Reproduction_P Parameter: Age (day) Value: 35
  misc_feature: MA Experiment 20001906 PARAMETER Experiment Name: At_Drought_Reproduction_P Parameter: Organism Value: A. thaliana
  misc_feature: MA Experiment 20001906 PARAMETER Experiment Name: At_Drought_Reproduction_P Parameter: Plant Line Value: WS
  misc_feature: MA Experiment 20001906 PARAMETER Experiment Name: At_Drought_Reproduction_P Parameter: Timepoint (day) Value: 5
  misc_feature: MA Experiment 20001906 PARAMETER Experiment Name: At_Drought_Reproduction_P Parameter: Tissue Value: Siliques
  misc_feature: MA Experiment 20001906 PARAMETER Experiment Name: At_Drought_Reproduction_P Parameter: Treatment Value: Drought vs. No Drought
  misc_feature: MA Experiment ID: 20001908 Result: Down-regulated in Transcription
  misc_feature: MA Experiment 20001908 PARAMETER Experiment Name: At_Drought_Reproduction_P Parameter: Age (day) Value: 40
  misc_feature: MA Experiment 20001908 PARAMETER Experiment Name: At_Drought_Reproduction_P Parameter: Organism Value: A. thaliana
  misc_feature: MA Experiment 20001908 PARAMETER Experiment Name: At_Drought_Reproduction_P Parameter: Plant Line Value: WS
  misc_feature: MA Experiment 20001908 PARAMETER Experiment Name: At_Drought_Reproduction_P Parameter: Timepoint (day) Value: 10
  misc_feature: MA Experiment 20001908 PARAMETER Experiment Name: At_Drought_Reproduction_P Parameter: Tissue Value: Siliques
  misc_feature: MA Experiment 20001908 PARAMETER Experiment Name: At_Drought_Reproduction_P Parameter: Treatment Value: Drought vs. No Drought
  misc_feature: MA Experiment ID: 20001911 Result: Down-regulated in Transcription
  misc_feature: MA Experiment 20001911 PARAMETER Experiment Name: At_Drought_Reproduction_P Parameter: Age (day) Value: 40
  misc_feature: MA Experiment 20001911 PARAMETER Experiment Name: At_Drought_Reproduction_P Parameter: Organism Value: A. thaliana
  misc_feature: MA Experiment 20001911 PARAMETER Experiment Name: At_Drought_Reproduction_P Parameter: Plant Line Value: WS
  misc_feature: MA Experiment 20001911 PARAMETER Experiment Name: At_Drought_Reproduction_P Parameter: Timepoint (day) Value: 10
  misc_feature: MA Experiment 20001911 PARAMETER Experiment Name: At_Drought_Reproduction_P Parameter: Tissue Value: Flowers
  misc_feature: MA Experiment 20001911 PARAMETER Experiment Name: At_Drought_Reproduction_P Parameter: Treatment Value: Drought vs. No Drought
aataatgtgagaaaagagcaaaacacaaaaatgaaaaaaccttcttctcttgtaactcgcacaaccttatcgagtgaaagaagattgggtcagtagtgaaaaatggcgtcgattgcagcttcttctacctttcactcgttttgcagaaccaaaagccctaatctttcttcgacccaccttcttcctttgtcgaaaaacctcaactttcggaccagagctatcggaaatagccgcaattgcagttttgctgggtttataaaacaaaatcgccttggattgaggaagctttcgtctattggagaaggaggagaaggtgtcgctgtcgcagaggagcaaccgcaagagactgtctctgttcctgtctctccttcagacatgctcaccatgtttttccaggctgatggaactttgaacgaagcagctattcctaatgtgacaagggccttacaggatattgatggagtttccaatttaaaggttcaggtttctgaaggtgttgccgtcgttgagcttttgaagcaaacaacggttcaagcaacaggagtggcgtcaaacttggtggagactatacaaggagctggatttaagttacagactttgaatctgagttttgaagatgacgatgaggttcttgtctagtgaaatcatccttttcctccattttgtgattaaagaaactcataatgttcaattctagggataatttctttcatttgttcctctaaagaaaacaaatgtggtaactttttttagaaagtgggaattaatgttttctttgttgaaataaaggagaaatggaaaatatctatattg

SEQ ID NO: 34914 - protein, 178 aa, Arabidopsis thaliana
  peptide (1)..(178): Ceres Seq. ID no. 12332026
  misc_feature (1)..(178): Homolog of NCBI NO: 11346179 NR Description: hypothetical protein F2G14_30 - Arabidopsis
  misc_feature (1)..(178): Homolog of NCBI NO: 18417512 NR Description: putative protein
MASIAASSTFHSFCRTKSPNLSSTHLLPLSKNLNFRTRAIGNSRNCSFAGFIKQNRLGLRKLSSIGEGGEGVAVAEEQPQETVSVPVSPSDMLTMFFQADGTLNEAAIPNVTRALQDIDGVSNLKVQVSEGVAVVELLKQTTVQATGVASNLVETIQGAGFKLQTLNLSFEDDDEVLV

SEQ ID NO: 34915 - DNA, 697 bp, Arabidopsis thaliana
  misc_feature (1)..(697): Ceres Seq. ID no. 12393479
  misc_feature: MA Experiment ID: 108462 Result: Up-regulated in Transcription
  misc_feature: MA Experiment 108462 PARAMETER Experiment Name: At_Germinating_Seeds_cDNA_P Parameter: Age (day) Value: 2 vs. 0
  misc_feature: MA Experiment 108462 PARAMETER Experiment Name: At_Germinating_Seeds_cDNA_P Parameter: Tissue Value: Germinating Seeds
  misc_feature: MA Experiment ID: 108463 Result: Up-regulated in Transcription
  misc_feature: MA Experiment 108463 PARAMETER Experiment Name: At_Germinating_Seeds_cDNA_P Parameter: Age (day) Value: 3 vs. 0
  misc_feature: MA Experiment 108463 PARAMETER Experiment Name: At_Germinating_Seeds_cDNA_P Parameter: Tissue Value: Germinating Seeds
  misc_feature: MA Experiment ID: 108464 Result: Up-regulated in Transcription
  misc_feature: MA Experiment 108464 PARAMETER Experiment Name: At_Germinating_Seeds_cDNA_P Parameter: Age (day) Value: 4 vs. 0
  misc_feature: MA Experiment 108464 PARAMETER Experiment Name: At_Germinating_Seeds_cDNA_P Parameter: Tissue Value: Germinating Seeds
  misc_feature: MA Experiment ID: 108561 Result: Down-regulated in Transcription
  misc_feature: MA Experiment 108561 PARAMETER Experiment Name: At_100uM_ABA_cDNA_P Parameter: Timepoint (hr) Value: 6
  misc_feature: MA Experiment 108561 PARAMETER Experiment Name: At_100uM_ABA_cDNA_P Parameter: Tissue Value: Aerial
  misc_feature: MA Experiment 108561 PARAMETER Experiment Name: At_100uM_ABA_cDNA_P Parameter: Treatment Value: 100uM ABA vs. No Treatment
  misc_feature: MA Experiment ID: 20000113 Result: Down-regulated in Transcription
  misc_feature: MA Experiment 20000113 PARAMETER Experiment Name: At_42deg_Heat_cDNA_P Parameter: Temperature (deg C) Value: 42 vs. 22
  misc_feature: MA Experiment 20000113 PARAMETER Experiment Name: At_42deg_Heat_cDNA_P Parameter: Timepoint (hr) Value: 8
  misc_feature: MA Experiment 20000113 PARAMETER Experiment Name: At_42deg_Heat_cDNA_P Parameter: Tissue Value: Aerial
  misc_feature: MA Experiment ID: 20000173 Result: Down-regulated in Transcription
  misc_feature: MA Experiment 20000173 PARAMETER Experiment Name: At_42deg_Heat_P Parameter: Age (day) Value: 14
  misc_feature: MA Experiment 20000173 PARAMETER Experiment Name: At_42deg_Heat_P Parameter: Organism Value: A. thaliana
  misc_feature: MA Experiment 20000173 PARAMETER Experiment Name: At_42deg_Heat_P Parameter: Plant Line Value: WS
  misc_feature: MA Experiment 20000173 PARAMETER Experiment Name: At_42deg_Heat_P Parameter: Temperature (deg C) Value: 42 vs. 22
  misc_feature: MA Experiment 20000173 PARAMETER Experiment Name: At_42deg_Heat_P Parameter: Timepoint (hr) Value: 6
  misc_feature: MA Experiment 20000173 PARAMETER Experiment Name: At_42deg_Heat_P Parameter: Tissue Value: Aerial
  misc_feature: MA Experiment ID: 20000180 Result: Up-regulated in Transcription
  misc_feature: MA Experiment 20000180 PARAMETER Experiment Name: At_Germinating_Seeds_P Parameter: Age (hr) Value: 24 vs. 0
  misc_feature: MA Experiment 20000180 PARAMETER Experiment Name: At_Germinating_Seeds_P Parameter: Tissue Value: Germinating Seeds
  misc_feature: MA Experiment ID: 20000185 Result: Down-regulated in Transcription
  misc_feature: MA Experiment 20000185 PARAMETER Experiment Name: At_Roots__P Parameter: Age (day) Value: 7 vs. 21
  misc_feature: MA Experiment 20000185 PARAMETER Experiment Name: At_Roots__P Parameter: Organism Value: A. thaliana
  misc_feature: MA Experiment 20000185 PARAMETER Experiment Name: At_Roots__P Parameter: Tissue Value: Roots vs. Whole Plant
  misc_feature: MA Experiment ID: 20000235 Result: Up-regulated in Transcription
  misc_feature: MA Experiment 20000235 PARAMETER Experiment Name: At_Siliques_P Parameter: Age (day) Value: 21
  misc_feature: MA Experiment 20000235 PARAMETER Experiment Name: At_Siliques_P Parameter: Organism Value: A. thaliana
  misc_feature: MA Experiment 20000235 PARAMETER Experiment Name: At_Siliques_P Parameter: Plant Line Value: WS
  misc_feature: MA Experiment 20000235 PARAMETER Experiment Name: At_Siliques_P Parameter: Tissue Value: 5-10mm Siliques vs. Whole Plant
  misc_feature: MA Experiment ID: 20000265 Result: Up-regulated in Transcription
  misc_feature: MA Experiment 20000265 PARAMETER Experiment Name: At_Open_Flower_P Parameter: Age (day) Value: 21
  misc_feature: MA Experiment 20000265 PARAMETER Experiment Name: At_Open_Flower_P Parameter: Plant Line Value: WS
  misc_feature: MA Experiment 20000265 PARAMETER Experiment Name: At_Open_Flower_P Parameter: Tissue Value: Closed Flower vs. Whole Plant
  misc_feature: MA Experiment ID: 20000437 Result: Down-regulated in Transcription
  misc_feature: MA Experiment 20000437 PARAMETER Experiment Name: At_Drought_P Parameter: Age (day) Value: 8
  misc_feature: MA Experiment 20000437 PARAMETER Experiment Name: At_Drought_P Parameter: Organism Value: A. thaliana
  misc_feature: MA Experiment 20000437 PARAMETER Experiment Name: At_Drought_P Parameter: Plant Line Value: WS
  misc_feature: MA Experiment 20000437 PARAMETER Experiment Name: At_Drought_P Parameter: Timepoint (hr) Value: 24
  misc_feature: MA Experiment 20000437 PARAMETER Experiment Name: At_Drought_P Parameter: Tissue Value: Whole Plant
  misc_feature: MA Experiment 20000437 PARAMETER Experiment Name: At_Drought_P Parameter: Treatment Value: Drought vs. No Drought
  misc_feature: MA Experiment ID: 20000441 Result: Down-regulated in Transcription
  misc_feature: MA Experiment 20000441 PARAMETER Experiment Name: At_1uM_BR-BRZ__P Parameter: Tissue Value: Shoot Apices
  misc_feature: MA Experiment 20000441 PARAMETER Experiment Name: At_1uM_BR-BRZ__P Parameter: Treatment Value: 1uM BR vs. No Treatment
  misc_feature: MA Experiment ID: 20000443 Result: Down-regulated in Transcription
  misc_feature: MA Experiment 20000443 PARAMETER Experiment Name: At_1uM_BR-BRZ__P Parameter: Tissue Value: Shoot Apices
  misc_feature: MA Experiment 20000443 PARAMETER Experiment Name: At_1uM_BR-BRZ__P Parameter: Treatment Value: 1uM BRZ vs. No Treatment
  misc_feature: MA Experiment ID: 20000794 Result: Up-regulated in Transcription
  misc_feature: MA Experiment 20000794 PARAMETER Experiment Name: At_Petals_P Parameter: Age (day) Value: 23-25 days
  misc_feature: MA Experiment 20000794 PARAMETER Experiment Name: At_Petals_P Parameter: Plant Line Value: WS
  misc_feature: MA Experiment 20000794 PARAMETER Experiment Name: At_Petals_P Parameter: Tissue Value: Petals vs. Whole plant
  misc_feature: MA Experiment ID: 20001911 Result: Down-regulated in Transcription
  misc_feature: MA Experiment 20001911 PARAMETER Experiment Name: At_Drought_Reproduction_P Parameter: Age (day) Value: 40
  misc_feature: MA Experiment 20001911 PARAMETER Experiment Name: At_Drought_Reproduction_P Parameter: Organism Value: A. thaliana
  misc_feature: MA Experiment 20001911 PARAMETER Experiment Name: At_Drought_Reproduction_P Parameter: Plant Line Value: WS
  misc_feature: MA Experiment 20001911 PARAMETER Experiment Name: At_Drought_Reproduction_P Parameter: Timepoint (day) Value: 10
  misc_feature: MA Experiment 20001911 PARAMETER Experiment Name: At_Drought_Reproduction_P Parameter: Tissue Value: Flowers
  misc_feature: MA Experiment 20001911 PARAMETER Experiment Name: At_Drought_Reproduction_P Parameter: Treatment Value: Drought vs. No Drought
atttatcgtctacgagctgatggaaagcggatcattggatacacagttacacggaccttctcggggatcggctttaacatggcacatgcggatgaagattgctcttgatacagcaagagctgttgagtatctccacgagcgttgtcgtcctccggttatccacagagatcttaaatcgtcaaatattctccttgattcttccttcaacgccaagatttcggattttggtcttgcggtaatggtgggggctcacggcaaaaacaacattaaactatcaggaacacttggttatgttgctccagaatatctcctagatggaaaattgacggataagagtgatgtttatgcgtttggtgtggttttacttgaactcttgttaggaagacggccggttgagaaattgagttcggttcagtgtcaatctcttgtcacttgggcaatgccccaacttacggatagatcaaagcttccgaaaatcgtggatccggttatcaaagatacaatggatcataagcacttataccaggtggcagccgtggcagtgctttgtgtacaaccagaaccgagttatcgaccgttgataaccgatgttcttcactcactagttccattggttccggtagagctaggagggactctccggttaataccatcatcgtcttgatttaagaaaataatattttttgcttcttttttt

SEQ ID NO: 34916 - protein, 220 aa, Arabidopsis thaliana
  peptide (1)..(220): Ceres Seq. ID no. 12393480
  misc_feature (1)..(130): Pfam Name: Protein kinase domain Pfam Description: Protein kinase domain
  misc_feature (2)..(205): Homolog of NCBI NO: 26449989 NR Description: putative serine/threonine-specific protein kinase
  misc_feature (2)..(205): Homolog of NCBI NO: 30694859 NR Description: protein kinase family [Arabidopsis thaliana]
  misc_feature (2)..(205): Homolog of NCBI NO: 11358842 NR Description: serine/threonine-specific protein kinase-like
  misc_feature (41)..(184): Homolog of NCBI NO: 30689231 NR Description: protein kinase family [Arabidopsis thaliana]
  misc_feature (41)..(184): Homolog of NCBI NO: 7434336 NR Description: hypothetical protein F10N7.190 - Arabidopsis
  misc_feature (2)..(216): Homolog of NCBI NO: 15220195 NR Description: putative protein kinase; protein id: At1g80640.1
  misc_feature (18)..(219): Homolog of NCBI NO: 29367521 NR Description: protein kinase-like protein
  misc_feature (1)..(220): Homolog of NCBI NO: 30683447 NR Description: protein kinase family [Arabidopsis thaliana]
  misc_feature (1)..(220): Homolog of NCBI NO: 11358833 NR Description: ser/thr specific protein kinase-like protein -
  misc_feature (1)..(220): Homolog of NCBI NO: 11259774 NR Description: ser/thr specific protein kinase-like protein -
FIVYELMESGSLDTQLHGPSRGSALTWHMRMKIALDTARAVEYLHERCRPPVIHRDLKSSNILLDSSFNAKISDFGLAVMVGAHGKNNIKLSGTLGYVAPEYLLDGKLTDKSDVYAFGVVLLELLLGRRPVEKLSSVQCQSLVTWAMPQLTDRSKLPKIVDPVIKDTMDHKHLYQVAAVAVLCVQPEPSYRPLITDVLHSLVPLVPVELGGTLRLIPSSS

SEQ ID NO: 34917 - protein, 214 aa, Arabidopsis thaliana
  peptide (1)..(214): Ceres Seq. ID no. 12393481
  misc_feature (1)..(124): Pfam Name: Protein kinase domain Pfam Description: Protein kinase domain
  misc_feature (1)..(199): Homolog of NCBI NO: 26449989 NR Description: putative serine/threonine-specific protein kinase
  misc_feature (1)..(199): Homolog of NCBI NO: 30694859 NR Description: protein kinase family [Arabidopsis thaliana]
  misc_feature (1)..(199): Homolog of NCBI NO: 11358842 NR Description: serine/threonine-specific protein kinase-like
  misc_feature (35)..(178): Homolog of NCBI NO: 30689231 NR Description: protein kinase family [Arabidopsis thaliana]
  misc_feature (35)..(178): Homolog of NCBI NO: 7434336 NR Description: hypothetical protein F10N7.190 - Arabidopsis
  misc_feature (1)..(210): Homolog of NCBI NO: 15220195 NR Description: putative protein kinase; protein id: At1g80640.1
  misc_feature (12)..(213): Homolog of NCBI NO: 29367521 NR Description: protein kinase-like protein
  misc_feature (1)..(214): Homolog of NCBI NO: 30683447 NR Description: protein kinase family [Arabidopsis thaliana]
  misc_feature (1)..(214): Homolog of NCBI NO: 11358833 NR Description: ser/thr specific protein kinase-like protein -
  misc_feature (1)..(214): Homolog of NCBI NO: 11259774 NR Description: ser/thr specific protein kinase-like protein -
MESGSLDTQLHGPSRGSALTWHMRMKIALDTARAVEYLHERCRPPVIHRDLKSSNILLDSSFNAKISDFGLAVMVGAHGKNNIKLSGTLGYVAPEYLLDGKLTDKSDVYAFGVVLLELLLGRRPVEKLSSVQCQSLVTWAMPQLTDRSKLPKIVDPVIKDTMDHKHLYQVAAVAVLCVQPEPSYRPLITDVLHSLVPLVPVELGGTLRLIPSSS

SEQ ID NO: 34918 - protein, 192 aa, Arabidopsis thaliana
  peptide (1)..(192): Ceres Seq. ID no. 12393482
  misc_feature (1)..(102): Pfam Name: Protein kinase domain Pfam Description: Protein kinase domain
  misc_feature (1)..(177): Homolog of NCBI NO: 26449989 NR Description: putative serine/threonine-specific protein kinase
  misc_feature (1)..(177): Homolog of NCBI NO: 30694859 NR Description: protein kinase family [Arabidopsis thaliana]
  misc_feature (1)..(177): Homolog of NCBI NO: 11358842 NR Description: serine/threonine-specific protein kinase-like
  misc_feature (13)..(156): Homolog of NCBI NO: 30689231 NR Description: protein kinase family [Arabidopsis thaliana]
  misc_feature (13)..(156): Homolog of NCBI NO: 7434336 NR Description: hypothetical protein F10N7.190 - Arabidopsis
  misc_feature (1)..(188): Homolog of NCBI NO: 15220195 NR Description: putative protein kinase; protein id: At1g80640.1
  misc_feature (1)..(191): Homolog of NCBI NO: 29367521 NR Description: protein kinase-like protein
  misc_feature (1)..(192): Homolog of NCBI NO: 30683447 NR Description: protein kinase family [Arabidopsis thaliana]
  misc_feature (1)..(192): Homolog of NCBI NO: 11358833 NR Description: ser/thr specific protein kinase-like protein -
  misc_feature (1)..(192): Homolog of NCBI NO: 11259774 NR Description: ser/thr specific protein kinase-like protein -
MRMKIALDTARAVEYLHERCRPPVIHRDLKSSNILLDSSFNAKISDFGLAVMVGAHGKNNIKLSGTLGYVAPEYLLDGKLTDKSDVYAFGVVLLELLLGRRPVEKLSSVQCQSLVTWAMPQLTDRSKLPKIVDPVIKDTMDHKHLYQVAAVAVLCVQPEPSYRPLITDVLHSLVPLVPVELGGTLRLIPSSS

SEQ ID NO: 34919 - DNA, 1249 bp, Arabidopsis thaliana
  misc_feature (1)..(1249): Ceres Seq. ID no. 12334266
  misc_feature: MA Experiment ID: 108461 Result: Up-regulated in Transcription
  misc_feature: MA Experiment 108461 PARAMETER Experiment Name: At_Germinating_Seeds_cDNA_P Parameter: Age (day) Value: 1 vs. 0
  misc_feature: MA Experiment 108461 PARAMETER Experiment Name: At_Germinating_Seeds_cDNA_P Parameter: Tissue Value: Germinating Seeds
  misc_feature: MA Experiment ID: 108462 Result: Up-regulated in Transcription
  misc_feature: MA Experiment 108462 PARAMETER Experiment Name: At_Germinating_Seeds_cDNA_P Parameter: Age (day) Value: 2 vs. 0
  misc_feature: MA Experiment 108462 PARAMETER Experiment Name: At_Germinating_Seeds_cDNA_P Parameter: Tissue Value: Germinating Seeds
  misc_feature: MA Experiment ID: 108463 Result: Up-regulated in Transcription
  misc_feature: MA Experiment 108463 PARAMETER Experiment Name: At_Germinating_Seeds_cDNA_P Parameter: Age (day) Value: 3 vs. 0
  misc_feature: MA Experiment 108463 PARAMETER Experiment Name: At_Germinating_Seeds_cDNA_P Parameter: Tissue Value: Germinating Seeds
  misc_feature: MA Experiment ID: 108464 Result: Up-regulated in Transcription
  misc_feature: MA Experiment 108464 PARAMETER Experiment Name: At_Germinating_Seeds_cDNA_P Parameter: Age (day) Value: 4 vs. 0
  misc_feature: MA Experiment 108464 PARAMETER Experiment Name: At_Germinating_Seeds_cDNA_P Parameter: Tissue Value: Germinating Seeds
  misc_feature: MA Experiment ID: 108474 Result: Down-regulated in Transcription
  misc_feature: MA Experiment 108474 PARAMETER Experiment Name: At_Drought_Flowers_cDNA_P Parameter: Timepoint (hr) Value: null
  misc_feature: MA Experiment 108474 PARAMETER Experiment Name: At_Drought_Flowers_cDNA_P Parameter: Treatment Value: Drought vs. No Drought
  misc_feature: MA Experiment ID: 108561 Result: Up-regulated in Transcription
  misc_feature: MA Experiment 108561 PARAMETER Experiment Name: At_100uM_ABA_cDNA_P Parameter: Timepoint (hr) Value: 6
  misc_feature: MA Experiment 108561 PARAMETER Experiment Name: At_100uM_ABA_cDNA_P Parameter: Tissue Value: Aerial
  misc_feature: MA Experiment 108561 PARAMETER Experiment Name: At_100uM_ABA_cDNA_P Parameter: Treatment Value: 100uM ABA vs. No Treatment
  misc_feature: MA Experiment ID: 108572 Result: Up-regulated in Transcription
  misc_feature: MA Experiment 108572 PARAMETER Experiment Name: At_Drought_cDNA_P Parameter: Timepoint (hr) Value: 1
  misc_feature: MA Experiment 108572 PARAMETER Experiment Name: At_Drought_cDNA_P Parameter: Tissue Value: Aerial
  misc_feature: MA Experiment 108572 PARAMETER Experiment Name: At_Drought_cDNA_P Parameter: Treatment Value: Drought vs. No Drought
  misc_feature: MA Experiment ID: 108573 Result: Up-regulated in Transcription
  misc_feature: MA Experiment 108573 PARAMETER Experiment Name: At_Drought_cDNA_P Parameter: Timepoint (hr) Value: 6
  misc_feature: MA Experiment 108573 PARAMETER Experiment Name: At_Drought_cDNA_P Parameter: Tissue Value: Aerial
  misc_feature: MA Experiment 108573 PARAMETER Experiment Name: At_Drought_cDNA_P Parameter: Treatment Value: Drought vs. No Drought
  misc_feature: MA Experiment ID: 108577 Result: Down-regulated in Transcription
  misc_feature: MA Experiment 108577 PARAMETER Experiment Name: At_42deg_Heat_cDNA_P Parameter: Temperature (deg C) Value: 42 vs. 22
  misc_feature: MA Experiment 108577 PARAMETER Experiment Name: At_42deg_Heat_cDNA_P Parameter: Timepoint (hr) Value: 6
  misc_feature: MA Experiment 108577 PARAMETER Experiment Name: At_42deg_Heat_cDNA_P Parameter: Tissue Value: Aerial
  misc_feature: MA Experiment ID: 108585 Result: Down-regulated in Transcription
  misc_feature: MA Experiment 108585 PARAMETER Experiment Name: At_5mM_NaNP_cDNA_P Parameter: Timepoint (hr) Value: 6
  misc_feature: MA Experiment 108585 PARAMETER Experiment Name: At_5mM_NaNP_cDNA_P Parameter: Tissue Value: Aerial
  misc_feature: MA Experiment 108585 PARAMETER Experiment Name: At_5mM_NaNP_cDNA_P Parameter: Treatment Value: null
  misc_feature: MA Experiment ID: 108595 Result: Down-regulated in Transcription
  misc_feature: MA Experiment 108595 PARAMETER Experiment Name: At_Ler-pi_Ovule_cDNA_P Parameter: Plant Line Value: null
  misc_feature: MA Experiment ID: 108605 Result: Up-regulated in Transcription
  misc_feature: MA Experiment 108605 PARAMETER Experiment Name: At_100uM_ABA_cDNA_P Parameter: Timepoint (hr) Value: 6
  misc_feature: MA Experiment 108605 PARAMETER Experiment Name: At_100uM_ABA_cDNA_P Parameter: Tissue Value: Aerial
  misc_feature: MA Experiment 108605 PARAMETER Experiment Name: At_100uM_ABA_cDNA_P Parameter: Treatment Value: 100uM ABA vs. No Treatment
  misc_feature: MA Experiment ID: 108607 Result: Up-regulated in Transcription
  misc_feature: MA Experiment 108607 PARAMETER Experiment Name: At_100uM_ABA_cDNA_P Parameter: Timepoint (hr) Value: 4
  misc_feature: MA Experiment 108607 PARAMETER Experiment Name: At_100uM_ABA_cDNA_P Parameter: Tissue Value: Aerial
  misc_feature: MA Experiment 108607 PARAMETER Experiment Name: At_100uM_ABA_cDNA_P Parameter: Treatment Value: 100uM ABA vs. No Treatment
  misc_feature: MA Experiment ID: 108608 Result: Up-regulated in Transcription
  misc_feature: MA Experiment 108608 PARAMETER Experiment Name: At_100uM_ABA_cDNA_P Parameter: Timepoint (hr) Value: 1
  misc_feature: MA Experiment 108608 PARAMETER Experiment Name: At_100uM_ABA_cDNA_P Parameter: Tissue Value: Aerial
  misc_feature: MA Experiment 108608 PARAMETER Experiment Name: At_100uM_ABA_cDNA_P Parameter: Treatment Value: 100uM ABA vs. No Treatment
  misc_feature: MA Experiment ID: 20000072 Result: Up-regulated in Transcription
  misc_feature: MA Experiment 20000072 PARAMETER Experiment Name: At_100uM_ABA_Mutants_cDNA_P Parameter: Plant Line Value: CS8105
  misc_feature: MA Experiment 20000072 PARAMETER Experiment Name: At_100uM_ABA_Mutants_cDNA_P Parameter: Timepoint (hr) Value: 6
  misc_feature: MA Experiment 20000072 PARAMETER Experiment Name: At_100uM_ABA_Mutants_cDNA_P Parameter: Tissue Value: Aerial
  misc_feature: MA Experiment 20000072 PARAMETER Experiment Name: At_100uM_ABA_Mutants_cDNA_P Parameter: Treatment Value: 100uM ABA vs. No Treatment
  misc_feature: MA Experiment ID: 20000093 Result: Down-regulated in Transcription
  misc_feature: MA Experiment 20000093 PARAMETER Experiment Name: At_42deg_Heat_cDNA_P Parameter: Temperature (deg C) Value: 42 vs. 22
  misc_feature: MA Experiment 20000093 PARAMETER Experiment Name: At_42deg_Heat_cDNA_P Parameter: Timepoint (hr) Value: 0.5
  misc_feature: MA Experiment 20000093 PARAMETER Experiment Name: At_42deg_Heat_cDNA_P Parameter: Tissue Value: Aerial
  misc_feature: MA Experiment ID: 20000111 Result: Down-regulated in Transcription
  misc_feature: MA Experiment 20000111 PARAMETER Experiment Name: At_42deg_Heat_cDNA_P Parameter: Temperature (deg C) Value: 42 vs. 22
  misc_feature: MA Experiment 20000111 PARAMETER Experiment Name: At_42deg_Heat_cDNA_P Parameter: Timepoint (hr) Value: 6
  misc_feature: MA Experiment 20000111 PARAMETER Experiment Name: At_42deg_Heat_cDNA_P Parameter: Tissue Value: Aerial
  misc_feature: MA Experiment ID: 20000144 Result: Down-regulated in Transcription
  misc_feature: MA Experiment 20000144 PARAMETER Experiment Name: At_42deg_Heat_cDNA_P Parameter: Temperature (deg C) Value: 42 vs. 22
  misc_feature: MA Experiment 20000144 PARAMETER Experiment Name: At_42deg_Heat_cDNA_P Parameter: Timepoint (hr) Value: 1
  misc_feature: MA Experiment 20000144 PARAMETER Experiment Name: At_42deg_Heat_cDNA_P Parameter: Tissue Value: Aerial
  misc_feature: MA Experiment ID: 20000166 Result: Up-regulated in Transcription
  misc_feature: MA Experiment 20000166 PARAMETER Experiment Name: At_100uM_ABA_P Parameter: Age (day) Value: 14
  misc_feature: MA Experiment 20000166 PARAMETER Experiment Name: At_100uM_ABA_P Parameter: Organism Value: A. thaliana
  misc_feature: MA Experiment 20000166 PARAMETER Experiment Name: At_100uM_ABA_P Parameter: Plant Line Value: WS
  misc_feature: MA Experiment 20000166 PARAMETER Experiment Name: At_100uM_ABA_P Parameter: Timepoint (hr) Value: 1
  misc_feature: MA Experiment 20000166 PARAMETER Experiment Name: At_100uM_ABA_P Parameter: Tissue Value: Aerial
  misc_feature: MA Experiment 20000166 PARAMETER Experiment Name: At_100uM_ABA_P Parameter: Treatment Value: 100uM ABA vs. No Treatment
  misc_feature: MA Experiment ID: 20000169 Result: Up-regulated in Transcription
  misc_feature: MA Experiment 20000169 PARAMETER Experiment Name: At_100uM_ABA_P Parameter: Age (day) Value: 14
  misc_feature: MA Experiment 20000169 PARAMETER Experiment Name: At_100uM_ABA_P Parameter: Organism Value: A. thaliana
  misc_feature: MA Experiment 20000169 PARAMETER Experiment Name: At_100uM_ABA_P Parameter: Plant Line Value: WS
  misc_feature: MA Experiment 20000169 PARAMETER Experiment Name: At_100uM_ABA_P Parameter: Timepoint (hr) Value: 6
  misc_feature: MA Experiment 20000169 PARAMETER Experiment Name: At_100uM_ABA_P Parameter: Tissue Value: Aerial
  misc_feature: MA Experiment 20000169 PARAMETER Experiment Name: At_100uM_ABA_P Parameter: Treatment Value: 100uM ABA vs. No Treatment
  misc_feature: MA Experiment ID: 20000171 Result: Down-regulated in Transcription
  misc_feature: MA Experiment 20000171 PARAMETER Experiment Name: At_42deg_Heat_P Parameter: Age (day) Value: 14
  misc_feature: MA Experiment 20000171 PARAMETER Experiment Name: At_42deg_Heat_P Parameter: Organism Value: A. thaliana
  misc_feature: MA Experiment 20000171 PARAMETER Experiment Name: At_42deg_Heat_P Parameter: Plant Line Value: WS
  misc_feature: MA Experiment 20000171 PARAMETER Experiment Name: At_42deg_Heat_P Parameter: Temperature (deg C) Value: 42 vs. 22
  misc_feature: MA Experiment 20000171 PARAMETER Experiment Name: At_42deg_Heat_P Parameter: Timepoint (hr) Value: 1
  misc_feature: MA Experiment 20000171 PARAMETER Experiment Name: At_42deg_Heat_P Parameter: Tissue Value: Aerial
  misc_feature: MA Experiment ID: 20000173 Result: Down-regulated in Transcription
  misc_feature: MA Experiment 20000173 PARAMETER Experiment Name: At_42deg_Heat_P Parameter: Age (day) Value: 14
  misc_feature: MA Experiment 20000173 PARAMETER Experiment Name: At_42deg_Heat_P Parameter: Organism Value: A. thaliana
  misc_feature: MA Experiment 20000173 PARAMETER Experiment Name: At_42deg_Heat_P Parameter: Plant Line Value: WS
  misc_feature: MA Experiment 20000173 PARAMETER Experiment Name: At_42deg_Heat_P Parameter: Temperature (deg C) Value: 42 vs. 22
  misc_feature: MA Experiment 20000173 PARAMETER Experiment Name: At_42deg_Heat_P Parameter: Timepoint (hr) Value: 6
  misc_feature: MA Experiment 20000173 PARAMETER Experiment Name: At_42deg_Heat_P Parameter: Tissue Value: Aerial
  misc_feature: MA Experiment ID: 20000179 Result: Up-regulated in Transcription
  misc_feature: MA Experiment 20000179 PARAMETER Experiment Name: At_Germinating_Seeds_P Parameter: Age (hr) Value: 6 vs. 0
  misc_feature: MA Experiment 20000179 PARAMETER Experiment Name: At_Germinating_Seeds_P Parameter: Tissue Value: Germinating Seeds
  misc_feature: MA Experiment ID: 20000180 Result: Up-regulated in Transcription
  misc_feature: MA Experiment 20000180 PARAMETER Experiment Name: At_Germinating_Seeds_P Parameter: Age (hr) Value: 24 vs. 0
  misc_feature: MA Experiment 20000180 PARAMETER Experiment Name: At_Germinating_Seeds_P Parameter: Tissue Value: Germinating Seeds
  misc_feature: MA Experiment ID: 20000184 Result: Up-regulated in Transcription
  misc_feature: MA Experiment 20000184 PARAMETER Experiment Name: At_Shoots__P Parameter: Age (day) Value: 7
  misc_feature: MA Experiment 20000184 PARAMETER Experiment Name: At_Shoots__P Parameter: Tissue Value: Shoots vs. Whole Plant
  misc_feature: MA Experiment ID: 20000224 Result: Up-regulated in Transcription
  misc_feature: MA Experiment ID: 20000234 Result: Up-regulated in Transcription
  misc_feature: MA Experiment 20000234 PARAMETER Experiment Name: At_Siliques_P Parameter: Age (day) Value: 21
  misc_feature: MA Experiment 20000234 PARAMETER Experiment Name: At_Siliques_P Parameter: Organism Value: A. thaliana
  misc_feature: MA Experiment 20000234 PARAMETER Experiment Name: At_Siliques_P Parameter: Plant Line Value: WS
  misc_feature: MA Experiment 20000234 PARAMETER Experiment Name: At_Siliques_P Parameter: Tissue Value: Less Than 5mm Siliques vs. Whole Plant
  misc_feature: MA Experiment ID: 20000235 Result: Up-regulated in Transcription
  misc_feature: MA Experiment 20000235 PARAMETER Experiment Name: At_Siliques_P Parameter: Age (day) Value: 21
  misc_feature: MA Experiment 20000235 PARAMETER Experiment Name: At_Siliques_P Parameter: Organism Value: A. thaliana
  misc_feature: MA Experiment 20000235 PARAMETER Experiment Name: At_Siliques_P Parameter: Plant Line Value: WS
  misc_feature: MA Experiment 20000235 PARAMETER Experiment Name: At_Siliques_P Parameter: Tissue Value: 5-10mm Siliques vs. Whole Plant
  misc_feature: MA Experiment ID: 20000264 Result: Up-regulated in Transcription
  misc_feature: MA Experiment 20000264 PARAMETER Experiment Name: At_Open_Flower_P Parameter: Age (day) Value: 21
  misc_feature: MA Experiment 20000264 PARAMETER Experiment Name: At_Open_Flower_P Parameter: Plant Line Value: WS
  misc_feature: MA Experiment 20000264 PARAMETER Experiment Name: At_Open_Flower_P Parameter: Tissue Value: Open Flower vs. Whole Plant
  misc_feature: MA Experiment ID: 20000265 Result: Up-regulated in Transcription
  misc_feature: MA Experiment 20000265 PARAMETER Experiment Name: At_Open_Flower_P Parameter: Age (day) Value: 21
  misc_feature: MA Experiment 20000265 PARAMETER Experiment Name: At_Open_Flower_P Parameter: Plant Line Value: WS
  misc_feature: MA Experiment 20000265 PARAMETER Experiment Name: At_Open_Flower_P Parameter: Tissue Value: Closed Flower vs. Whole Plant
  misc_feature: MA Experiment ID: 20000267 Result: Up-regulated in Transcription
  misc_feature: MA Experiment 20000267 PARAMETER Experiment Name: At_Drought_P Parameter: Age (day) Value: 7
  misc_feature: MA Experiment 20000267 PARAMETER Experiment Name: At_Drought_P Parameter: Organism Value: A. thaliana
  misc_feature: MA Experiment 20000267 PARAMETER Experiment Name: At_Drought_P Parameter: Plant Line Value: WS
  misc_feature: MA Experiment 20000267 PARAMETER Experiment Name: At_Drought_P Parameter: Timepoint (hr) Value: 6
  misc_feature: MA Experiment 20000267 PARAMETER Experiment Name: At_Drought_P Parameter: Tissue Value: Whole Plant
  misc_feature: MA Experiment 20000267 PARAMETER Experiment Name: At_Drought_P Parameter: Treatment Value: Drought vs. No Drought
  misc_feature: MA Experiment ID: 20000286 Result: Up-regulated in Transcription
  misc_feature: MA Experiment 20000286 PARAMETER Experiment Name: At_Open_Flower_P Parameter: Age (day) Value: 21
  misc_feature: MA Experiment 20000286 PARAMETER Experiment Name: At_Open_Flower_P Parameter: Plant Line Value: WS
  misc_feature: MA Experiment 20000286 PARAMETER Experiment Name: At_Open_Flower_P Parameter: Tissue Value: Half Open vs. Whole Plant
  misc_feature: MA Experiment ID: 20000436 Result: Up-regulated in Transcription
  misc_feature: MA Experiment 20000436 PARAMETER Experiment Name: At_Drought_P Parameter: Age (day) Value: 7
  misc_feature: MA Experiment 20000436 PARAMETER Experiment Name: At_Drought_P Parameter: Organism Value: A. thaliana
  misc_feature: MA Experiment 20000436 PARAMETER Experiment Name: At_Drought_P Parameter: Plant Line Value: WS
  misc_feature: MA Experiment 20000436 PARAMETER Experiment Name: At_Drought_P Parameter: Timepoint (hr) Value: 12
  misc_feature: MA Experiment 20000436 PARAMETER Experiment Name: At_Drought_P Parameter: Tissue Value: Whole Plant
  misc_feature: MA Experiment 20000436 PARAMETER Experiment Name: At_Drought_P Parameter: Treatment Value: Drought vs. No Drought
  misc_feature: MA Experiment ID: 20000437 Result: Up-regulated in Transcription
  misc_feature: MA Experiment 20000437 PARAMETER Experiment Name: At_Drought_P Parameter: Age (day) Value: 8
  misc_feature: MA Experiment 20000437 PARAMETER Experiment Name: At_Drought_P Parameter: Organism Value: A. thaliana
  misc_feature: MA Experiment 20000437 PARAMETER Experiment Name: At_Drought_P Parameter: Plant Line Value: WS
  misc_feature: MA Experiment 20000437 PARAMETER Experiment Name: At_Drought_P Parameter: Timepoint (hr) Value: 24
  misc_feature: MA Experiment 20000437 PARAMETER Experiment Name: At_Drought_P Parameter: Tissue Value: Whole Plant
  misc_feature: MA Experiment 20000437 PARAMETER Experiment Name: At_Drought_P Parameter: Treatment Value: Drought vs. No Drought
  misc_feature: MA Experiment ID: 20000438 Result: Up-regulated in Transcription
  misc_feature: MA Experiment 20000438 PARAMETER Experiment Name: At_Shoots__P Parameter: Age (day) Value: 14
  misc_feature: MA Experiment 20000438 PARAMETER Experiment Name: At_Shoots__P Parameter: Tissue Value: Shoots vs. Whole Plant
  misc_feature: MA Experiment ID: 20000439 Result: Down-regulated in Transcription
  misc_feature: MA Experiment 20000439 PARAMETER Experiment Name: At_Roots__P Parameter: Age (day) Value: 14 vs. 21
  misc_feature: MA Experiment 20000439 PARAMETER Experiment Name: At_Roots__P Parameter: Organism Value: A. thaliana
  misc_feature: MA Experiment 20000439 PARAMETER Experiment Name: At_Roots__P Parameter: Tissue Value: Roots vs. Whole Plant
  misc_feature: MA Experiment ID: 20000441 Result: Down-regulated in Transcription
  misc_feature: MA Experiment 20000441 PARAMETER Experiment Name: At_1uM_BR-BRZ__P Parameter: Tissue Value: Shoot Apices
  misc_feature: MA Experiment 20000441 PARAMETER Experiment Name: At_1uM_BR-BRZ__P Parameter: Treatment Value: 1uM BR vs. No Treatment
  misc_feature: MA Experiment ID: 20000443 Result: Down-regulated in Transcription
  misc_feature: MA Experiment 20000443 PARAMETER Experiment Name: At_1uM_BR-BRZ__P Parameter: Tissue Value: Shoot Apices
  misc_feature: MA Experiment 20000443 PARAMETER Experiment Name: At_1uM_BR-BRZ__P Parameter: Treatment Value: 1uM BRZ vs. No Treatment
  misc_feature: MA Experiment ID: 20000573 Result: Down-regulated in Transcription
  misc_feature: MA Experiment 20000573 PARAMETER Experiment Name: At_100uM_ABA_Mutants__P Parameter: Organism Value: A. thaliana
  misc_feature: MA Experiment 20000573 PARAMETER Experiment Name: At_100uM_ABA_Mutants__P Parameter: Plant Line Value: CS22 vs. Ler wt
  misc_feature: MA Experiment 20000573 PARAMETER Experiment Name: At_100uM_ABA_Mutants__P Parameter: Timepoint (hr) Value: N/A
  misc_feature: MA Experiment 20000573 PARAMETER Experiment Name: At_100uM_ABA_Mutants__P Parameter: Tissue Value: Whole Plant
  misc_feature: MA Experiment 20000573 PARAMETER Experiment Name: At_100uM_ABA_Mutants__P Parameter: Treatment Value: None
  misc_feature: MA Experiment ID: 20000574 Result: Down-regulated in Transcription
  misc_feature: MA Experiment 20000574 PARAMETER Experiment Name: At_100uM_ABA_Mutants__P Parameter: Organism Value: A. thaliana
  misc_feature: MA Experiment 20000574 PARAMETER Experiment Name: At_100uM_ABA_Mutants__P Parameter: Plant Line Value: CS23 vs. Ler wt
  misc_feature: MA Experiment 20000574 PARAMETER Experiment Name: At_100uM_ABA_Mutants__P Parameter: Timepoint (hr) Value: N/A
  misc_feature: MA Experiment 20000574 PARAMETER Experiment Name: At_100uM_ABA_Mutants__P Parameter: Tissue Value: Whole Plant
  misc_feature: MA Experiment 20000574 PARAMETER Experiment Name: At_100uM_ABA_Mutants__P Parameter: Treatment Value: None
  misc_feature: MA Experiment ID: 20000794 Result: Up-regulated in Transcription
  misc_feature: MA Experiment 20000794 PARAMETER Experiment Name: At_Petals_P Parameter: Age (day) Value: 23-25 days
  misc_feature: MA Experiment 20000794 PARAMETER Experiment Name: At_Petals_P Parameter: Plant Line Value: WS
  misc_feature: MA Experiment 20000794 PARAMETER Experiment Name: At_Petals_P Parameter: Tissue Value: Petals vs. Whole plant
  misc_feature: MA Experiment ID: 20001248 Result: Down-regulated in Transcription
  misc_feature: MA Experiment 20001248 PARAMETER Experiment Name: At_Far-red-induction_P Parameter: Age (day) Value: 7
  misc_feature: MA Experiment 20001248 PARAMETER Experiment Name: At_Far-red-induction_P Parameter: Light Value: Far-red vs. White
  misc_feature: MA Experiment 20001248 PARAMETER Experiment Name: At_Far-red-induction_P Parameter: Organism Value: A. thaliana
  misc_feature: MA Experiment 20001248 PARAMETER Experiment Name: At_Far-red-induction_P Parameter: Plant Line Value: Columbia
  misc_feature: MA Experiment 20001248 PARAMETER Experiment Name: At_Far-red-induction_P Parameter: Timepoint (hr) Value: 4
  misc_feature: MA Experiment 20001248 PARAMETER Experiment Name: At_Far-red-induction_P Parameter: Tissue Value: Whole Plant
  misc_feature: MA Experiment ID: 20001450 Result: Down-regulated in Transcription
  misc_feature: MA Experiment 20001450 PARAMETER Experiment Name: At_Far-red-induction_P Parameter: Age (day) Value: 7
  misc_feature: MA Experiment 20001450 PARAMETER Experiment Name: At_Far-red-induction_P Parameter: Light Value: Far-red vs. White
  misc_feature: MA Experiment 20001450 PARAMETER Experiment Name: At_Far-red-induction_P Parameter: Organism Value: A. thaliana
  misc_feature: MA Experiment 20001450 PARAMETER Experiment Name: At_Far-red-induction_P Parameter: Plant Line Value: Columbia
  misc_feature: MA Experiment 20001450 PARAMETER Experiment Name: At_Far-red-induction_P Parameter: Timepoint (hr) Value: 8
  misc_feature: MA Experiment 20001450 PARAMETER Experiment Name: At_Far-red-induction_P Parameter: Tissue Value: Whole Plant
  misc_feature: MA Experiment ID: 20001457 Result: Up-regulated in Transcription
  misc_feature: MA Experiment 20001457 PARAMETER Experiment Name: At_50mM_NH4NO3_L-to-H_P Parameter: Age (day) Value: Undefined
  misc_feature: MA Experiment 20001457 PARAMETER Experiment Name: At_50mM_NH4NO3_L-to-H_P Parameter: Organism Value: Undefined
  misc_feature: MA Experiment 20001457 PARAMETER Experiment Name: At_50mM_NH4NO3_L-to-H_P Parameter: Plant Line Value: Undefined
  misc_feature: MA Experiment 20001457 PARAMETER Experiment Name: At_50mM_NH4NO3_L-to-H_P Parameter: Timepoint (hr) Value: 0.5
  misc_feature: MA Experiment 20001457 PARAMETER Experiment Name: At_50mM_NH4NO3_L-to-H_P Parameter: Tissue Value: Siliques
  misc_feature: MA Experiment 20001457 PARAMETER Experiment Name: At_50mM_NH4NO3_L-to-H_P Parameter: Treatment Value: 50mM NH4NO3 vs. 100mM Manitol
  misc_feature: MA Experiment ID: 20001558 Result: Up-regulated in Transcription
  misc_feature: MA Experiment 20001558 PARAMETER Experiment Name: At_Drought_Soil_Dry_P Parameter: Age (day) Value: 27
  misc_feature: MA Experiment 20001558 PARAMETER Experiment Name: At_Drought_Soil_Dry_P Parameter: Organism Value: A. thaliana
  misc_feature: MA Experiment 20001558 PARAMETER Experiment Name: At_Drought_Soil_Dry_P Parameter: Plant Line Value: WS
  misc_feature: MA Experiment 20001558 PARAMETER Experiment Name: At_Drought_Soil_Dry_P Parameter: Post Timepoint (hr) Value: 6
  misc_feature: MA Experiment 20001558 PARAMETER Experiment Name: At_Drought_Soil_Dry_P Parameter: Post-Treatment Value: Re-Water vs. No Drought
  misc_feature: MA Experiment 20001558 PARAMETER Experiment Name: At_Drought_Soil_Dry_P Parameter: Timepoint (day) Value: 13
  misc_feature: MA Experiment 20001558 PARAMETER Experiment Name: At_Drought_Soil_Dry_P Parameter: Treatment Value: Drought vs. No Drought
  misc_feature: MA Experiment ID: 20001904 Result: Up-regulated in Transcription
  misc_feature: MA Experiment 20001904 PARAMETER Experiment Name: At_Drought_Reproduction_P Parameter: Age (day) Value: 37
  misc_feature: MA Experiment 20001904 PARAMETER Experiment Name: At_Drought_Reproduction_P Parameter: Organism Value: A. thaliana
  misc_feature: MA Experiment 20001904 PARAMETER Experiment Name: At_Drought_Reproduction_P Parameter: Plant Line Value: WS
  misc_feature: MA Experiment 20001904 PARAMETER Experiment Name: At_Drought_Reproduction_P Parameter: Timepoint (day) Value: 7
  misc_feature: MA Experiment 20001904 PARAMETER Experiment Name: At_Drought_Reproduction_P Parameter: Tissue Value: Rosettes
  misc_feature: MA Experiment 20001904 PARAMETER Experiment Name: At_Drought_Reproduction_P Parameter: Treatment Value: Drought vs. No Drought
  misc_feature: MA Experiment ID: 20001906 Result: Down-regulated in Transcription
  misc_feature: MA Experiment 20001906 PARAMETER Experiment Name: At_Drought_Reproduction_P Parameter: Age (day) Value: 35
  misc_feature: MA Experiment 20001906 PARAMETER Experiment Name: At_Drought_Reproduction_P Parameter: Organism Value: A. thaliana
  misc_feature: MA Experiment 20001906 PARAMETER Experiment Name: At_Drought_Reproduction_P Parameter: Plant Line Value: WS
  misc_feature: MA Experiment 20001906 PARAMETER Experiment Name: At_Drought_Reproduction_P Parameter: Timepoint (day) Value: 5
  misc_feature: MA Experiment 20001906 PARAMETER Experiment Name: At_Drought_Reproduction_P Parameter: Tissue Value: Siliques
  misc_feature: MA Experiment 20001906 PARAMETER Experiment Name: At_Drought_Reproduction_P Parameter: Treatment Value: Drought vs. No Drought
aaaatatgacatttacattctctcaaaagaaactttctacataatataaaaagtcacacattctctctattaattaaacatgttgcttgttgcgtttgtgactcttttggtagcagtagctttgcagccactaccgtcagtgttgtctttggacgttcaccttcttcggcagctagcccgcaaagcacaatgtgacatcgatacttgtgtttggagattctagtgtcgatccagggaacaataatttcattaaaaccgaaatgaaagggaattttccaccttatggtgaaaatttcatcaaccataaacccaccggtagattatgcgatggattactcgctcccgattatattgcggaggccatgggttaccctcccataccggcttttcttgatccatccctaacccaagctgatctaactcgcggtgcaagttttgcctctgctggttctggctatgacgatctcacagctaatatatcaaacgtatggagtttcactacacaagccaattactttctacattacaagattcatctgactaaattggtcggtccattagagagcgctaaaatgataaataatgctatatttcttatgagtatgggatcaaatgactttcttcaaaattacttagtcgattttactcgacaaaagcaattcacggttgagcaatacatcgagtttctctcccaccgtatgctttacgacgccaagatgttgcataggcttggagctaaaaggttggtggtagtgggagttcctcccatgggatgcatgcctttaattaaatacctacgaggccaaaaaacttgtgtagatcaactaaaccaaatcgctttctcctttaacgccaaaatcatcaaaaatctagagcttctccagtctaaaatcggtttgaaaaccatctacgttgatgcttattcgaccatccaagaagccattaaaaatccgagaaaatttggtttcgtcgaggcttcgctaggctgttgtggaacaggtacatacgaatatggagagacatgcaaagatatgcaagtatgcaaagatcctaccaaatacgttttttgggacgccgtccatccaacacaaagaatgtatcaaatcattgttaagaaggcaattgcatccatcagtgaagagtttcttgtttagaaatattatatgttcgtattttactatcatgatttatgaaagattctagatgtaattgaaaagcattcaaaatgttaaatttaatggttcaaatc

SEQ ID NO: 34920 - protein, 297 aa, Arabidopsis thaliana
  peptide (1)..(297): Ceres Seq. ID no. 12334267
  misc_feature (1)..(287): Pfam Name: GDSL-like Lipase/Acylhydrolase Pfam Description: GDSL-like Lipase/Acylhydrolase
  misc_feature (1)..(291): Homolog of NCBI NO: 18390708 NR Description: expressed protein
  misc_feature (1)..(288): Homolog of NCBI NO: 18394825 NR Description: anter-specific proline-rich protein APG
  misc_feature (1)..(292): Homolog of NCBI NO: 34907922 NR Description: putative GDSL-motif lipase/hydrolase
  misc_feature (1)..(295): Homolog of NCBI NO: 2062167 NR Description: Proline-rich protein APG isolog [Arabidopsis
  misc_feature (1)..(295): Homolog of NCBI NO: 15228189 NR Description: putative APG protein
  misc_feature (1)..(296): Homolog of NCBI NO: 15228157 NR Description: putative GDSL-motif lipase/hydrolase
  misc_feature (1)..(296): Homolog of NCBI NO: 21593518 NR Description: putative GDSL-motif lipase/hydrolase [Arabidopsis
  misc_feature (1)..(280): Homolog of NCBI NO: 21536954 NR Description: GDSL-motif lipase/hydrolase-like protein
  misc_feature (1)..(280): Homolog of NCBI NO: 15237351 NR Description: GDSL-motif lipase/hydrolase protein
  misc_feature (1)..(297): Homolog of NCBI NO: 15237350 NR Description: GDSL-motif lipase/hydrolase-like protein; protein
MKGNFPPYGENFINHKPTGRLCDGLLAPDYIAEAMGYPPIPAFLDPSLTQADLTRGASFASAGSGYDDLTANISNVWSFTTQANYFLHYKIHLTKLVGPLESAKMINNAIFLMSMGSNDFLQNYLVDFTRQKQFTVEQYIEFLSHRMLYDAKMLHRLGAKRLVVVGVPPMGCMPLIKYLRGQKTCVDQLNQIAFSFNAKIIKNLELLQSKIGLKTIYVDAYSTIQEAIKNPRKFGFVEASLGCCGTGTYEYGETCKDMQVCKDPTKYVFWDAVHPTQRMYQIIVKKAIASISEEFLV

SEQ ID NO: 34921 - protein, 263 aa, Arabidopsis thaliana
  peptide (1)..(263): Ceres Seq. ID no. 12334268
  misc_feature (1)..(253): Pfam Name: GDSL-like Lipase/Acylhydrolase Pfam Description: GDSL-like Lipase/Acylhydrolase
  misc_feature (1)..(257): Homolog of NCBI NO: 18390708 NR Description: expressed protein
  misc_feature (1)..(254): Homolog of NCBI NO: 18394825 NR Description: anter-specific proline-rich protein APG
  misc_feature (1)..(258): Homolog of NCBI NO: 34907922 NR Description: putative GDSL-motif lipase/hydrolase
  misc_feature (1)..(261): Homolog of NCBI NO: 2062167 NR Description: Proline-rich protein APG isolog [Arabidopsis
  misc_feature (1)..(261): Homolog of NCBI NO: 15228189 NR Description: putative APG protein
  misc_feature (1)..(262): Homolog of NCBI NO: 15228157 NR Description: putative GDSL-motif lipase/hydrolase
  misc_feature (1)..(262): Homolog of NCBI NO: 21593518 NR Description: putative GDSL-motif lipase/hydrolase [Arabidopsis
  misc_feature (1)..(246): Homolog of NCBI NO: 21536954 NR Description: GDSL-motif lipase/hydrolase-like protein
  misc_feature (1)..(246): Homolog of NCBI NO: 15237351 NR Description: GDSL-motif lipase/hydrolase protein
  misc_feature (1)..(263): Homolog of NCBI NO: 15237350 NR Description: GDSL-motif lipase/hydrolase-like protein; protein
MGYPPIPAFLDPSLTQADLTRGASFASAGSGYDDLTANISNVWSFTTQANYFLHYKIHLTKLVGPLESAKMINNAIFLMSMGSNDFLQNYLVDFTRQKQFTVEQYIEFLSHRMLYDAKMLHRLGAKRLVVVGVPPMGCMPLIKYLRGQKTCVDQLNQIAFSFNAKIIKNLELLQSKIGLKTIYVDAYSTIQEAIKNPRKFGFVEASLGCCGTGTYEYGETCKDMQVCKDPTKYVFWDAVHPTQRMYQIIVKKAIASISEEFLV

SEQ ID NO: 34922 - protein, 193 aa, Arabidopsis thaliana
  peptide (1)..(193): Ceres Seq. ID no. 12334269
  misc_feature (1)..(183): Pfam Name: GDSL-like Lipase/Acylhydrolase Pfam Description: GDSL-like Lipase/Acylhydrolase
  misc_feature (1)..(187): Homolog of NCBI NO: 18390708 NR Description: expressed protein
  misc_feature (1)..(184): Homolog of NCBI NO: 18394825 NR Description: anter-specific proline-rich protein APG
  misc_feature (1)..(188): Homolog of NCBI NO: 34907922 NR Description: putative GDSL-motif lipase/hydrolase
  misc_feature (1)..(191): Homolog of NCBI NO: 2062167 NR Description: Proline-rich protein APG isolog [Arabidopsis
  misc_feature (1)..(191): Homolog of NCBI NO: 15228189 NR Description: putative APG protein
  misc_feature (1)..(192): Homolog of NCBI NO: 15228157 NR Description: putative GDSL-motif lipase/hydrolase
  misc_feature (1)..(192): Homolog of NCBI NO: 21593518 NR Description: putative GDSL-motif lipase/hydrolase [Arabidopsis
  misc_feature (1)..(176): Homolog of NCBI NO: 21536954 NR Description: GDSL-motif lipase/hydrolase-like protein
  misc_feature (1)..(176): Homolog of NCBI NO: 15237351 NR Description: GDSL-motif lipase/hydrolase protein
  misc_feature (1)..(193): Homolog of NCBI NO: 15237350 NR Description: GDSL-motif lipase/hydrolase-like protein; protein
MINNAIFLMSMGSNDFLQNYLVDFTRQKQFTVEQYIEFLSHRMLYDAKMLHRLGAKRLVVVGVPPMGCMPLIKYLRGQKTCVDQLNQIAFSFNAKIIKNLELLQSKIGLKTIYVDAYSTIQEAIKNPRKFGFVEASLGCCGTGTYEYGETCKDMQVCKDPTKYVFWDAVHPTQRMYQIIVKKAIASISEEFLV

SEQ ID NO: 34923 - DNA, 1785 bp, Arabidopsis thaliana
  misc_feature (1)..(1785): Ceres Seq. ID no. 12338439
  misc_feature: MA Experiment ID: 108435 Result: Down-regulated in Transcription
  misc_feature: MA Experiment 108435 PARAMETER Experiment Name: At_stm_Mutants_cDNA_P Parameter: Plant Line Value: wt Landsburg vs stm
  misc_feature: MA Experiment 108435 PARAMETER Experiment Name: At_stm_Mutants_cDNA_P Parameter: Tissue Value: Shoot Apical Meristem Region
  misc_feature: MA Experiment ID: 108461 Result: Up-regulated in Transcription
  misc_feature: MA Experiment 108461 PARAMETER Experiment Name: At_Germinating_Seeds_cDNA_P Parameter: Age (day) Value: 1 vs. 0
  misc_feature: MA Experiment 108461 PARAMETER Experiment Name: At_Germinating_Seeds_cDNA_P Parameter: Tissue Value: Germinating Seeds
  misc_feature: MA Experiment ID: 108462 Result: Up-regulated in Transcription
  misc_feature: MA Experiment 108462 PARAMETER Experiment Name: At_Germinating_Seeds_cDNA_P Parameter: Age (day) Value: 2 vs. 0
  misc_feature: MA Experiment 108462 PARAMETER Experiment Name: At_Germinating_Seeds_cDNA_P Parameter: Tissue Value: Germinating Seeds
  misc_feature: MA Experiment ID: 108463 Result: Up-regulated in Transcription
  misc_feature: MA Experiment 108463 PARAMETER Experiment Name: At_Germinating_Seeds_cDNA_P Parameter: Age (day) Value: 3 vs. 0
  misc_feature: MA Experiment 108463 PARAMETER Experiment Name: At_Germinating_Seeds_cDNA_P Parameter: Tissue Value: Germinating Seeds
  misc_feature: MA Experiment ID: 108464 Result: Up-regulated in Transcription
  misc_feature: MA Experiment 108464 PARAMETER Experiment Name: At_Germinating_Seeds_cDNA_P Parameter: Age (day) Value: 4 vs. 0
  misc_feature: MA Experiment 108464 PARAMETER Experiment Name: At_Germinating_Seeds_cDNA_P Parameter: Tissue Value: Germinating Seeds
  misc_feature: MA Experiment ID: 108488 Result: Up-regulated in Transcription
  misc_feature: MA Experiment ID: 108595 Result: Down-regulated in Transcription
  misc_feature: MA Experiment 108595 PARAMETER Experiment Name: At_Ler-pi_Ovule_cDNA_P Parameter: Plant Line Value: null
  misc_feature: MA Experiment ID: 20000069 Result: Down-regulated in Transcription
  misc_feature: MA Experiment 20000069 PARAMETER Experiment Name: At_100uM_ABA_Mutants_cDNA_P Parameter: Plant Line Value: CS23
  misc_feature: MA Experiment 20000069 PARAMETER Experiment Name: At_100uM_ABA_Mutants_cDNA_P Parameter: Timepoint (hr) Value: 6
  misc_feature: MA Experiment 20000069 PARAMETER Experiment Name: At_100uM_ABA_Mutants_cDNA_P Parameter: Tissue Value: Aerial
  misc_feature: MA Experiment 20000069 PARAMETER Experiment Name: At_100uM_ABA_Mutants_cDNA_P Parameter: Treatment Value: 100uM ABA vs. No Treatment
  misc_feature: MA Experiment ID: 20000086 Result: Down-regulated in Transcription
  misc_feature: MA Experiment 20000086 PARAMETER Experiment Name: At_100uM_ABA_Mutants_cDNA_P Parameter: Plant Line Value: CS22
  misc_feature: MA Experiment 20000086 PARAMETER Experiment Name: At_100uM_ABA_Mutants_cDNA_P Parameter: Timepoint (hr) Value: 6
  misc_feature: MA Experiment 20000086 PARAMETER Experiment Name: At_100uM_ABA_Mutants_cDNA_P Parameter: Tissue Value: Aerial
  misc_feature: MA Experiment 20000086 PARAMETER Experiment Name: At_100uM_ABA_Mutants_cDNA_P Parameter: Treatment Value: 100uM ABA vs. No Treatment
  misc_feature: MA Experiment ID: 20000087 Result: Down-regulated in Transcription
  misc_feature: MA Experiment 20000087 PARAMETER Experiment Name: At_100uM_ABA_Mutants_cDNA_P Parameter: Plant Line Value: WS
  misc_feature: MA Experiment 20000087 PARAMETER Experiment Name: At_100uM_ABA_Mutants_cDNA_P Parameter: Timepoint (hr) Value: 6
  misc_feature: MA Experiment 20000087 PARAMETER Experiment Name: At_100uM_ABA_Mutants_cDNA_P Parameter: Tissue Value: Aerial
  misc_feature: MA Experiment 20000087 PARAMETER Experiment Name: At_100uM_ABA_Mutants_cDNA_P Parameter: Treatment Value: 100uM ABA vs. No Treatment
  misc_feature: MA Experiment ID: 20000089 Result: Down-regulated in Transcription
  misc_feature: MA Experiment ID: 20000090 Result: Down-regulated in Transcription
  misc_feature: MA Experiment ID: 20000185 Result: Down-regulated in Transcription
  misc_feature: MA Experiment 20000185 PARAMETER Experiment Name: At_Roots__P Parameter: Age (day) Value: 7 vs. 21
  misc_feature: MA Experiment 20000185 PARAMETER Experiment Name: At_Roots__P Parameter: Organism Value: A. thaliana
  misc_feature: MA Experiment 20000185 PARAMETER Experiment Name: At_Roots__P Parameter: Tissue Value: Roots vs. Whole Plant
  misc_feature: MA Experiment ID: 20000438 Result: Up-regulated in Transcription
  misc_feature: MA Experiment 20000438 PARAMETER Experiment Name: At_Shoots__P Parameter: Age (day) Value: 14
  misc_feature: MA Experiment 20000438 PARAMETER Experiment Name: At_Shoots__P Parameter: Tissue Value: Shoots vs. Whole Plant
  misc_feature: MA Experiment ID: 20000439 Result: Down-regulated in Transcription
  misc_feature: MA Experiment 20000439 PARAMETER Experiment Name: At_Roots__P Parameter: Age (day) Value: 14 vs. 21
  misc_feature: MA Experiment 20000439 PARAMETER Experiment Name: At_Roots__P Parameter: Organism Value: A. thaliana
  misc_feature: MA Experiment 20000439 PARAMETER Experiment Name: At_Roots__P Parameter: Tissue Value: Roots vs. Whole Plant
  misc_feature: MA Experiment ID: 20000794 Result: Down-regulated in Transcription
  misc_feature: MA Experiment 20000794 PARAMETER Experiment Name: At_Petals_P Parameter: Age (day) Value: 23-25 days
  misc_feature: MA Experiment 20000794 PARAMETER Experiment Name: At_Petals_P Parameter: Plant Line Value: WS
  misc_feature: MA Experiment 20000794 PARAMETER Experiment Name: At_Petals_P Parameter: Tissue Value: Petals vs. Whole plant
  misc_feature: MA Experiment ID: 20001557 Result: Down-regulated in Transcription
  misc_feature: MA Experiment 20001557 PARAMETER Experiment Name: At_Drought_Soil_Dry_P Parameter: Age (day) Value: 27
  misc_feature: MA Experiment 20001557 PARAMETER Experiment Name: At_Drought_Soil_Dry_P Parameter: Organism Value: A. thaliana
  misc_feature: MA Experiment 20001557 PARAMETER Experiment Name: At_Drought_Soil_Dry_P Parameter: Plant Line Value: WS
  misc_feature: MA Experiment 20001557 PARAMETER Experiment Name: At_Drought_Soil_Dry_P Parameter: Post Timepoint (hr) Value: 3
  misc_feature: MA Experiment 20001557 PARAMETER Experiment Name: At_Drought_Soil_Dry_P Parameter: Post-Treatment Value: Re-Water vs. No Drought
  misc_feature: MA Experiment 20001557 PARAMETER Experiment Name: At_Drought_Soil_Dry_P Parameter: Timepoint (day) Value: 13
  misc_feature: MA Experiment 20001557 PARAMETER Experiment Name: At_Drought_Soil_Dry_P Parameter: Treatment Value: Drought vs. No Drought
  misc_feature: MA Experiment ID: 20001757 Result: Up-regulated in Transcription
  misc_feature: MA Experiment 20001757 PARAMETER Experiment Name: At_50mM_NH4NO3_L-to-H_P Parameter: Timepoint (hr) Value: 6
  misc_feature: MA Experiment 20001757 PARAMETER Experiment Name: At_50mM_NH4NO3_L-to-H_P Parameter: Tissue Value: Leaf
  misc_feature: MA Experiment 20001757 PARAMETER Experiment Name: At_50mM_NH4NO3_L-to-H_P Parameter: Treatment Value: 50mM NH4NO3 vs 100mM Mannitol
  misc_feature: MA Experiment ID: 20001904 Result: Down-regulated in Transcription
  misc_feature: MA Experiment 20001904 PARAMETER Experiment Name: At_Drought_Reproduction_P Parameter: Age (day) Value: 37
  misc_feature: MA Experiment 20001904 PARAMETER Experiment Name: At_Drought_Reproduction_P Parameter: Organism Value: A. thaliana
  misc_feature: MA Experiment 20001904 PARAMETER Experiment Name: At_Drought_Reproduction_P Parameter: Plant Line Value: WS
  misc_feature: MA Experiment 20001904 PARAMETER Experiment Name: At_Drought_Reproduction_P Parameter: Timepoint (day) Value: 7
  misc_feature: MA Experiment 20001904 PARAMETER Experiment Name: At_Drought_Reproduction_P Parameter: Tissue Value: Rosettes
  misc_feature: MA Experiment 20001904 PARAMETER Experiment Name: At_Drought_Reproduction_P Parameter: Treatment Value: Drought vs. No Drought
  misc_feature: MA Experiment ID: 20001905 Result: Down-regulated in Transcription
  misc_feature: MA Experiment 20001905 PARAMETER Experiment Name: At_Drought_Reproduction_P Parameter: Age (day) Value: 40
  misc_feature: MA Experiment 20001905 PARAMETER Experiment Name: At_Drought_Reproduction_P Parameter: Organism Value: A. thaliana
  misc_feature: MA Experiment 20001905 PARAMETER Experiment Name: At_Drought_Reproduction_P Parameter: Plant Line Value: WS
  misc_feature: MA Experiment 20001905 PARAMETER Experiment Name: At_Drought_Reproduction_P Parameter: Timepoint (day) Value: 10
  misc_feature: MA Experiment 20001905 PARAMETER Experiment Name: At_Drought_Reproduction_P Parameter: Tissue Value: Rosettes
  misc_feature: MA Experiment 20001905 PARAMETER Experiment Name: At_Drought_Reproduction_P Parameter: Treatment Value: Drought vs. No Drought
acttcttcttcatcatctttaatcgttgggaaaagtttgatgatacggagtggacaattcttggtgtagaaggagaatctgagagagagagagtcatggaagctctgaaaaccgcaacttttagccctatgtcggtgttatccgagaaaagatcagaaccacgaaagcctttctcgctccctaacctctttccaccaaaatcacagagaccaatctcccaagaaagcttcttgaagagattcaatggtggattggctcttctaacttctgttctaagcagtgcaacagctcctgctaaatccctgacgtacgaggaagctctgcaacaatctatgaccacttcttcatcttttgattcggatggtctgattgaagggatatccaattttgtcacagacaatcctttggttattgccggtggagttgctgcattggctgttccatttgttctgtctcaggttctgaacaagaagcccaaatcatggggagttgagtctgctaagaatgcttataccaagttgggtactgatgataatgctcagttgcttgacataagagctactgctgatttcagacaagtgggcagtcctaatattaagggtttgggtaaaaaagcggtttctactgtttataacggtgaagacaagcctggtttcctgaagaagctttctttgaagtttaaagatcctgagaacaccacattatacattctggacaagtttgatggaaactctgagcttgttgctgaattggtggctcttaatggattcaaatctgcttatgcgattaaagatggtgcagagggacctagaggctggttgaatagcagcttgccttggatagagccaaagaagactctcagccttgatttaagcagtttgacggatagcatcagcggtgtatttggtgagagttctgatggtgtatctgtcgctcttggagtagctgctgctgctggattaagtgtttttgcatttacagagattgaaaccatactccaactactaggttcagctgcacttgttcaacttgcaggcaagaaacttctatttgctgaggaccgaaagcaaactctaaaacaggtggatgagttcttgaacacaaaggttgcccctaaagaacttgttgatgagttaaaggaaataggaaaggctcttcttcctcaatcaacaagcaacaaagctctcccagcaccagcaacagtaacagcagaagcagaatcagctacagctacaaccaccacagtcgataaaccagtacctgagccagaaacagttgcagctacaacaaccactgtagataaaccagtacctgagccagagccagtgccagagccagtgccagtgccagcgattgaagctgcagtcgctgcacaagtaatcacagaaccaaccgaaacagaagccaaaccaaaacctcattcaagacctctctctccatatgcatcgtaccctgacttgaagcctccatcttctccgatgccatcgcagccctgaaaacagctaagaacagtctctctctcgttacttagtctggttttgtcctcctgcaaacagaagaacaaaagtggtcgaatattgtaacttgttcttttttctctcgttttttctcccgaacttagatgctactttgtgtcgaatctgagataagtggactttgttttgtttttctccctttataccaccattgagttcaaacaagagtctgtcatcgcgttaaaggggatcagaagctgtgtgaggggtgtattggacgaaataaaagttgtggggaaatttccaaatg

SEQ ID NO: 34924 - protein, 497 aa, Arabidopsis thaliana
  peptide (1)..(497): Ceres Seq. ID no. 12338440
  misc_feature (41)..(252): Homolog of NCBI NO: 9279727 NR Description: gb|AAB61039.1~gene_id:MWL2.9~similar to unknown
  misc_feature (41)..(273): Homolog of NCBI NO: 18404538 NR Description: rhodanese-like domain protein
  misc_feature (120)..(272): Homolog of NCBI NO: 34907512 NR Description: B1099D03.26 [Oryza sativa (japonica
  misc_feature (41)..(273): Homolog of NCBI NO: 21593550 NR Description: unknown [Arabidopsis thaliana]
  misc_feature (335)..(482): Homolog of NCBI NO: 7485232 NR Description: hypothetical protein A_IG002N01.31 - Arabidopsis
  misc_feature (255)..(497): Homolog of NCBI NO: 25407077 NR Description: hypothetical protein AT4g01050 [imported] -
  misc_feature (1)..(441): Homolog of NCBI NO: 25407077 NR Description: hypothetical protein AT4g01050 [imported] -
  misc_feature (1)..(439): Homolog of NCBI NO: 7485232 NR Description: hypothetical protein A_IG002N01.31 - Arabidopsis
  misc_feature (32)..(497): Homolog of NCBI NO: 18411523 NR Description: expressed protein
FFFIIFNRWEKFDDTEWTILGVEGESERERVMEALKTATFSPMSVLSEKRSEPRKPFSLPNLFPPKSQRPISQESFLKRFNGGLALLTSVLSSATAPAKSLTYEEALQQSMTTSSSFDSDGLIEGISNFVTDNPLVIAGGVAALAVPFVLSQVLNKKPKSWGVESAKNAYTKLGTDDNAQLLDIRATADFRQVGSPNIKGLGKKAVSTVYNGEDKPGFLKKLSLKFKDPENTTLYILDKFDGNSELVAELVALNGFKSAYAIKDGAEGPRGWLNSSLPWIEPKKTLSLDLSSLTDSISGVFGESSDGVSVALGVAAAAGLSVFAFTEIETILQLLGSAALVQLAGKKLLFAEDRKQTLKQVDEFLNTKVAPKELVDELKEIGKALLPQSTSNKALPAPATVTAEAESATATTTTVDKPVPEPETVAATTTTVDKPVPEPEPVPEPVPVPAIEAAVAAQVITEPTETEAKPKPHSRPLSPYASYPDLKPPSSPMPSQP

SEQ ID NO: 34925 - protein, 466 aa, Arabidopsis thaliana
  peptide (1)..(466): Ceres Seq. ID no. 12338441
  misc_feature (10)..(221): Homolog of NCBI NO: 9279727 NR Description: gb|AAB61039.1~gene_id:MWL2.9~similar to unknown
  misc_feature (10)..(242): Homolog of NCBI NO: 18404538 NR Description: rhodanese-like domain protein
  misc_feature (89)..(241): Homolog of NCBI NO: 34907512 NR Description: B1099D03.26 [Oryza sativa (japonica
  misc_feature (10)..(242): Homolog of NCBI NO: 21593550 NR Description: unknown [Arabidopsis thaliana]
  misc_feature (304)..(451): Homolog of NCBI NO: 7485232 NR Description: hypothetical protein A_IG002N01.31 - Arabidopsis
  misc_feature (224)..(466): Homolog of NCBI NO: 25407077 NR Description: hypothetical protein AT4g01050 [imported] -
  misc_feature (1)..(410): Homolog of NCBI NO: 25407077 NR Description: hypothetical protein AT4g01050 [imported] -
  misc_feature (1)..(408): Homolog of NCBI NO: 7485232 NR Description: hypothetical protein A_IG002N01.31 - Arabidopsis
  misc_feature (1)..(466): Homolog of NCBI NO: 18411523 NR Description: expressed protein
MEALKTATFSPMSVLSEKRSEPRKPFSLPNLFPPKSQRPISQESFLKRFNGGLALLTSVLSSATAPAKSLTYEEALQQSMTTSSSFDSDGLIEGISNFVTDNPLVIAGGVAALAVPFVLSQVLNKKPKSWGVESAKNAYTKLGTDDNAQLLDIRATADFRQVGSPNIKGLGKKAVSTVYNGEDKPGFLKKLSLKFKDPENTTLYILDKFDGNSELVAELVALNGFKSAYAIKDGAEGPRGWLNSSLPWIEPKKTLSLDLSSLTDSISGVFGESSDGVSVALGVAAAAGLSVFAFTEIETILQLLGSAALVQLAGKKLLFAEDRKQTLKQVDEFLNTKVAPKELVDELKEIGKALLPQSTSNKALPAPATVTAEAESATATTTTVDKPVPEPETVAATTTTVDKPVPEPEPVPEPVPVPAIEAAVAAQVITEPTETEAKPKPHSRPLSPYASYPDLKPPSSPMPSQP

SEQ ID NO: 34926 - protein, 455 aa, Arabidopsis thaliana
  peptide (1)..(455): Ceres Seq. ID no. 12338443
  misc_feature (1)..(210): Homolog of NCBI NO: 9279727 NR Description: gb|AAB61039.1~gene_id:MWL2.9~similar to unknown
  misc_feature (1)..(231): Homolog of NCBI NO: 18404538 NR Description: rhodanese-like domain protein
  misc_feature (78)..(230): Homolog of NCBI NO: 34907512 NR Description: B1099D03.26 [Oryza sativa (japonica
  misc_feature (1)..(231): Homolog of NCBI NO: 21593550 NR Description: unknown [Arabidopsis thaliana]
  misc_feature (293)..(440): Homolog of NCBI NO: 7485232 NR Description: hypothetical protein A_IG002N01.31 - Arabidopsis
  misc_feature (213)..(455): Homolog of NCBI NO: 25407077 NR Description: hypothetical protein AT4g01050 [imported] -
  misc_feature (1)..(399): Homolog of NCBI NO: 25407077 NR Description: hypothetical protein AT4g01050 [imported] -
  misc_feature (1)..(397): Homolog of NCBI NO: 7485232 NR Description: hypothetical protein A_IG002N01.31 - Arabidopsis
  misc_feature (1)..(455): Homolog of NCBI NO: 18411523 NR Description: expressed protein
MSVLSEKRSEPRKPFSLPNLFPPKSQRPISQESFLKRFNGGLALLTSVLSSATAPAKSLTYEEALQQSMTTSSSFDSDGLIEGISNFVTDNPLVIAGGVAALAVPFVLSQVLNKKPKSWGVESAKNAYTKLGTDDNAQLLDIRATADFRQVGSPNIKGLGKKAVSTVYNGEDKPGFLKKLSLKFKDPENTTLYILDKFDGNSELVAELVALNGFKSAYAIKDGAEGPRGWLNSSLPWIEPKKTLSLDLSSLTDSISGVFGESSDGVSVALGVAAAAGLSVFAFTEIETILQLLGSAALVQLAGKKLLFAEDRKQTLKQVDEFLNTKVAPKELVDELKEIGKALLPQSTSNKALPAPATVTAEAESATATTTTVDKPVPEPETVAATTTTVDKPVPEPEPVPEPVPVPAIEAAVAAQVITEPTETEAKPKPHSRPLSPYASYPDLKPPSSPMPSQP

SEQ ID NO: 34927 - DNA, 1233 bp, Arabidopsis thaliana
  misc_feature (1)..(1233): Ceres Seq. ID no. 12334372
  misc_feature: MA Experiment ID: 108434 Result: Up-regulated in Transcription
  misc_feature: MA Experiment 108434 PARAMETER Experiment Name: At_Root_Tips_cDNA_P Parameter: Tissue Value: Root Tips
  misc_feature: MA Experiment ID: 108461 Result: Down-regulated in Transcription
  misc_feature: MA Experiment 108461 PARAMETER Experiment Name: At_Germinating_Seeds_cDNA_P Parameter: Age (day) Value: 1 vs. 0
  misc_feature: MA Experiment 108461 PARAMETER Experiment Name: At_Germinating_Seeds_cDNA_P Parameter: Tissue Value: Germinating Seeds
  misc_feature: MA Experiment ID: 108462 Result: Down-regulated in Transcription
  misc_feature: MA Experiment 108462 PARAMETER Experiment Name: At_Germinating_Seeds_cDNA_P Parameter: Age (day) Value: 2 vs. 0
  misc_feature: MA Experiment 108462 PARAMETER Experiment Name: At_Germinating_Seeds_cDNA_P Parameter: Tissue Value: Germinating Seeds
  misc_feature: MA Experiment ID: 108463 Result: Down-regulated in Transcription
  misc_feature: MA Experiment 108463 PARAMETER Experiment Name: At_Germinating_Seeds_cDNA_P Parameter: Age (day) Value: 3 vs. 0
  misc_feature: MA Experiment 108463 PARAMETER Experiment Name: At_Germinating_Seeds_cDNA_P Parameter: Tissue Value: Germinating Seeds
  misc_feature: MA Experiment ID: 108464 Result: Down-regulated in Transcription
  misc_feature: MA Experiment 108464 PARAMETER Experiment Name: At_Germinating_Seeds_cDNA_P Parameter: Age (day) Value: 4 vs. 0
  misc_feature: MA Experiment 108464 PARAMETER Experiment Name: At_Germinating_Seeds_cDNA_P Parameter: Tissue Value: Germinating Seeds
  misc_feature: MA Experiment ID: 108561 Result: Down-regulated in Transcription
  misc_feature: MA Experiment 108561 PARAMETER Experiment Name: At_100uM_ABA_cDNA_P Parameter: Timepoint (hr) Value: 6
  misc_feature: MA Experiment 108561 PARAMETER Experiment Name: At_100uM_ABA_cDNA_P Parameter: Tissue Value: Aerial
  misc_feature: MA Experiment 108561 PARAMETER Experiment Name: At_100uM_ABA_cDNA_P Parameter: Treatment Value: 100uM ABA vs. No Treatment
  misc_feature: MA Experiment ID: 108579 Result: Up-regulated in Transcription
  misc_feature: MA Experiment 108579 PARAMETER Experiment Name: At_4deg_Cold_cDNA_P Parameter: Temperature (deg C) Value: 4 vs. 22
  misc_feature: MA Experiment 108579 PARAMETER Experiment Name: At_4deg_Cold_cDNA_P Parameter: Timepoint (hr) Value: 6
  misc_feature: MA Experiment 108579 PARAMETER Experiment Name: At_4deg_Cold_cDNA_P Parameter: Tissue Value: Aerial
  misc_feature: MA Experiment ID: 108607 Result: Down-regulated in Transcription
  misc_feature: MA Experiment 108607 PARAMETER Experiment Name: At_100uM_ABA_cDNA_P Parameter: Timepoint (hr) Value: 4
  misc_feature: MA Experiment 108607 PARAMETER Experiment Name: At_100uM_ABA_cDNA_P Parameter: Tissue Value: Aerial
  misc_feature: MA Experiment 108607 PARAMETER Experiment Name: At_100uM_ABA_cDNA_P Parameter: Treatment Value: 100uM ABA vs. No Treatment
  misc_feature: MA Experiment ID: 20000093 Result: Down-regulated in Transcription
  misc_feature: MA Experiment 20000093 PARAMETER Experiment Name: At_42deg_Heat_cDNA_P Parameter: Temperature (deg C) Value: 42 vs. 22
  misc_feature: MA Experiment 20000093 PARAMETER Experiment Name: At_42deg_Heat_cDNA_P Parameter: Timepoint (hr) Value: 0.5
  misc_feature: MA Experiment 20000093 PARAMETER Experiment Name: At_42deg_Heat_cDNA_P Parameter: Tissue Value: Aerial
  misc_feature: MA Experiment ID: 20000171 Result: Down-regulated in Transcription
  misc_feature: MA Experiment 20000171 PARAMETER Experiment Name: At_42deg_Heat_P Parameter: Age (day) Value: 14
  misc_feature: MA Experiment 20000171 PARAMETER Experiment Name: At_42deg_Heat_P Parameter: Organism Value: A. thaliana
  misc_feature: MA Experiment 20000171 PARAMETER Experiment Name: At_42deg_Heat_P Parameter: Plant Line Value: WS
  misc_feature: MA Experiment 20000171 PARAMETER Experiment Name: At_42deg_Heat_P Parameter: Temperature (deg C) Value: 42 vs. 22
  misc_feature: MA Experiment 20000171 PARAMETER Experiment Name: At_42deg_Heat_P Parameter: Timepoint (hr) Value: 1
  misc_feature: MA Experiment 20000171 PARAMETER Experiment Name: At_42deg_Heat_P Parameter: Tissue Value: Aerial
  misc_feature: MA Experiment ID: 20000180 Result: Down-regulated in Transcription
  misc_feature: MA Experiment 20000180 PARAMETER Experiment Name: At_Germinating_Seeds_P Parameter: Age (hr) Value: 24 vs. 0
  misc_feature: MA Experiment 20000180 PARAMETER Experiment Name: At_Germinating_Seeds_P Parameter: Tissue Value: Germinating Seeds
  misc_feature: MA Experiment ID: 20000227 Result: Up-regulated in Transcription
  misc_feature: MA Experiment 20000227 PARAMETER Experiment Name: At_Root-Tips-vs-Tops_P Parameter: Tissue Value: Root Tips vs. Root Tops
  misc_feature: MA Experiment ID: 20000234 Result: Down-regulated in Transcription
  misc_feature: MA Experiment 20000234 PARAMETER Experiment Name: At_Siliques_P Parameter: Age (day) Value: 21
  misc_feature: MA Experiment 20000234 PARAMETER Experiment Name: At_Siliques_P Parameter: Organism Value: A. thaliana
  misc_feature: MA Experiment 20000234 PARAMETER Experiment Name: At_Siliques_P Parameter: Plant Line Value: WS
  misc_feature: MA Experiment 20000234 PARAMETER Experiment Name: At_Siliques_P Parameter: Tissue Value: Less Than 5mm Siliques vs. Whole Plant
  misc_feature: MA Experiment ID: 20000235 Result: Down-regulated in Transcription
  misc_feature: MA Experiment 20000235 PARAMETER Experiment Name: At_Siliques_P Parameter: Age (day) Value: 21
  misc_feature: MA Experiment 20000235 PARAMETER Experiment Name: At_Siliques_P Parameter: Organism Value: A. thaliana
  misc_feature: MA Experiment 20000235 PARAMETER Experiment Name: At_Siliques_P Parameter: Plant Line Value: WS
  misc_feature: MA Experiment 20000235 PARAMETER Experiment Name: At_Siliques_P Parameter: Tissue Value: 5-10mm Siliques vs. Whole Plant
  misc_feature: MA Experiment ID: 20000438 Result: Down-regulated in Transcription
  misc_feature: MA Experiment 20000438 PARAMETER Experiment Name: At_Shoots__P Parameter: Age (day) Value: 14
  misc_feature: MA Experiment 20000438 PARAMETER Experiment Name: At_Shoots__P Parameter: Tissue Value: Shoots vs. Whole Plant
  misc_feature: MA Experiment ID: 20000495 Result: Up-regulated in Transcription
  misc_feature: MA Experiment 20000495 PARAMETER Experiment Name: At_Guard_Cells_P Parameter: Harvest Date Value: 8/2/2002
  misc_feature: MA Experiment 20000495 PARAMETER Experiment Name: At_Guard_Cells_P Parameter: Organism Value: A. thaliana
  misc_feature: MA Experiment 20000495 PARAMETER Experiment Name: At_Guard_Cells_P Parameter: Tissue Value: Guard Cells vs. Leaves
  misc_feature: MA Experiment ID: 20000496 Result: Up-regulated in Transcription
  misc_feature: MA Experiment 20000496 PARAMETER Experiment Name: At_Guard_Cells_P Parameter: Harvest Date Value: 7/19/2002
  misc_feature: MA Experiment 20000496 PARAMETER Experiment Name: At_Guard_Cells_P Parameter: Organism Value: Canola
  misc_feature: MA Experiment 20000496 PARAMETER Experiment Name: At_Guard_Cells_P Parameter: Tissue Value: Guard Cells vs. Leaves
  misc_feature: MA Experiment ID: 20000794 Result: Up-regulated in Transcription
  misc_feature: MA Experiment 20000794 PARAMETER Experiment Name: At_Petals_P Parameter: Age (day) Value: 23-25 days
  misc_feature: MA Experiment 20000794 PARAMETER Experiment Name: At_Petals_P Parameter: Plant Line Value: WS
  misc_feature: MA Experiment 20000794 PARAMETER Experiment Name: At_Petals_P Parameter: Tissue Value: Petals vs. Whole plant
  misc_feature: MA Experiment ID: 20001248 Result: Up-regulated in Transcription
  misc_feature: MA Experiment 20001248 PARAMETER Experiment Name: At_Far-red-induction_P Parameter: Age (day) Value: 7
  misc_feature: MA Experiment 20001248 PARAMETER Experiment Name: At_Far-red-induction_P Parameter: Light Value: Far-red vs. White
  misc_feature: MA Experiment 20001248 PARAMETER Experiment Name: At_Far-red-induction_P Parameter: Organism Value: A. thaliana
  misc_feature: MA Experiment 20001248 PARAMETER Experiment Name: At_Far-red-induction_P Parameter: Plant Line Value: Columbia
  misc_feature: MA Experiment 20001248 PARAMETER Experiment Name: At_Far-red-induction_P Parameter: Timepoint (hr) Value: 4
  misc_feature: MA Experiment 20001248 PARAMETER Experiment Name: At_Far-red-induction_P Parameter: Tissue Value: Whole Plant
  misc_feature: MA Experiment ID: 20001451 Result: Up-regulated in Transcription
  misc_feature: MA Experiment 20001451 PARAMETER Experiment Name: At_Far-red-induction_P Parameter: Age (day) Value: 7
  misc_feature: MA Experiment 20001451 PARAMETER Experiment Name: At_Far-red-induction_P Parameter: Light Value: Far-red vs. White
  misc_feature: MA Experiment 20001451 PARAMETER Experiment Name: At_Far-red-induction_P Parameter: Organism Value: A. thaliana
  misc_feature: MA Experiment 20001451 PARAMETER Experiment Name: At_Far-red-induction_P Parameter: Plant Line Value: Columbia
  misc_feature: MA Experiment 20001451 PARAMETER Experiment Name: At_Far-red-induction_P Parameter: Timepoint (hr) Value: 24
  misc_feature: MA Experiment 20001451 PARAMETER Experiment Name: At_Far-red-induction_P Parameter: Tissue Value: Whole Plant
  misc_feature: MA Experiment ID: 20001556 Result: Up-regulated in Transcription
  misc_feature: MA Experiment 20001556 PARAMETER Experiment Name: At_Drought_Soil_Dry_P Parameter: Age (day) Value: 26
  misc_feature: MA Experiment 20001556 PARAMETER Experiment Name: At_Drought_Soil_Dry_P Parameter: Organism Value: A. thaliana
  misc_feature: MA Experiment 20001556 PARAMETER Experiment Name: At_Drought_Soil_Dry_P Parameter: Plant Line Value: WS
  misc_feature: MA Experiment 20001556 PARAMETER Experiment Name: At_Drought_Soil_Dry_P Parameter: Post Timepoint (hr) Value: None
  misc_feature: MA Experiment 20001556 PARAMETER Experiment Name: At_Drought_Soil_Dry_P Parameter: Post-Treatment Value: None
  misc_feature: MA Experiment 20001556 PARAMETER Experiment Name: At_Drought_Soil_Dry_P Parameter: Timepoint (day) Value: 12
  misc_feature: MA Experiment 20001556 PARAMETER Experiment Name: At_Drought_Soil_Dry_P Parameter: Treatment Value: Drought vs. No Drought
acattcctctcttctctctctcttttcccaaaaaccaaaaccttttttccgtaccaaggtcaacaaatggcggcgaaagtaattacatttatggcggttatggtggttactgcctttacggccaacgccaaaatccccggagtttacaccggtggtccttggatcaatgctcacgccaccttctacggtgaagctgacgcttccggcactatgggtggtgcgtgtgggtacgggaatttgtatagccaaggttacggagtgaacacggcggctttaagcactgccttattcaacaatggtttgagttgtggctcttgctttgagcttaagtgtatcaatgatccaggatggtgtcttcctggaaacccatcaattcttatcaccgccactaatttctgccctcctaactttaatcaagctagcgacaatggtggttggtgtaatcctcctcgtgagcactttgatctcgctatgcctatgtttctttccatcgctaagtataaggctggtatcgtccccgtctcttaccgcaggatcccatgtaggaagaagggaggaatcagattcacaatcaatggattcaagtacttcaacttggtgctggtcactaacgtagccggagctggagacgtcattaaggtgagtgtgaaaggatccaacacacaatggttagatctgagccggaactggggacaaaactggcaatccaacgcacttcttgtcggccaatctctttctttccgagtcaaaacctctgatggtcgaagctccacctccaacaacattgctcccagtaactggcaatttggccagacctactccggcaagaacttccgcgtctgatttctagaatatgaaaaagagtcgtgtggcggaagatactaaagcttttttttatatcaaatatatatatttacgtgtctttgatttagtttacgatttggaattggggttttaccatttttcccttattttctcagggaaagtattgggattgcttggtttgcaagttagggtttactttaaagattagggctatattgtttttttgttttttttggtgtgttgtgtcttgtttggtatgtagtcttgtagagaggctgaagcggctgcagaaagaaagggttgggataaagattcatgtagcccgcagctctcttttacgttatgattgtattaaagtatatatatatatatcatgaagaaattaaacatggtttcttcgatttatat

SEQ ID NO: 34928 - protein, 280 aa, Arabidopsis thaliana
  peptide (1)..(280): Ceres Seq. ID no. 12334373
  misc_feature (187)..(264): Pfam Name: Pollen allergen Pfam Description: Pollen allergen
  misc_feature (32)..(280): Homolog of NCBI NO: 13898655 NR Description: expansin [Prunus cerasus]
  misc_feature (21)..(280): Homolog of NCBI NO: 4138914 NR Description: expansin precursor [Lycopersicon esculentum]
  misc_feature (23)..(280): Homolog of NCBI NO: 20502786 NR Description: expansin 12 precursor [Rumex palustris]
  misc_feature (23)..(280): Homolog of NCBI NO: 20502782 NR Description: expansin 10 precursor [Rumex palustris]
  misc_feature (32)..(280): Homolog of NCBI NO: 29466643 NR Description: expansin [Prunus persica]
  misc_feature (23)..(280): Homolog of NCBI NO: 20502784 NR Description: expansin 11 precursor [Rumex palustris]
  misc_feature (23)..(280): Homolog of NCBI NO: 1076531 NR Description: pollen allergen homolog, hypothetical (clone
  misc_feature (24)..(280): Homolog of NCBI NO: 15224330 NR Description: expansin, putative
  misc_feature (23)..(280): Homolog of NCBI NO: 29467509 NR Description: expansin [Pyrus communis]
  misc_feature (23)..(280): Homolog of NCBI NO: 15241741 NR Description: expansin, putative
TFLSSLSLFPKTKTFFPYQGQQMAAKVITFMAVMVVTAFTANAKIPGVYTGGPWINAHATFYGEADASGTMGGACGYGNLYSQGYGVNTAALSTALFNNGLSCGSCFELKCINDPGWCLPGNPSILITATNFCPPNFNQASDNGGWCNPPREHFDLAMPMFLSIAKYKAGIVPVSYRRIPCRKKGGIRFTINGFKYFNLVLVTNVAGAGDVIKVSVKGSNTQWLDLSRNWGQNWQSNALLVGQSLSFRVKTSDGRSSTSNNIAPSNWQFGQTYSGKNFRV

SEQ ID NO: 34929 - protein, 258 aa, Arabidopsis thaliana
  peptide (1)..(258): Ceres Seq. ID no. 12334374
  misc_feature (165)..(242): Pfam Name: Pollen allergen Pfam Description: Pollen allergen
  misc_feature (10)..(258): Homolog of NCBI NO: 13898655 NR Description: expansin [Prunus cerasus]
  misc_feature (1)..(258): Homolog of NCBI NO: 4138914 NR Description: expansin precursor [Lycopersicon esculentum]
  misc_feature (1)..(258): Homolog of NCBI NO: 20502786 NR Description: expansin 12 precursor [Rumex palustris]
  misc_feature (1)..(258): Homolog of NCBI NO: 20502782 NR Description: expansin 10 precursor [Rumex palustris]
  misc_feature (10)..(258): Homolog of NCBI NO: 29466643 NR Description: expansin [Prunus persica]
  misc_feature (1)..(258): Homolog of NCBI NO: 20502784 NR Description: expansin 11 precursor [Rumex palustris]
  misc_feature (1)..(258): Homolog of NCBI NO: 1076531 NR Description: pollen allergen homolog, hypothetical (clone
  misc_feature (2)..(258): Homolog of NCBI NO: 15224330 NR Description: expansin, putative
  misc_feature (1)..(258): Homolog of NCBI NO: 29467509 NR Description: expansin [Pyrus communis]
  misc_feature (1)..(258): Homolog of NCBI NO: 15241741 NR Description: expansin, putative
MAAKVITFMAVMVVTAFTANAKIPGVYTGGPWINAHATFYGEADASGTMGGACGYGNLYSQGYGVNTAALSTALFNNGLSCGSCFELKCINDPGWCLPGNPSILITATNFCPPNFNQASDNGGWCNPPREHFDLAMPMFLSIAKYKAGIVPVSYRRIPCRKKGGIRFTINGFKYFNLVLVTNVAGAGDVIKVSVKGSNTQWLDLSRNWGQNWQSNALLVGQSLSFRVKTSDGRSSTSNNIAPSNWQFGQTYSGKNFRV

SEQ ID NO: 34930 - protein, 250 aa, Arabidopsis thaliana
  peptide (1)..(250): Ceres Seq. ID no. 12334375
  misc_feature (157)..(234): Pfam Name: Pollen allergen Pfam Description: Pollen allergen
  misc_feature (2)..(250): Homolog of NCBI NO: 13898655 NR Description: expansin [Prunus cerasus]
  misc_feature (1)..(250): Homolog of NCBI NO: 4138914 NR Description: expansin precursor [Lycopersicon esculentum]
  misc_feature (1)..(250): Homolog of NCBI NO: 20502786 NR Description: expansin 12 precursor [Rumex palustris]
  misc_feature (1)..(250): Homolog of NCBI NO: 20502782 NR Description: expansin 10 precursor [Rumex palustris]
  misc_feature (2)..(250): Homolog of NCBI NO: 29466643 NR Description: expansin [Prunus persica]
  misc_feature (1)..(250): Homolog of NCBI NO: 20502784 NR Description: expansin 11 precursor [Rumex palustris]
  misc_feature (1)..(250): Homolog of NCBI NO: 1076531 NR Description: pollen allergen homolog, hypothetical (clone
  misc_feature (1)..(250): Homolog of NCBI NO: 15224330 NR Description: expansin, putative
  misc_feature (1)..(250): Homolog of NCBI NO: 29467509 NR Description: expansin [Pyrus communis]
  misc_feature (1)..(250): Homolog of NCBI NO: 15241741 NR Description: expansin, putative
MAVMVVTAFTANAKIPGVYTGGPWINAHATFYGEADASGTMGGACGYGNLYSQGYGVNTAALSTALFNNGLSCGSCFELKCINDPGWCLPGNPSILITATNFCPPNFNQASDNGGWCNPPREHFDLAMPMFLSIAKYKAGIVPVSYRRIPCRKKGGIRFTINGFKYFNLVLVTNVAGAGDVIKVSVKGSNTQWLDLSRNWGQNWQSNALLVGQSLSFRVKTSDGRSSTSNNIAPSNWQFGQTYSGKNFRV

SEQ ID NO: 34931 - DNA, 712 bp, Arabidopsis thaliana
  misc_feature (1)..(712): Ceres Seq. ID no. 12331981
  misc_feature: MA Experiment ID: 108462 Result: Down-regulated in Transcription
  misc_feature: MA Experiment 108462 PARAMETER Experiment Name: At_Germinating_Seeds_cDNA_P Parameter: Age (day) Value: 2 vs. 0
  misc_feature: MA Experiment 108462 PARAMETER Experiment Name: At_Germinating_Seeds_cDNA_P Parameter: Tissue Value: Germinating Seeds
  misc_feature: MA Experiment ID: 20000184 Result: Down-regulated in Transcription
  misc_feature: MA Experiment 20000184 PARAMETER Experiment Name: At_Shoots__P Parameter: Age (day) Value: 7
  misc_feature: MA Experiment 20000184 PARAMETER Experiment Name: At_Shoots__P Parameter: Tissue Value: Shoots vs. Whole Plant
  misc_feature: MA Experiment ID: 20000227 Result: Down-regulated in Transcription
  misc_feature: MA Experiment 20000227 PARAMETER Experiment Name: At_Root-Tips-vs-Tops_P Parameter: Tissue Value: Root Tips vs. Root Tops
atattcatcactttcgttgttaagacggaaaaaaaaaaaacagaggcagaaccaaaaaactttagggttcgatttcgctccttggtaatcaccatgtccggagaagaagaagagaacgccgccgaactcaagatcggagatgagtttttgaaggcaaagtgcttaatgaactgtgaagtctctttgattcttgagcacaagtttgaacagcttcagcaaatctcagaggatcctatgaatcaagtttctcaagtgtttgagaagtccttgcaatatgtgaagcgattcagccgctacaagaatccagatgctgttagacaagttcgagaaatactaagcagacatcaactcactgagtttgagctatgtgttcttggcaatctctgtcctgaaactgttgaagaagcagtggcaatggttccttctcttaagacaaaaggaagagctcatgatgatgaagctattgagaagatgctcaatgatctctcacttgtcaagagattcgagtagtgcagaagattctcaagatctaagattctgaacatttagcaggatgctttacttgccttctagctgatctggagttaattcgccacgtctgaaattataaagctttaatgcctagaatttctggaatgataccttcatgttaaatgaatgtaatttacaacggatgatccaagcttttaatgaaatataccatctctttttc

SEQ ID NO: 34932 - protein, 169 aa, Arabidopsis thaliana
  peptide (1)..(169): Ceres Seq. ID no. 12331982
  misc_feature (50)..(168): Pfam Name: RNA polymerase Rpb4 Pfam Description: RNA polymerase Rpb4
  misc_feature (31)..(124): Homolog of NCBI NO: 28188691 NR Description: unknown protein [Arabidopsis thaliana]
  misc_feature (48)..(167): Homolog of NCBI NO: 24647897 NR Description: CG31237-PA [Drosophila melanogaster]
  misc_feature (62)..(169): Homolog of NCBI NO: 28076931 NR Description: RIKEN cDNA 2610028L19 [Mus musculus]
  misc_feature (37)..(167): Homolog of NCBI NO: 27263229 NR Description: RNA polymerase II accessory factor rpb4
  misc_feature (34)..(169): Homolog of NCBI NO: 7503310 NR Description: hypothetical protein F43E2.1 - Caenorhabditis
  misc_feature (34)..(169): Homolog of NCBI NO: 39582357 NR Description: Hypothetical protein CBG13151 [Caenorhabditis
  misc_feature (34)..(169): Homolog of NCBI NO: 17533967 NR Description: RNA polymerase Rpb4 family member [Caenorhabditis
  misc_feature (33)..(169): Homolog of NCBI NO: 34878674 NR Description: similar to RIKEN cDNA 2610028L19 [Rattus
  misc_feature (33)..(169): Homolog of NCBI NO: 4758574 NR Description: DNA directed RNA polymerase II polypeptide D
  misc_feature (32)..(169): Homolog of NCBI NO: 15242547 NR Description: 15.9 kDa subunit of RNA polymerase II
IFITFVVKTEKKKTEAEPKNFRVRFRSLVITMSGEEEENAAELKIGDEFLKAKCLMNCEVSLILEHKFEQLQQISEDPMNQVSQVFEKSLQYVKRFSRYKNPDAVRQVREILSRHQLTEFELCVLGNLCPETVEEAVAMVPSLKTKGRAHDDEAIEKMLNDLSLVKRFE

SEQ ID NO: 34933 - protein, 138 aa, Arabidopsis thaliana
  peptide (1)..(138): Ceres Seq. ID no. 12331983
  misc_feature (19)..(137): Pfam Name: RNA polymerase Rpb4 Pfam Description: RNA polymerase Rpb4
  misc_feature (1)..(93): Homolog of NCBI NO: 28188691 NR Description: unknown protein [Arabidopsis thaliana]
  misc_feature (17)..(136): Homolog of NCBI NO: 24647897 NR Description: CG31237-PA [Drosophila melanogaster]
  misc_feature (31)..(138): Homolog of NCBI NO: 28076931 NR Description: RIKEN cDNA 2610028L19 [Mus musculus]
  misc_feature (6)..(136): Homolog of NCBI NO: 27263229 NR Description: RNA polymerase II accessory factor rpb4
  misc_feature (3)..(138): Homolog of NCBI NO: 7503310 NR Description: hypothetical protein F43E2.1 - Caenorhabditis
  misc_feature (3)..(138): Homolog of NCBI NO: 39582357 NR Description: Hypothetical protein CBG13151 [Caenorhabditis
  misc_feature (3)..(138): Homolog of NCBI NO: 17533967 NR Description: RNA polymerase Rpb4 family member [Caenorhabditis
  misc_feature (2)..(138): Homolog of NCBI NO: 34878674 NR Description: similar to RIKEN cDNA 2610028L19 [Rattus
  misc_feature (2)..(138): Homolog of NCBI NO: 4758574 NR Description: DNA directed RNA polymerase II polypeptide D
  misc_feature (1)..(138): Homolog of NCBI NO: 15242547 NR Description: 15.9 kDa subunit of RNA polymerase II
MSGEEEENAAELKIGDEFLKAKCLMNCEVSLILEHKFEQLQQISEDPMNQVSQVFEKSLQYVKRFSRYKNPDAVRQVREILSRHQLTEFELCVLGNLCPETVEEAVAMVPSLKTKGRAHDDEAIEKMLNDLSLVKRFE

SEQ ID NO: 34934 - protein, 114 aa, Arabidopsis thaliana
  peptide (1)..(114): Ceres Seq. ID no. 12331984
  misc_feature (1)..(113): Pfam Name: RNA polymerase Rpb4 Pfam Description: RNA polymerase Rpb4
  misc_feature (1)..(69): Homolog of NCBI NO: 28188691 NR Description: unknown protein [Arabidopsis thaliana]
  misc_feature (1)..(112): Homolog of NCBI NO: 24647897 NR Description: CG31237-PA [Drosophila melanogaster]
  misc_feature (7)..(114): Homolog of NCBI NO: 28076931 NR Description: RIKEN cDNA 2610028L19 [Mus musculus]
  misc_feature (1)..(112): Homolog of NCBI NO: 27263229 NR Description: RNA polymerase II accessory factor rpb4
  misc_feature (1)..(114): Homolog of NCBI NO: 7503310 NR Description: hypothetical protein F43E2.1 - Caenorhabditis
  misc_feature (1)..(114): Homolog of NCBI NO: 39582357 NR Description: Hypothetical protein CBG13151 [Caenorhabditis
  misc_feature (1)..(114): Homolog of NCBI NO: 17533967 NR Description: RNA polymerase Rpb4 family member [Caenorhabditis
  misc_feature (1)..(114): Homolog of NCBI NO: 34878674 NR Description: similar to RIKEN cDNA 2610028L19 [Rattus
  misc_feature (1)..(114): Homolog of NCBI NO: 4758574 NR Description: DNA directed RNA polymerase II polypeptide D
  misc_feature (1)..(114): Homolog of NCBI NO: 15242547 NR Description: 15.9 kDa subunit of RNA polymerase II
MNCEVSLILEHKFEQLQQISEDPMNQVSQVFEKSLQYVKRFSRYKNPDAVRQVREILSRHQLTEFELCVLGNLCPETVEEAVAMVPSLKTKGRAHDDEAIEKMLNDLSLVKRFE

SEQ ID NO: 34935 - DNA, 1458 bp, Arabidopsis thaliana
  misc_feature (1)..(1458): Ceres Seq. ID no. 13495876
gtatttttgagttctcagatttcaaacacaaaagtttcgtctccgatttaatctttctacgtcttggtttatgagctcaaaggagaagcccactctcggaggtacgcggattaagacccgcaaaaggaatattgctgctcctctcgaccctgctgctttttctgatgcactagttcagatttatctggataatgctggtgatctggaacttgttgccagaagtttagagtcatctgatcttaatttctcaagatacggtgatattttctttgaggttgttttcattggaggacgtactcaaactggttcagtgaaatctgatgaaggggaacgccacccttactctataatcgactgtgaaccaaagcgtgaagctattttaccatcagttgtatacatacagaaaattttgcggaggaaagccttccttattaagaaccttgagaatgttacacggagattcttacagtcactggagctttttgaggagaatgagaggaagaagcttgcaatattcacagcacttgcattttcacagaagctctcaggattacctgcagagactgtcttccagccattgcttaaggatactcttgttgccaaagggatagttctcaattttgtaacagacttcttcaatgaatatttggttgagaacagtcttgatgacttgatttctattctgaggcgtggcaagatggatgacaaactcttggagttcctgccacccacaaagcggactacagaaagttttgccgagcatttcactaaggcaggattgacagctctggtagagtacaatgaaaggaaaatatttgaggtgaagctgaaggaaatcaaagcggtccttacgagccaagtgacagaggaaataaacgtagatgaagtgactgaaatggtgaagcaacaggtgaaagatgcaaagctgccagagactgaggttgtgcatgtgatctgggatgggataatgaatgctgttcaatggtctgggaaaaaccagcagcagaattcgaatgctgtattacgccaagtgaaaacatgggcaccccttctgaacacgctgtgtagcaccgggaacatggagatggaactgatgtataaagtacagatgcaatgctatgaggatgcaaagctgatgaaagtgtttcctgaggtagtgagatctctgtatgaactggatgtgcttgcggaagacaccattctgcactggtatcgcaaagggaccaaccctaagggcaggcaaacgtttgtgaagggattggaaccgtttgtgaattggctcgaagaggccgaagaagaggagtgagtgagacgctctgcttcttgttttctctttttactctcttctaataaaagaaagacaatattttacttctcttaacgcaaaattcagatgctctacattgttggtgacttggtgtgatctcttttttgaatgaataagtacttctttagttg

SEQ ID NO: 34936 - protein, 411 aa, Arabidopsis thaliana
  peptide (1)..(411): Ceres Seq. ID no. 13495877
  misc_feature (335)..(411): Pfam Name: eIF4-gamma/eIF5/eIF2-epsilon Pfam Description: eIF4-gamma/eIF5/eIF2-epsilon
  misc_feature (4)..(410): Homolog of NCBI NO: 37589071 NR Description: Unknown (protein for MGC:63787) [Danio rerio]
  misc_feature (1)..(410): Homolog of NCBI NO: 17737777 NR Description: elongation initiation factor 5C CG2922-PG
  misc_feature (1)..(410): Homolog of NCBI NO: 11640562 NR Description: MSTP017 [Homo sapiens]
  misc_feature (1)..(410): Homolog of NCBI NO: 19705527 NR Description: Hfb2 protein [Rattus norvegicus]
  misc_feature (1)..(410): Homolog of NCBI NO: 7661744 NR Description: basic leucine zipper and W2 domains 2; HSPC028
  misc_feature (2)..(411): Homolog of NCBI NO: 9759036 NR Description: gb|AAD26879.1~gene_id:T30G6.9~strong similarity
  misc_feature (1)..(411): Homolog of NCBI NO: 18421544 NR Description: expressed protein [Arabidopsis thaliana]
  misc_feature (1)..(411): Homolog of NCBI NO: 21554220 NR Description: unknown [Arabidopsis thaliana]
  misc_feature (2)..(411): Homolog of NCBI NO: 25404540 NR Description: hypothetical protein T23K8.13 [imported] -
  misc_feature (1)..(411): Homolog of NCBI NO: 18408228 NR Description: expressed protein [Arabidopsis thaliana]
MSSKEKPTLGGTRIKTRKRNIAAPLDPAAFSDALVQIYLDNAGDLELVARSLESSDLNFSRYGDIFFEVVFIGGRTQTGSVKSDEGERHPYSIIDCEPKREAILPSVVYIQKILRRKAFLIKNLENVTRRFLQSLELFEENERKKLAIFTALAFSQKLSGLPAETVFQPLLKDTLVAKGIVLNFVTDFFNEYLVENSLDDLISILRRGKMDDKLLEFLPPTKRTTESFAEHFTKAGLTALVEYNERKIFEVKLKEIKAVLTSQVTEEINVDEVTEMVKQQVKDAKLPETEVVHVIWDGIMNAVQWSGKNQQQNSNAVLRQVKTWAPLLNTLCSTGNMEMELMYKVQMQCYEDAKLMKVFPEVVRSLYELDVLAEDTILHWYRKGTNPKGRQTFVKGLEPFVNWLEEAEEEE

SEQ ID NO: 34937 - DNA, 796 bp, Arabidopsis thaliana
  misc_feature (1)..(796): Ceres Seq. ID no. 12333925
  misc_feature: MA Experiment ID: 108434 Result: Up-regulated in Transcription
  misc_feature: MA Experiment 108434 PARAMETER Experiment Name: At_Root_Tips_cDNA_P Parameter: Tissue Value: Root Tips
  misc_feature: MA Experiment ID: 108461 Result: Down-regulated in Transcription
  misc_feature: MA Experiment 108461 PARAMETER Experiment Name: At_Germinating_Seeds_cDNA_P Parameter: Age (day) Value: 1 vs. 0
  misc_feature: MA Experiment 108461 PARAMETER Experiment Name: At_Germinating_Seeds_cDNA_P Parameter: Tissue Value: Germinating Seeds
  misc_feature: MA Experiment ID: 108462 Result: Down-regulated in Transcription
  misc_feature: MA Experiment 108462 PARAMETER Experiment Name: At_Germinating_Seeds_cDNA_P Parameter: Age (day) Value: 2 vs. 0
  misc_feature: MA Experiment 108462 PARAMETER Experiment Name: At_Germinating_Seeds_cDNA_P Parameter: Tissue Value: Germinating Seeds
  misc_feature: MA Experiment ID: 108463 Result: Down-regulated in Transcription
  misc_feature: MA Experiment 108463 PARAMETER Experiment Name: At_Germinating_Seeds_cDNA_P Parameter: Age (day) Value: 3 vs. 0
  misc_feature: MA Experiment 108463 PARAMETER Experiment Name: At_Germinating_Seeds_cDNA_P Parameter: Tissue Value: Germinating Seeds
  misc_feature: MA Experiment ID: 108464 Result: Down-regulated in Transcription
  misc_feature: MA Experiment 108464 PARAMETER Experiment Name: At_Germinating_Seeds_cDNA_P Parameter: Age (day) Value: 4 vs. 0
  misc_feature: MA Experiment 108464 PARAMETER Experiment Name: At_Germinating_Seeds_cDNA_P Parameter: Tissue Value: Germinating Seeds
  misc_feature: MA Experiment ID: 108488 Result: Up-regulated in Transcription
  misc_feature: MA Experiment ID: 108489 Result: Up-regulated in Transcription
  misc_feature: MA Experiment ID: 108572 Result: Down-regulated in Transcription
  misc_feature: MA Experiment 108572 PARAMETER Experiment Name: At_Drought_cDNA_P Parameter: Timepoint (hr) Value: 1
  misc_feature: MA Experiment 108572 PARAMETER Experiment Name: At_Drought_cDNA_P Parameter: Tissue Value: Aerial
  misc_feature: MA Experiment 108572 PARAMETER Experiment Name: At_Drought_cDNA_P Parameter: Treatment Value: Drought vs. No Drought
  misc_feature: MA Experiment ID: 108573 Result: Down-regulated in Transcription
  misc_feature: MA Experiment 108573 PARAMETER Experiment Name: At_Drought_cDNA_P Parameter: Timepoint (hr) Value: 6
  misc_feature: MA Experiment 108573 PARAMETER Experiment Name: At_Drought_cDNA_P Parameter: Tissue Value: Aerial
  misc_feature: MA Experiment 108573 PARAMETER Experiment Name: At_Drought_cDNA_P Parameter: Treatment Value: Drought vs. No Drought
  misc_feature: MA Experiment ID: 108595 Result: Down-regulated in Transcription
  misc_feature: MA Experiment 108595 PARAMETER Experiment Name: At_Ler-pi_Ovule_cDNA_P Parameter: Plant Line Value: null
  misc_feature: MA Experiment ID: 108609 Result: Down-regulated in Transcription
  misc_feature: MA Experiment 108609 PARAMETER Experiment Name: At_100uM_ABA_cDNA_P Parameter: Timepoint (hr) Value: 24
  misc_feature: MA Experiment 108609 PARAMETER Experiment Name: At_100uM_ABA_cDNA_P Parameter: Tissue Value: Aerial
  misc_feature: MA Experiment 108609 PARAMETER Experiment Name: At_100uM_ABA_cDNA_P Parameter: Treatment Value: 100uM ABA vs. No Treatment
  misc_feature: MA Experiment ID: 20000184 Result: Up-regulated in Transcription
  misc_feature: MA Experiment 20000184 PARAMETER Experiment Name: At_Shoots__P Parameter: Age (day) Value: 7
  misc_feature: MA Experiment 20000184 PARAMETER Experiment Name: At_Shoots__P Parameter: Tissue Value: Shoots vs. Whole Plant
  misc_feature: MA Experiment ID: 20000224 Result: Down-regulated in Transcription
  misc_feature: MA Experiment ID: 20000437 Result: Down-regulated in Transcription
  misc_feature: MA Experiment 20000437 PARAMETER Experiment Name: At_Drought_P Parameter: Age (day) Value: 8
  misc_feature: MA Experiment 20000437 PARAMETER Experiment Name: At_Drought_P Parameter: Organism Value: A. thaliana
  misc_feature: MA Experiment 20000437 PARAMETER Experiment Name: At_Drought_P Parameter: Plant Line Value: WS
  misc_feature: MA Experiment 20000437 PARAMETER Experiment Name: At_Drought_P Parameter: Timepoint (hr) Value: 24
  misc_feature: MA Experiment 20000437 PARAMETER Experiment Name: At_Drought_P Parameter: Tissue Value: Whole Plant
  misc_feature: MA Experiment 20000437 PARAMETER Experiment Name: At_Drought_P Parameter: Treatment Value: Drought vs. No Drought
  misc_feature: MA Experiment ID: 20000452 Result: Down-regulated in Transcription
  misc_feature: MA Experiment 20000452 PARAMETER Experiment Name: At_CS6879_Shoots-Roots_P Parameter: Age (day) Value: 14
  misc_feature: MA Experiment 20000452 PARAMETER Experiment Name: At_CS6879_Shoots-Roots_P Parameter: Organism Value: A. thaliana
  misc_feature: MA Experiment 20000452 PARAMETER Experiment Name: At_CS6879_Shoots-Roots_P Parameter: Plant Line Value: CS6879 vs. WS
  misc_feature: MA Experiment 20000452 PARAMETER Experiment Name: At_CS6879_Shoots-Roots_P Parameter: Tissue Value: Shoots
  misc_feature: MA Experiment ID: 20000453 Result: Down-regulated in Transcription
  misc_feature: MA Experiment 20000453 PARAMETER Experiment Name: At_100uM_ABA_P Parameter: Age (day) Value: 15
  misc_feature: MA Experiment 20000453 PARAMETER Experiment Name: At_100uM_ABA_P Parameter: Organism Value: A. thaliana
  misc_feature: MA Experiment 20000453 PARAMETER Experiment Name: At_100uM_ABA_P Parameter: Plant Line Value: WS
  misc_feature: MA Experiment 20000453 PARAMETER Experiment Name: At_100uM_ABA_P Parameter: Timepoint (hr) Value: 24
  misc_feature: MA Experiment 20000453 PARAMETER Experiment Name: At_100uM_ABA_P Parameter: Tissue Value: Aerial
  misc_feature: MA Experiment 20000453 PARAMETER Experiment Name: At_100uM_ABA_P Parameter: Treatment Value: 100uM ABA vs. No Treatment
  misc_feature: MA Experiment ID: 20000456 Result: Up-regulated in Transcription
  misc_feature: MA Experiment 20000456 PARAMETER Experiment Name: At_100uM_BA_P Parameter: Age (day) Value: 14
  misc_feature: MA Experiment 20000456 PARAMETER Experiment Name: At_100uM_BA_P Parameter: Organism Value: A. thaliana
  misc_feature: MA Experiment 20000456 PARAMETER Experiment Name: At_100uM_BA_P Parameter: Plant Line Value: WS
  misc_feature: MA Experiment 20000456 PARAMETER Experiment Name: At_100uM_BA_P Parameter: Timepoint (hr) Value: 6
  misc_feature: MA Experiment 20000456 PARAMETER Experiment Name: At_100uM_BA_P Parameter: Tissue Value: Aerial
  misc_feature: MA Experiment 20000456 PARAMETER Experiment Name: At_100uM_BA_P Parameter: Treatment Value: 100uM BA vs. No Treatment
  misc_feature: MA Experiment ID: 20000794 Result: Down-regulated in Transcription
  misc_feature: MA Experiment 20000794 PARAMETER Experiment Name: At_Petals_P Parameter: Age (day) Value: 23-25 days
  misc_feature: MA Experiment 20000794 PARAMETER Experiment Name: At_Petals_P Parameter: Plant Line Value: WS
  misc_feature: MA Experiment 20000794 PARAMETER Experiment Name: At_Petals_P Parameter: Tissue Value: Petals vs. Whole plant
  misc_feature: MA Experiment ID: 20001451 Result: Down-regulated in Transcription
  misc_feature: MA Experiment 20001451 PARAMETER Experiment Name: At_Far-red-induction_P Parameter: Age (day) Value: 7
  misc_feature: MA Experiment 20001451 PARAMETER Experiment Name: At_Far-red-induction_P Parameter: Light Value: Far-red vs. White
  misc_feature: MA Experiment 20001451 PARAMETER Experiment Name: At_Far-red-induction_P Parameter: Organism Value: A. thaliana
  misc_feature: MA Experiment 20001451 PARAMETER Experiment Name: At_Far-red-induction_P Parameter: Plant Line Value: Columbia
  misc_feature: MA Experiment 20001451 PARAMETER Experiment Name: At_Far-red-induction_P Parameter: Timepoint (hr) Value: 24
  misc_feature: MA Experiment 20001451 PARAMETER Experiment Name: At_Far-red-induction_P Parameter: Tissue Value: Whole Plant
  misc_feature: MA Experiment ID: 20001557 Result: Up-regulated in Transcription
  misc_feature: MA Experiment 20001557 PARAMETER Experiment Name: At_Drought_Soil_Dry_P Parameter: Age (day) Value: 27
  misc_feature: MA Experiment 20001557 PARAMETER Experiment Name: At_Drought_Soil_Dry_P Parameter: Organism Value: A. thaliana
  misc_feature: MA Experiment 20001557 PARAMETER Experiment Name: At_Drought_Soil_Dry_P Parameter: Plant Line Value: WS
  misc_feature: MA Experiment 20001557 PARAMETER Experiment Name: At_Drought_Soil_Dry_P Parameter: Post Timepoint (hr) Value: 3
  misc_feature: MA Experiment 20001557 PARAMETER Experiment Name: At_Drought_Soil_Dry_P Parameter: Post-Treatment Value: Re-Water vs. No Drought
  misc_feature: MA Experiment 20001557 PARAMETER Experiment Name: At_Drought_Soil_Dry_P Parameter: Timepoint (day) Value: 13
  misc_feature: MA Experiment 20001557 PARAMETER Experiment Name: At_Drought_Soil_Dry_P Parameter: Treatment Value: Drought vs. No Drought
  misc_feature: MA Experiment ID: 20001558 Result: Up-regulated in Transcription
  misc_feature: MA Experiment 20001558 PARAMETER Experiment Name: At_Drought_Soil_Dry_P Parameter: Age (day) Value: 27
  misc_feature: MA Experiment 20001558 PARAMETER Experiment Name: At_Drought_Soil_Dry_P Parameter: Organism Value: A. thaliana
  misc_feature: MA Experiment 20001558 PARAMETER Experiment Name: At_Drought_Soil_Dry_P Parameter: Plant Line Value: WS
  misc_feature: MA Experiment 20001558 PARAMETER Experiment Name: At_Drought_Soil_Dry_P Parameter: Post Timepoint (hr) Value: 6
  misc_feature: MA Experiment 20001558 PARAMETER Experiment Name: At_Drought_Soil_Dry_P Parameter: Post-Treatment Value: Re-Water vs. No Drought
  misc_feature: MA Experiment 20001558 PARAMETER Experiment Name: At_Drought_Soil_Dry_P Parameter: Timepoint (day) Value: 13
  misc_feature: MA Experiment 20001558 PARAMETER Experiment Name: At_Drought_Soil_Dry_P Parameter: Treatment Value: Drought vs. No Drought
  misc_feature: MA Experiment ID: 20001560 Result: Up-regulated in Transcription
  misc_feature: MA Experiment 20001560 PARAMETER Experiment Name: At_Drought_Soil_Dry_P Parameter: Age (day) Value: 28
  misc_feature: MA Experiment 20001560 PARAMETER Experiment Name: At_Drought_Soil_Dry_P Parameter: Organism Value: A. thaliana
  misc_feature: MA Experiment 20001560 PARAMETER Experiment Name: At_Drought_Soil_Dry_P Parameter: Plant Line Value: WS
  misc_feature: MA Experiment 20001560 PARAMETER Experiment Name: At_Drought_Soil_Dry_P Parameter: Post Timepoint (hr) Value: None
  misc_feature: MA Experiment 20001560 PARAMETER Experiment Name: At_Drought_Soil_Dry_P Parameter: Post-Treatment Value: None
  misc_feature: MA Experiment 20001560 PARAMETER Experiment Name: At_Drought_Soil_Dry_P Parameter: Timepoint (day) Value: 14
  misc_feature: MA Experiment 20001560 PARAMETER Experiment Name: At_Drought_Soil_Dry_P Parameter: Treatment Value: Drought vs. No Drought
  misc_feature: MA Experiment ID: 20001757 Result: Up-regulated in Transcription
  misc_feature: MA Experiment 20001757 PARAMETER Experiment Name: At_50mM_NH4NO3_L-to-H_P Parameter: Timepoint (hr) Value: 6
  misc_feature: MA Experiment 20001757 PARAMETER Experiment Name: At_50mM_NH4NO3_L-to-H_P Parameter: Tissue Value: Leaf
  misc_feature: MA Experiment 20001757 PARAMETER Experiment Name: At_50mM_NH4NO3_L-to-H_P Parameter: Treatment Value: 50mM NH4NO3 vs 100mM Mannitol
  misc_feature: MA Experiment ID: 20001911 Result: Down-regulated in Transcription
  misc_feature: MA Experiment 20001911 PARAMETER Experiment Name: At_Drought_Reproduction_P Parameter: Age (day) Value: 40
  misc_feature: MA Experiment 20001911 PARAMETER Experiment Name: At_Drought_Reproduction_P Parameter: Organism Value: A. thaliana
  misc_feature: MA Experiment 20001911 PARAMETER Experiment Name: At_Drought_Reproduction_P Parameter: Plant Line Value: WS
  misc_feature: MA Experiment 20001911 PARAMETER Experiment Name: At_Drought_Reproduction_P Parameter: Timepoint (day) Value: 10
  misc_feature: MA Experiment 20001911 PARAMETER Experiment Name: At_Drought_Reproduction_P Parameter: Tissue Value: Flowers
  misc_feature: MA Experiment 20001911 PARAMETER Experiment Name: At_Drought_Reproduction_P Parameter: Treatment Value: Drought vs. No Drought
acccttaaactccgttaccctaaacctcaagccgtcgtctccaaagttccccctcagagacgaaaaaatgaagaccattttgtcctcggagactatggacatccccgacggcgtcgccattaaggtaaacgccaaggtgattgaggtcgaaggtccacgaggtaaactcactcgtgacttcaagcatctgaatctcgatttccagttgattaaagaccaagtcactggaaaacgtcagcttaagattgattcttggtttggttctcgtaagacaagtgcttcgattagaactgctttaagccatgttgataatctcattgctggtgttactcaaggttttctttatagaatgagatttgtgtatgctcattttcctatcaatgcttctattgatggtaacaataagagtattgagattcgtaacttccttggtgagaagaaggtgaggaaggttgagatgttggatggtgttaagattgttcgatctgagaaggttaaggatgagattattcttgagggaaatgatattgagcttgtttcacggtcttgtgctttgatcaatcagaaatgtcatgtgaagaagaaggatatcaggaagtttcttgatggtatctatgtgagcgagaaaggcaagatcgcagtcgaggaatgaagttcgctattgaaagttctatattagattttatatggtgaagcagtgatattatcgtagctttttgttttacatctttcttatggatttgtagttttgtttttccttttgaatcattgatgaatgcaaattcattatccgttc

SEQ ID NO: 34938 - protein, 216 aa, Arabidopsis thaliana
  peptide (1)..(216): Ceres Seq. ID no. 12333926
  misc_feature (124)..(203): Pfam Name: Ribosomal protein L6 Pfam Description: Ribosomal protein L6
  misc_feature (23)..(212): Homolog of NCBI NO: 37779100 NR Description: ribosomal protein L9 [Pagrus major]
  misc_feature (55)..(188): Homolog of NCBI NO: 12322579 NR Description: ribosomal protein L9, 5' partial [Arabidopsis
  misc_feature (23)..(212): Homolog of NCBI NO: 6174959 NR Description: 60S RIBOSOMAL PROTEIN L9
  misc_feature (23)..(212): Homolog of NCBI NO: 33087067 NR Description: ribosomal L9-like protein [Oryza sativa (japonica
  misc_feature (23)..(216): Homolog of NCBI NO: 2129720 NR Description: ribosomal protein L9, cytosolic - Arabidopsis
  misc_feature (23)..(216): Homolog of NCBI NO: 6015604 NR Description: ribosomal protein L9 [Pisum sativum]
  misc_feature (23)..(216): Homolog of NCBI NO: 266945 NR Description: 60S ribosomal protein L9 (Gibberellin-regulated
  misc_feature (23)..(216): Homolog of NCBI NO: 21554945 NR Description: ribosomal protein L9, putative [Arabidopsis
  misc_feature (23)..(216): Homolog of NCBI NO: 18398753 NR Description: ribosomal protein L9, putative
  misc_feature (23)..(216): Homolog of NCBI NO: 15235114 NR Description: putative ribosomal protein L9, cytosolic
PLNSVTLNLKPSSPKFPLRDEKMKTILSSETMDIPDGVAIKVNAKVIEVEGPRGKLTRDFKHLNLDFQLIKDQVTGKRQLKIDSWFGSRKTSASIRTALSHVDNLIAGVTQGFLYRMRFVYAHFPINASIDGNNKSIEIRNFLGEKKVRKVEMLDGVKIVRSEKVKDEIILEGNDIELVSRSCALINQKCHVKKKDIRKFLDGIYVSEKGKIAVEE

SEQ ID NO: 34939 - protein, 194 aa, Arabidopsis thaliana
  peptide (1)..(194): Ceres Seq. ID no. 12333927
  misc_feature (102)..(181): Pfam Name: Ribosomal protein L6 Pfam Description: Ribosomal protein L6
  misc_feature (1)..(190): Homolog of NCBI NO: 37779100 NR Description: ribosomal protein L9 [Pagrus major]
  misc_feature (33)..(166): Homolog of NCBI NO: 12322579 NR Description: ribosomal protein L9, 5' partial [Arabidopsis
  misc_feature (1)..(190): Homolog of NCBI NO: 6174959 NR Description: 60S RIBOSOMAL PROTEIN L9
  misc_feature (1)..(190): Homolog of NCBI NO: 33087067 NR Description: ribosomal L9-like protein [Oryza sativa (japonica
  misc_feature (1)..(194): Homolog of NCBI NO: 2129720 NR Description: ribosomal protein L9, cytosolic - Arabidopsis
  misc_feature (1)..(194): Homolog of NCBI NO: 6015604 NR Description: ribosomal protein L9 [Pisum sativum]
  misc_feature (1)..(194): Homolog of NCBI NO: 266945 NR Description: 60S ribosomal protein L9 (Gibberellin-regulated
  misc_feature (1)..(194): Homolog of NCBI NO: 21554945 NR Description: ribosomal protein L9, putative [Arabidopsis
  misc_feature (1)..(194): Homolog of NCBI NO: 18398753 NR Description: ribosomal protein L9, putative
  misc_feature (1)..(194): Homolog of NCBI NO: 15235114 NR Description: putative ribosomal protein L9, cytosolic
MKTILSSETMDIPDGVAIKVNAKVIEVEGPRGKLTRDFKHLNLDFQLIKDQVTGKRQLKIDSWFGSRKTSASIRTALSHVDNLIAGVTQGFLYRMRFVYAHFPINASIDGNNKSIEIRNFLGEKKVRKVEMLDGVKIVRSEKVKDEIILEGNDIELVSRSCALINQKCHVKKKDIRKFLDGIYVSEKGKIAVEE

SEQ ID NO: 34940 - protein, 185 aa, Arabidopsis thaliana
  peptide (1)..(185): Ceres Seq. ID no. 12333928
  misc_feature (93)..(172): Pfam Name: Ribosomal protein L6 Pfam Description: Ribosomal protein L6
  misc_feature (1)..(181): Homolog of NCBI NO: 37779100 NR Description: ribosomal protein L9 [Pagrus major]
  misc_feature (24)..(157): Homolog of NCBI NO: 12322579 NR Description: ribosomal protein L9, 5' partial [Arabidopsis
  misc_feature (1)..(181): Homolog of NCBI NO: 6174959 NR Description: 60S RIBOSOMAL PROTEIN L9
  misc_feature (1)..(181): Homolog of NCBI NO: 33087067 NR Description: ribosomal L9-like protein [Oryza sativa (japonica
  misc_feature (1)..(185): Homolog of NCBI NO: 2129720 NR Description: ribosomal protein L9, cytosolic - Arabidopsis
  misc_feature (1)..(185): Homolog of NCBI NO: 6015604 NR Description: ribosomal protein L9 [Pisum sativum]
  misc_feature (1)..(185): Homolog of NCBI NO: 266945 NR Description: 60S ribosomal protein L9 (Gibberellin-regulated
  misc_feature (1)..(185): Homolog of NCBI NO: 21554945 NR Description: ribosomal protein L9, putative [Arabidopsis
  misc_feature (1)..(185): Homolog of NCBI NO: 18398753 NR Description: ribosomal protein L9, putative
  misc_feature (1)..(185): Homolog of NCBI NO: 15235114 NR Description: putative ribosomal protein L9, cytosolic
MDIPDGVAIKVNAKVIEVEGPRGKLTRDFKHLNLDFQLIKDQVTGKRQLKIDSWFGSRKTSASIRTALSHVDNLIAGVTQGFLYRMRFVYAHFPINASIDGNNKSIEIRNFLGEKKVRKVEMLDGVKIVRSEKVKDEIILEGNDIELVSRSCALINQKCHVKKKDIRKFLDGIYVSEKGKIAVEE

SEQ ID NO: 34941 - DNA, 1010 bp, Arabidopsis thaliana
  misc_feature (1)..(1010): Ceres Seq. ID no. 13509148
  misc_feature: MA Experiment ID: 20000180 Result: Up-regulated in Transcription
  misc_feature: MA Experiment 20000180 PARAMETER Experiment Name: At_Germinating_Seeds_P Parameter: Age (hr) Value: 24 vs. 0
  misc_feature: MA Experiment 20000180 PARAMETER Experiment Name: At_Germinating_Seeds_P Parameter: Tissue Value: Germinating Seeds
  misc_feature: MA Experiment ID: 20000182 Result: Up-regulated in Transcription
  misc_feature: MA Experiment 20000182 PARAMETER Experiment Name: At_2mM_SA_P Parameter: Age (day) Value: 14
  misc_feature: MA Experiment 20000182 PARAMETER Experiment Name: At_2mM_SA_P Parameter: Organism Value: A. thaliana
  misc_feature: MA Experiment 20000182 PARAMETER Experiment Name: At_2mM_SA_P Parameter: Plant Line Value: WS
  misc_feature: MA Experiment 20000182 PARAMETER Experiment Name: At_2mM_SA_P Parameter: Timepoint (hr) Value: 6
  misc_feature: MA Experiment 20000182 PARAMETER Experiment Name: At_2mM_SA_P Parameter: Tissue Value: Aerial
  misc_feature: MA Experiment 20000182 PARAMETER Experiment Name: At_2mM_SA_P Parameter: Treatment Value: 2mM SA vs. No Treatment
  misc_feature: MA Experiment ID: 20000185 Result: Up-regulated in Transcription
  misc_feature: MA Experiment 20000185 PARAMETER Experiment Name: At_Roots__P Parameter: Age (day) Value: 7 vs. 21
  misc_feature: MA Experiment 20000185 PARAMETER Experiment Name: At_Roots__P Parameter: Organism Value: A. thaliana
  misc_feature: MA Experiment 20000185 PARAMETER Experiment Name: At_Roots__P Parameter: Tissue Value: Roots vs. Whole Plant
  misc_feature: MA Experiment ID: 20000227 Result: Down-regulated in Transcription
  misc_feature: MA Experiment 20000227 PARAMETER Experiment Name: At_Root-Tips-vs-Tops_P Parameter: Tissue Value: Root Tips vs. Root Tops
  misc_feature: MA Experiment ID: 20000436 Result: Up-regulated in Transcription
  misc_feature: MA Experiment 20000436 PARAMETER Experiment Name: At_Drought_P Parameter: Age (day) Value: 7
  misc_feature: MA Experiment 20000436 PARAMETER Experiment Name: At_Drought_P Parameter: Organism Value: A. thaliana
  misc_feature: MA Experiment 20000436 PARAMETER Experiment Name: At_Drought_P Parameter: Plant Line Value: WS
  misc_feature: MA Experiment 20000436 PARAMETER Experiment Name: At_Drought_P Parameter: Timepoint (hr) Value: 12
  misc_feature: MA Experiment 20000436 PARAMETER Experiment Name: At_Drought_P Parameter: Tissue Value: Whole Plant
  misc_feature: MA Experiment 20000436 PARAMETER Experiment Name: At_Drought_P Parameter: Treatment Value: Drought vs. No Drought
  misc_feature: MA Experiment ID: 20000437 Result: Up-regulated in Transcription
  misc_feature: MA Experiment 20000437 PARAMETER Experiment Name: At_Drought_P Parameter: Age (day) Value: 8
  misc_feature: MA Experiment 20000437 PARAMETER Experiment Name: At_Drought_P Parameter: Organism Value: A. thaliana
  misc_feature: MA Experiment 20000437 PARAMETER Experiment Name: At_Drought_P Parameter: Plant Line Value: WS
  misc_feature: MA Experiment 20000437 PARAMETER Experiment Name: At_Drought_P Parameter: Timepoint (hr) Value: 24
  misc_feature: MA Experiment 20000437 PARAMETER Experiment Name: At_Drought_P Parameter: Tissue Value: Whole Plant
  misc_feature: MA Experiment 20000437 PARAMETER Experiment Name: At_Drought_P Parameter: Treatment Value: Drought vs. No Drought
  misc_feature: MA Experiment ID: 20000439 Result: Up-regulated in Transcription
  misc_feature: MA Experiment 20000439 PARAMETER Experiment Name: At_Roots__P Parameter: Age (day) Value: 14 vs. 21
  misc_feature: MA Experiment 20000439 PARAMETER Experiment Name: At_Roots__P Parameter: Organism Value: A. thaliana
  misc_feature: MA Experiment 20000439 PARAMETER Experiment Name: At_Roots__P Parameter: Tissue Value: Roots vs. Whole Plant
  misc_feature: MA Experiment ID: 20000496 Result: Down-regulated in Transcription
  misc_feature: MA Experiment 20000496 PARAMETER Experiment Name: At_Guard_Cells_P Parameter: Harvest Date Value: 7/19/2002
  misc_feature: MA Experiment 20000496 PARAMETER Experiment Name: At_Guard_Cells_P Parameter: Organism Value: Canola
  misc_feature: MA Experiment 20000496 PARAMETER Experiment Name: At_Guard_Cells_P Parameter: Tissue Value: Guard Cells vs. Leaves
  misc_feature: MA Experiment ID: 20000794 Result: Down-regulated in Transcription
  misc_feature: MA Experiment 20000794 PARAMETER Experiment Name: At_Petals_P Parameter: Age (day) Value: 23-25 days
  misc_feature: MA Experiment 20000794 PARAMETER Experiment Name: At_Petals_P Parameter: Plant Line Value: WS
  misc_feature: MA Experiment 20000794 PARAMETER Experiment Name: At_Petals_P Parameter: Tissue Value: Petals vs. Whole plant
  misc_feature: MA Experiment ID: 20001905 Result: Up-regulated in Transcription
  misc_feature: MA Experiment 20001905 PARAMETER Experiment Name: At_Drought_Reproduction_P Parameter: Age (day) Value: 40
  misc_feature: MA Experiment 20001905 PARAMETER Experiment Name: At_Drought_Reproduction_P Parameter: Organism Value: A. thaliana
  misc_feature: MA Experiment 20001905 PARAMETER Experiment Name: At_Drought_Reproduction_P Parameter: Plant Line Value: WS
  misc_feature: MA Experiment 20001905 PARAMETER Experiment Name: At_Drought_Reproduction_P Parameter: Timepoint (day) Value: 10
  misc_feature: MA Experiment 20001905 PARAMETER Experiment Name: At_Drought_Reproduction_P Parameter: Tissue Value: Rosettes
  misc_feature: MA Experiment 20001905 PARAMETER Experiment Name: At_Drought_Reproduction_P Parameter: Treatment Value: Drought vs. No Drought
ctctttctctctcttccttcgtttctctctcgatttgaagagagaaaattcgttcgatttcgttttctcttcttcttttggattttcccggaaaattttggaatcggtgagtctctatcgattactggtcaaccatgaatatctttagatttgctggcgatatgagtcacttgatcagtgtcttaatccttcttctcaaaatctacgcgacgaaatcttgcgctggaatctctctcaagactcaagagctctatgcgcttgtgttcttgactcggtacttggatctgtttacggattatgtatctctgtacaacagcatcatgaagattgtcttcattgccagctctttggctatcgtttggtgtatgcgtaggcatccacttgtgaggaggtcatacgataaggacctggacacatttcgtcatcagtatgttgtgttagcgtgttttgtactgggacttatcctgaatgaaaaattcacagttcaagaggtgttctgggcgttttctatctacttagaggcagttgctatccttccccagttggttctgctacaaagaagtgggaatgtcgacaatttgactgggcaatatgttgtctttctcggggcgtatcggggactctatattatcaactggatctatcgctatttcacagaagatcatttcactagatggattgcttgtgtgtctggtcttgtccaaacagctctctatgcggatttcttctactactactacataagctggaaaaccaacaccaaacttaagcttccggcttgaaaagaacccgaatttttttgcaatagtatcaaaatccaggaagttacagcaatggtgacattagaaaagaaagacatggttaacatttgggtcctccctctttctaacaatgagttgaaaattgaatgatgcaggattgttgtttaaaatgtgttttttttttagtctttaatgcacattgtaactttcccgacgattttagacattgagaagaggcatcgttttatc

SEQ ID NO: 34942 - protein, 215 aa, Arabidopsis thaliana
  peptide (1)..(215): Ceres Seq. ID no. 13509149
  misc_feature (1)..(205): Pfam Name: ER lumen protein retaining receptor Pfam Description: ER lumen protein retaining receptor
  misc_feature (1)..(215): Homolog of NCBI NO: 34856097 NR Description: similar to putative KDEL receptor [Rattus
  misc_feature (1)..(215): Homolog of NCBI NO: 462021 NR Description: ER LUMEN PROTEIN RETAINING RECEPTOR 1 (KDEL
  misc_feature (1)..(214): Homolog of NCBI NO: 22656361 NR Description: endoplasmic reticulum retention receptor
  misc_feature (1)..(215): Homolog of NCBI NO: 17137442 NR Description: KDEL receptor CG5183-PA [Drosophila melanogaster]
  misc_feature (1)..(215): Homolog of NCBI NO: 14285310 NR Description: ERD2 protein [Scherffelia dubia]
  misc_feature (1)..(215): Homolog of NCBI NO: 9293986 NR Description: ER lumen protein-retaining receptor-like protein
  misc_feature (1)..(215): Homolog of NCBI NO: 18404390 NR Description: ER lumen retaining receptor (HDEL receptor)
  misc_feature (1)..(215): Homolog of NCBI NO: 21592401 NR Description: ER lumen retaining receptor (HDEL receptor),
  misc_feature (1)..(215): Homolog of NCBI NO: 6685428 NR Description: ER lumen protein retaining receptor (HDEL
  misc_feature (1)..(215): Homolog of NCBI NO: 18397049 NR Description: ER lumen protein retaining receptor [Arabidopsis
MNIFRFAGDMSHLISVLILLLKIYATKSCAGISLKTQELYALVFLTRYLDLFTDYVSLYNSIMKIVFIASSLAIVWCMRRHPLVRRSYDKDLDTFRHQYVVLACFVLGLILNEKFTVQEVFWAFSIYLEAVAILPQLVLLQRSGNVDNLTGQYVVFLGAYRGLYIINWIYRYFTEDHFTRWIACVSGLVQTALYADFFYYYYISWKTNTKLKLPA

SEQ ID NO: 34943 - protein, 206 aa, Arabidopsis thaliana
  peptide (1)..(206): Ceres Seq. ID no. 13509150
  misc_feature (1)..(196): Pfam Name: ER lumen protein retaining receptor Pfam Description: ER lumen protein retaining receptor
  misc_feature (1)..(206): Homolog of NCBI NO: 34856097 NR Description: similar to putative KDEL receptor [Rattus
  misc_feature (1)..(206): Homolog of NCBI NO: 462021 NR Description: ER LUMEN PROTEIN RETAINING RECEPTOR 1 (KDEL
  misc_feature (1)..(205): Homolog of NCBI NO: 22656361 NR Description: endoplasmic reticulum retention receptor
  misc_feature (1)..(206): Homolog of NCBI NO: 17137442 NR Description: KDEL receptor CG5183-PA [Drosophila melanogaster]
  misc_feature (1)..(206): Homolog of NCBI NO: 14285310 NR Description: ERD2 protein [Scherffelia dubia]
  misc_feature (1)..(206): Homolog of NCBI NO: 9293986 NR Description: ER lumen protein-retaining receptor-like protein
  misc_feature (1)..(206): Homolog of NCBI NO: 18404390 NR Description: ER lumen retaining receptor (HDEL receptor)
  misc_feature (1)..(206): Homolog of NCBI NO: 21592401 NR Description: ER lumen retaining receptor (HDEL receptor),
  misc_feature (1)..(206): Homolog of NCBI NO: 6685428 NR Description: ER lumen protein retaining receptor (HDEL
  misc_feature (1)..(206): Homolog of NCBI NO: 18397049 NR Description: ER lumen protein retaining receptor [Arabidopsis
MSHLISVLILLLKIYATKSCAGISLKTQELYALVFLTRYLDLFTDYVSLYNSIMKIVFIASSLAIVWCMRRHPLVRRSYDKDLDTFRHQYVVLACFVLGLILNEKFTVQEVFWAFSIYLEAVAILPQLVLLQRSGNVDNLTGQYVVFLGAYRGLYIINWIYRYFTEDHFTRWIACVSGLVQTALYADFFYYYYISWKTNTKLKLPA

SEQ ID NO: 34944 - protein, 153 aa, Arabidopsis thaliana
  peptide (1)..(153): Ceres Seq. ID no. 13509151
  misc_feature (1)..(143): Pfam Name: ER lumen protein retaining receptor Pfam Description: ER lumen protein retaining receptor
  misc_feature (1)..(153): Homolog of NCBI NO: 34856097 NR Description: similar to putative KDEL receptor [Rattus
  misc_feature (1)..(153): Homolog of NCBI NO: 462021 NR Description: ER LUMEN PROTEIN RETAINING RECEPTOR 1 (KDEL
  misc_feature (1)..(152): Homolog of NCBI NO: 22656361 NR Description: endoplasmic reticulum retention receptor
  misc_feature (1)..(153): Homolog of NCBI NO: 17137442 NR Description: KDEL receptor CG5183-PA [Drosophila melanogaster]
  misc_feature (1)..(153): Homolog of NCBI NO: 14285310 NR Description: ERD2 protein [Scherffelia dubia]
  misc_feature (1)..(153): Homolog of NCBI NO: 9293986 NR Description: ER lumen protein-retaining receptor-like protein
  misc_feature (1)..(153): Homolog of NCBI NO: 18404390 NR Description: ER lumen retaining receptor (HDEL receptor)
  misc_feature (1)..(153): Homolog of NCBI NO: 21592401 NR Description: ER lumen retaining receptor (HDEL receptor),
  misc_feature (1)..(153): Homolog of NCBI NO: 6685428 NR Description: ER lumen protein retaining receptor (HDEL
  misc_feature (1)..(153): Homolog of NCBI NO: 18397049 NR Description: ER lumen protein retaining receptor [Arabidopsis
MKIVFIASSLAIVWCMRRHPLVRRSYDKDLDTFRHQYVVLACFVLGLILNEKFTVQEVFWAFSIYLEAVAILPQLVLLQRSGNVDNLTGQYVVFLGAYRGLYIINWIYRYFTEDHFTRWIACVSGLVQTALYADFFYYYYISWKTNTKLKLPA

SEQ ID NO: 34945 - DNA, 1742 bp, Arabidopsis thaliana
  misc_feature (1)..(1742): Ceres Seq. ID no. 13500093
  misc_feature: MA Experiment ID: 108433 Result: Down-regulated in Transcription
  misc_feature: MA Experiment 108433 PARAMETER Experiment Name: At_rhl_Mutant2_cDNA_P Parameter: Age (day) Value: 7
  misc_feature: MA Experiment 108433 PARAMETER Experiment Name: At_rhl_Mutant2_cDNA_P Parameter: Organism Value: A. thaliana
  misc_feature: MA Experiment 108433 PARAMETER Experiment Name: At_rhl_Mutant2_cDNA_P Parameter: Plant Line Value: rhl Mutant vs. wt landsburg
  misc_feature: MA Experiment 108433 PARAMETER Experiment Name: At_rhl_Mutant2_cDNA_P Parameter: Tissue Value: Roots
  misc_feature: MA Experiment ID: 108561 Result: Up-regulated in Transcription
  misc_feature: MA Experiment 108561 PARAMETER Experiment Name: At_100uM_ABA_cDNA_P Parameter: Timepoint (hr) Value: 6
  misc_feature: MA Experiment 108561 PARAMETER Experiment Name: At_100uM_ABA_cDNA_P Parameter: Tissue Value: Aerial
  misc_feature: MA Experiment 108561 PARAMETER Experiment Name: At_100uM_ABA_cDNA_P Parameter: Treatment Value: 100uM ABA vs. No Treatment
  misc_feature: MA Experiment ID: 108572 Result: Up-regulated in Transcription
  misc_feature: MA Experiment 108572 PARAMETER Experiment Name: At_Drought_cDNA_P Parameter: Timepoint (hr) Value: 1
  misc_feature: MA Experiment 108572 PARAMETER Experiment Name: At_Drought_cDNA_P Parameter: Tissue Value: Aerial
  misc_feature: MA Experiment 108572 PARAMETER Experiment Name: At_Drought_cDNA_P Parameter: Treatment Value: Drought vs. No Drought
  misc_feature: MA Experiment ID: 108573 Result: Up-regulated in Transcription
  misc_feature: MA Experiment 108573 PARAMETER Experiment Name: At_Drought_cDNA_P Parameter: Timepoint (hr) Value: 6
  misc_feature: MA Experiment 108573 PARAMETER Experiment Name: At_Drought_cDNA_P Parameter: Tissue Value: Aerial
  misc_feature: MA Experiment 108573 PARAMETER Experiment Name: At_Drought_cDNA_P Parameter: Treatment Value: Drought vs. No Drought
  misc_feature: MA Experiment ID: 108577 Result: Down-regulated in Transcription
  misc_feature: MA Experiment 108577 PARAMETER Experiment Name: At_42deg_Heat_cDNA_P Parameter: Temperature (deg C) Value: 42 vs. 22
  misc_feature: MA Experiment 108577 PARAMETER Experiment Name: At_42deg_Heat_cDNA_P Parameter: Timepoint (hr) Value: 6
  misc_feature: MA Experiment 108577 PARAMETER Experiment Name: At_42deg_Heat_cDNA_P Parameter: Tissue Value: Aerial
  misc_feature: MA Experiment ID: 20000166 Result: Up-regulated in Transcription
  misc_feature: MA Experiment 20000166 PARAMETER Experiment Name: At_100uM_ABA_P Parameter: Age (day) Value: 14
  misc_feature: MA Experiment 20000166 PARAMETER Experiment Name: At_100uM_ABA_P Parameter: Organism Value: A. thaliana
  misc_feature: MA Experiment 20000166 PARAMETER Experiment Name: At_100uM_ABA_P Parameter: Plant Line Value: WS
  misc_feature: MA Experiment 20000166 PARAMETER Experiment Name: At_100uM_ABA_P Parameter: Timepoint (hr) Value: 1
  misc_feature: MA Experiment 20000166 PARAMETER Experiment Name: At_100uM_ABA_P Parameter: Tissue Value: Aerial
  misc_feature: MA Experiment 20000166 PARAMETER Experiment Name: At_100uM_ABA_P Parameter: Treatment Value: 100uM ABA vs. No Treatment
  misc_feature: MA Experiment ID: 20000185 Result: Down-regulated in Transcription
  misc_feature: MA Experiment 20000185 PARAMETER Experiment Name: At_Roots__P Parameter: Age (day) Value: 7 vs. 21
  misc_feature: MA Experiment 20000185 PARAMETER Experiment Name: At_Roots__P Parameter: Organism Value: A. thaliana
  misc_feature: MA Experiment 20000185 PARAMETER Experiment Name: At_Roots__P Parameter: Tissue Value: Roots vs. Whole Plant
  misc_feature: MA Experiment ID: 20000224 Result: Up-regulated in Transcription
  misc_feature: MA Experiment ID: 20000439 Result: Down-regulated in Transcription
  misc_feature: MA Experiment 20000439 PARAMETER Experiment Name: At_Roots__P Parameter: Age (day) Value: 14 vs. 21
  misc_feature: MA Experiment 20000439 PARAMETER Experiment Name: At_Roots__P Parameter: Organism Value: A. thaliana
  misc_feature: MA Experiment 20000439 PARAMETER Experiment Name: At_Roots__P Parameter: Tissue Value: Roots vs. Whole Plant
  misc_feature: MA Experiment ID: 20000794 Result: Up-regulated in Transcription
  misc_feature: MA Experiment 20000794 PARAMETER Experiment Name: At_Petals_P Parameter: Age (day) Value: 23-25 days
  misc_feature: MA Experiment 20000794 PARAMETER Experiment Name: At_Petals_P Parameter: Plant Line Value: WS
  misc_feature: MA Experiment 20000794 PARAMETER Experiment Name: At_Petals_P Parameter: Tissue Value: Petals vs. Whole plant
agagagagaactagtctgtgtcttttttttttttttttggtgataattgaaacatatgaaacaatcgtcgtcatagaagcagcagagattcaccttctttctttatctttccctctcagaaacaggaaacaaaattcaaaaagaacaaaaaaaaaaggtcaaaccaaaaacgatggcgtttcatcacaatcatctctctcaagacctctccttcaatcatttcaccgaccaacaccaacctccacctccgcaaccgcctcctcctcctccgcaacagcaacaacatttccaagaagcaccgcctcctaattggttaaacacagcgcttcttcgttcctcagataacaacaataacttcctcaacctccacacagccaccgctaacaccacaaccgcaagcagctccgattctccttcctccgccgccgccgccgccgctgctaaccagtggctatctcgctcctcctctttcctccaacgaaacaacaacaacaacgcttccatagtcggagatgggatcgatgatgtcaccggaggagcagacactatgattcagggagagatgaaaaccggcggtggagaaaacaaaaacgacggcggaggagctacggcggcggatggagtagtgagctggcagaatgcgagacacaaggcggagatcctttcgcatcctctttacgagcagcttttgtcggcgcacgttgcttgtttgagaatcgcgactccggttgatcagcttccgagaatcgatgctcagcttgctcagtctcaacacgtcgtcgctaaatactcagctttaggcgccgccgctcaaggtctcgtcggcgacgataaagaacttgaccagttcatgacacattatgtgttgctactgtgttcatttaaagagcaattgcaacaacatgtgcgtgttcatgcaatggaagctgtgatggcttgttgggagattgagcagtctcttcaaagcttaacaggagtgtctcctggagaagggatgggagcaacaatgtctgacgatgaagatgaacaagtagagagtgatgctaatatgttcgatgggggattagatgtgttgggttttggtcctttgattcctactgagagtgagaggtcgttgatggaaagagttagacaagaacttaaacatgaactcaaacagggttacaaggagaagatagtagacataagagaggagatattaaggaagagaagagctgggaagttaccaggagataccacctctgttctcaaagcttggtggcaatctcattccaaatggccttaccctactgaggaagataaggcgaggttggtgcaagagacaggtttgcagctaaaacagataaacaattggttcatcaatcagagaaagaggaactggcatagcaatccatcttcttccactgtattgaagaacaaacgcaaaagcaatgcaggtgacaatagcggaagagagcggttcgcgtagaaacaacaaacatatgatgtgaattggggaggtggaagatgggatttgaaagcagggttttagggatttaaagttgagaattttatggaggagtttggattatacagagagaggggacagtattagaaagtaactttttgtgcaattacatagtaacgtagtttggttatgtgattatgcccatatattttattaagtagcacacaaaccaaaaagaaaatatgaaaactgaagatgcaggcttttgtttaatgttttttgtttgtttgtctgc

SEQ ID NO: 34946 - protein, 431 aa, Arabidopsis thaliana
  peptide (1)..(431): Ceres Seq. ID no. 13500094
  misc_feature (213)..(268): Pfam Name: KNOX2 domain Pfam Description: KNOX2 domain
  misc_feature (44)..(423): Homolog of NCBI NO: 4098244 NR Description: homeobox 1 protein [Lycopersicon esculentum]
  misc_feature (1)..(416): Homolog of NCBI NO: 6016226 NR Description: Homeobox protein knotted-1 like LET12
  misc_feature (1)..(418): Homolog of NCBI NO: 7446245 NR Description: homeobox protein NTH23 - common tobacco
  misc_feature (35)..(418): Homolog of NCBI NO: 20141566 NR Description: Homeobox protein knotted-1 like 4 (KNAT4)
  misc_feature (35)..(429): Homolog of NCBI NO: 1045044 NR Description: KNAT4 homeobox protein [Arabidopsis thaliana]
  misc_feature (35)..(429): Homolog of NCBI NO: 30683467 NR Description: HOMEOBOX PROTEIN KNOTTED-1 LIKE 4 (KNAT4)
  misc_feature (1)..(418): Homolog of NCBI NO: 3023961 NR Description: Homeobox protein knotted-1 like 3 (KNAP3)
  misc_feature (126)..(431): Homolog of NCBI NO: 21539535 NR Description: KNAT3 homeodomain protein [Arabidopsis thaliana]
  misc_feature (1)..(431): Homolog of NCBI NO: 21554222 NR Description: KNAT3 homeodomain protein [Arabidopsis thaliana]
  misc_feature (1)..(431): Homolog of NCBI NO: 15238743 NR Description: KNAT3 homeodomain protein [Arabidopsis thaliana]
MAFHHNHLSQDLSFNHFTDQHQPPPPQPPPPPPQQQQHFQEAPPPNWLNTALLRSSDNNNNFLNLHTATANTTTASSSDSPSSAAAAAAANQWLSRSSSFLQRNNNNNASIVGDGIDDVTGGADTMIQGEMKTGGGENKNDGGGATAADGVVSWQNARHKAEILSHPLYEQLLSAHVACLRIATPVDQLPRIDAQLAQSQHVVAKYSALGAAAQGLVGDDKELDQFMTHYVLLLCSFKEQLQQHVRVHAMEAVMACWEIEQSLQSLTGVSPGEGMGATMSDDEDEQVESDANMFDGGLDVLGFGPLIPTESERSLMERVRQELKHELKQGYKEKIVDIREEILRKRRAGKLPGDTTSVLKAWWQSHSKWPYPTEEDKARLVQETGLQLKQINNWFINQRKRNWHSNPSSSTVLKNKRKSNAGDNSGRERFA

SEQ ID NO: 34947 - protein, 306 aa, Arabidopsis thaliana
  peptide (1)..(306): Ceres Seq. ID no. 13500095
  misc_feature (88)..(143): Pfam Name: KNOX2 domain Pfam Description: KNOX2 domain
  misc_feature (1)..(298): Homolog of NCBI NO: 4098244 NR Description: homeobox 1 protein [Lycopersicon esculentum]
  misc_feature (1)..(291): Homolog of NCBI NO: 6016226 NR Description: Homeobox protein knotted-1 like LET12
  misc_feature (1)..(293): Homolog of NCBI NO: 7446245 NR Description: homeobox protein NTH23 - common tobacco
  misc_feature (1)..(293): Homolog of NCBI NO: 20141566 NR Description: Homeobox protein knotted-1 like 4 (KNAT4)
  misc_feature (1)..(304): Homolog of NCBI NO: 1045044 NR Description: KNAT4 homeobox protein [Arabidopsis thaliana]
  misc_feature (1)..(304): Homolog of NCBI NO: 30683467 NR Description: HOMEOBOX PROTEIN KNOTTED-1 LIKE 4 (KNAT4)
  misc_feature (1)..(293): Homolog of NCBI NO: 3023961 NR Description: Homeobox protein knotted-1 like 3 (KNAP3)
  misc_feature (1)..(306): Homolog of NCBI NO: 21539535 NR Description: KNAT3 homeodomain protein [Arabidopsis thaliana]
  misc_feature (1)..(306): Homolog of NCBI NO: 21554222 NR Description: KNAT3 homeodomain protein [Arabidopsis thaliana]
  misc_feature (1)..(306): Homolog of NCBI NO: 15238743 NR Description: KNAT3 homeodomain protein [Arabidopsis thaliana]
MIQGEMKTGGGENKNDGGGATAADGVVSWQNARHKAEILSHPLYEQLLSAHVACLRIATPVDQLPRIDAQLAQSQHVVAKYSALGAAAQGLVGDDKELDQFMTHYVLLLCSFKEQLQQHVRVHAMEAVMACWEIEQSLQSLTGVSPGEGMGATMSDDEDEQVESDANMFDGGLDVLGFGPLIPTESERSLMERVRQELKHELKQGYKEKIVDIREEILRKRRAGKLPGDTTSVLKAWWQSHSKWPYPTEEDKARLVQETGLQLKQINNWFINQRKRNWHSNPSSSTVLKNKRKSNAGDNSGRERFA

SEQ ID NO: 34948 - protein, 301 aa, Arabidopsis thaliana
  peptide (1)..(301): Ceres Seq. ID no. 13500096
  misc_feature (83)..(138): Pfam Name: KNOX2 domain Pfam Description: KNOX2 domain
  misc_feature (1)..(293): Homolog of NCBI NO: 4098244 NR Description: homeobox 1 protein [Lycopersicon esculentum]
  misc_feature (1)..(286): Homolog of NCBI NO: 6016226 NR Description: Homeobox protein knotted-1 like LET12
  misc_feature (1)..(288): Homolog of NCBI NO: 7446245 NR Description: homeobox protein NTH23 - common tobacco
  misc_feature (1)..(288): Homolog of NCBI NO: 20141566 NR Description: Homeobox protein knotted-1 like 4 (KNAT4)
  misc_feature (1)..(299): Homolog of NCBI NO: 1045044 NR Description: KNAT4 homeobox protein [Arabidopsis thaliana]
  misc_feature (1)..(299): Homolog of NCBI NO: 30683467 NR Description: HOMEOBOX PROTEIN KNOTTED-1 LIKE 4 (KNAT4)
  misc_feature (1)..(288): Homolog of NCBI NO: 3023961 NR Description: Homeobox protein knotted-1 like 3 (KNAP3)
  misc_feature (1)..(301): Homolog of NCBI NO: 21539535 NR Description: KNAT3 homeodomain protein [Arabidopsis thaliana]
  misc_feature (1)..(301): Homolog of NCBI NO: 21554222 NR Description: KNAT3 homeodomain protein [Arabidopsis thaliana]
  misc_feature (1)..(301): Homolog of NCBI NO: 15238743 NR Description: KNAT3 homeodomain protein [Arabidopsis thaliana]
MKTGGGENKNDGGGATAADGVVSWQNARHKAEILSHPLYEQLLSAHVACLRIATPVDQLPRIDAQLAQSQHVVAKYSALGAAAQGLVGDDKELDQFMTHYVLLLCSFKEQLQQHVRVHAMEAVMACWEIEQSLQSLTGVSPGEGMGATMSDDEDEQVESDANMFDGGLDVLGFGPLIPTESERSLMERVRQELKHELKQGYKEKIVDIREEILRKRRAGKLPGDTTSVLKAWWQSHSKWPYPTEEDKARLVQETGLQLKQINNWFINQRKRNWHSNPSSSTVLKNKRKSNAGDNSGRERFA

SEQ ID NO: 34949 - DNA, 1373 bp, Arabidopsis thaliana
  misc_feature (1)..(1373): Ceres Seq. ID no. 13497150
  misc_feature: MA Experiment ID: 108461 Result: Down-regulated in Transcription
  misc_feature: MA Experiment 108461 PARAMETER Experiment Name: At_Germinating_Seeds_cDNA_P Parameter: Age (day) Value: 1 vs. 0
  misc_feature: MA Experiment 108461 PARAMETER Experiment Name: At_Germinating_Seeds_cDNA_P Parameter: Tissue Value: Germinating Seeds
  misc_feature: MA Experiment ID: 108462 Result: Down-regulated in Transcription
  misc_feature: MA Experiment 108462 PARAMETER Experiment Name: At_Germinating_Seeds_cDNA_P Parameter: Age (day) Value: 2 vs. 0
  misc_feature: MA Experiment 108462 PARAMETER Experiment Name: At_Germinating_Seeds_cDNA_P Parameter: Tissue Value: Germinating Seeds
  misc_feature: MA Experiment ID: 108463 Result: Down-regulated in Transcription
  misc_feature: MA Experiment 108463 PARAMETER Experiment Name: At_Germinating_Seeds_cDNA_P Parameter: Age (day) Value: 3 vs. 0
  misc_feature: MA Experiment 108463 PARAMETER Experiment Name: At_Germinating_Seeds_cDNA_P Parameter: Tissue Value: Germinating Seeds
  misc_feature: MA Experiment ID: 108464 Result: Down-regulated in Transcription
  misc_feature: MA Experiment 108464 PARAMETER Experiment Name: At_Germinating_Seeds_cDNA_P Parameter: Age (day) Value: 4 vs. 0
  misc_feature: MA Experiment 108464 PARAMETER Experiment Name: At_Germinating_Seeds_cDNA_P Parameter: Tissue Value: Germinating Seeds
  misc_feature: MA Experiment ID: 20000112 Result: Up-regulated in Transcription
  misc_feature: MA Experiment 20000112 PARAMETER Experiment Name: At_42deg_Heat_cDNA_P Parameter: Temperature (deg C) Value: 42 vs. 22
  misc_feature: MA Experiment 20000112 PARAMETER Experiment Name: At_42deg_Heat_cDNA_P Parameter: Timepoint (hr) Value: 2
  misc_feature: MA Experiment 20000112 PARAMETER Experiment Name: At_42deg_Heat_cDNA_P Parameter: Tissue Value: Aerial
  misc_feature: MA Experiment ID: 20000179 Result: Down-regulated in Transcription
  misc_feature: MA Experiment 20000179 PARAMETER Experiment Name: At_Germinating_Seeds_P Parameter: Age (hr) Value: 6 vs. 0
  misc_feature: MA Experiment 20000179 PARAMETER Experiment Name: At_Germinating_Seeds_P Parameter: Tissue Value: Germinating Seeds
  misc_feature: MA Experiment ID: 20000180 Result: Down-regulated in Transcription
  misc_feature: MA Experiment 20000180 PARAMETER Experiment Name: At_Germinating_Seeds_P Parameter: Age (hr) Value: 24 vs. 0
  misc_feature: MA Experiment 20000180 PARAMETER Experiment Name: At_Germinating_Seeds_P Parameter: Tissue Value: Germinating Seeds
  misc_feature: MA Experiment ID: 20000184 Result: Down-regulated in Transcription
  misc_feature: MA Experiment 20000184 PARAMETER Experiment Name: At_Shoots__P Parameter: Age (day) Value: 7
  misc_feature: MA Experiment 20000184 PARAMETER Experiment Name: At_Shoots__P Parameter: Tissue Value: Shoots vs. Whole Plant
  misc_feature: MA Experiment ID: 20000224 Result: Up-regulated in Transcription
ctatcacattttgcagtttcaacaaataaatatcccaaaatttagtggcggcgagagggaaaccaaaattcgcgagagagaagtatgtcgaagacgctggtgcaaccggtagggcaaaagaggttgactaatgttgcagtggttcgtctcaaaaagcaaggcaatcgcttcgagatcgcttgttacaagaataaggtcctttcatggcggtctggcgtggagaaggatatagatgaagtgctacagtcgcatactgtttattcaaatgtttcgaaaggagttcttgcaaaatcgaaagacttgatgaagtcgtttggatcagatgatcatacgaaaatatgcatcgatattttggagaaaggagagcttcaagttgctggaaaagaaagagaatcacagttctcaagccagtttcgggatatagcaacgattgttatgcagaaaactatcaaccctgaaacacaacgaccttataccatcagcatggtagagcgcctaatgcatgaaattcattttgctgttgatcctcatagtaattccaagaagcaggcacttgatgtcatccgtgagctgcaaaagcacttccctataaagcgttctccaatgagactgcgtcttactgttcctgttcaaaatttcccctcgcttctggagaagctaaaagaatgggatggtagtgttgtctccaaagacgaatctggaacacagatgtccactgtctgcgagatggaaccgggcctattccgagagtgtgattcccatgtgaggagtatccagggaagactagaaatactcgctgtatcagttcatgcagaaggtgacacaagcatggatcattacgatgagcatgatgatatggcattgcaaacccacaagccgttgttacctgctgagactgagactaaggatttgaccgatcccgtcgttgaacttagcaagaaactgcagaagcaagagataagtactacagataacataaagcaagaaggtggagaagaaaagaaggggaccaagtgcagcacttgcaacacgttcgttggagaggctaagcaatacagagagcactgtaagagtgattggcacaaacacaaccttaagcgtaagactcggaaactccctcctattagtgctgacgaatgcatgtctgagattgacatggacgactctagagcagatttgaaagactactctttctgaaactacaattttctccttttgtgcttttaattttgtcaatgtgttaaatctcgtagtcatatgtgagtatgaatacacaaaacttgtggaatgaaattttgcgcaaactttaagagtaaaaacttgtgtttaagagacaagcttggatatttggtatttgattaataactgtgacc

SEQ ID NO: 34950 - protein, 370 aa, Arabidopsis thaliana
  peptide (1)..(370): Ceres Seq. ID no. 13497151
  misc_feature (6)..(244): Pfam Name: Uncharacterized protein family UPF0023 Pfam Description: Uncharacterized protein family UPF0023
  misc_feature (1)..(246): Homolog of NCBI NO: 25144459 NR Description: Protein III (28.5 kD) [Caenorhabditis elegans]
  misc_feature (4)..(250): Homolog of NCBI NO: 28828466 NR Description: similar to Homo sapiens (Human). Hypothetical
  misc_feature (1)..(246): Homolog of NCBI NO: 39586134 NR Description: Hypothetical protein CBG15250 [Caenorhabditis
  misc_feature (22)..(250): Homolog of NCBI NO: 29476858 NR Description: Unknown (protein for MGC:56700) [Danio rerio]
  misc_feature (4)..(250): Homolog of NCBI NO: 4929663 NR Description: CGI-97 protein [Homo sapiens]
  misc_feature (4)..(250): Homolog of NCBI NO: 28416940 NR Description: Shwachman-Bodian-Diamond syndrome protein [Homo
  misc_feature (4)..(250): Homolog of NCBI NO: 27664348 NR Description: similar to RIKEN cDNA 4733401P19
  misc_feature (4)..(250): Homolog of NCBI NO: 23956138 NR Description: RIKEN cDNA 4733401P19 [Mus musculus]
  misc_feature (1)..(370): Homolog of NCBI NO: 21554225 NR Description: unknown [Arabidopsis thaliana]
  misc_feature (1)..(370): Homolog of NCBI NO: 18401084 NR Description: expressed protein [Arabidopsis thaliana]
MSKTLVQPVGQKRLTNVAVVRLKKQGNRFEIACYKNKVLSWRSGVEKDIDEVLQSHTVYSNVSKGVLAKSKDLMKSFGSDDHTKICIDILEKGELQVAGKERESQFSSQFRDIATIVMQKTINPETQRPYTISMVERLMHEIHFAVDPHSNSKKQALDVIRELQKHFPIKRSPMRLRLTVPVQNFPSLLEKLKEWDGSVVSKDESGTQMSTVCEMEPGLFRECDSHVRSIQGRLEILAVSVHAEGDTSMDHYDEHDDMALQTHKPLLPAETETKDLTDPVVELSKKLQKQEISTTDNIKQEGGEEKKGTKCSTCNTFVGEAKQYREHCKSDWHKHNLKRKTRKLPPISADECMSEIDMDDSRADLKDYSF

SEQ ID NO: 34951 - protein, 297 aa, Arabidopsis thaliana
  peptide (1)..(297): Ceres Seq. ID no. 13497152
  misc_feature (1)..(171): Pfam Name: Uncharacterized protein family UPF0023 Pfam Description: Uncharacterized protein family UPF0023
  misc_feature (1)..(173): Homolog of NCBI NO: 25144459 NR Description: Protein III (28.5 kD) [Caenorhabditis elegans]
  misc_feature (1)..(177): Homolog of NCBI NO: 28828466 NR Description: similar to Homo sapiens (Human). Hypothetical
  misc_feature (1)..(173): Homolog of NCBI NO: 39586134 NR Description: Hypothetical protein CBG15250 [Caenorhabditis
  misc_feature (1)..(177): Homolog of NCBI NO: 29476858 NR Description: Unknown (protein for MGC:56700) [Danio rerio]
  misc_feature (1)..(177): Homolog of NCBI NO: 4929663 NR Description: CGI-97 protein [Homo sapiens]
  misc_feature (1)..(177): Homolog of NCBI NO: 28416940 NR Description: Shwachman-Bodian-Diamond syndrome protein [Homo
  misc_feature (1)..(177): Homolog of NCBI NO: 27664348 NR Description: similar to RIKEN cDNA 4733401P19
  misc_feature (1)..(177): Homolog of NCBI NO: 23956138 NR Description: RIKEN cDNA 4733401P19 [Mus musculus]
  misc_feature (1)..(297): Homolog of NCBI NO: 21554225 NR Description: unknown [Arabidopsis thaliana]
  misc_feature (1)..(297): Homolog of NCBI NO: 18401084 NR Description: expressed protein [Arabidopsis thaliana]
MKSFGSDDHTKICIDILEKGELQVAGKERESQFSSQFRDIATIVMQKTINPETQRPYTISMVERLMHEIHFAVDPHSNSKKQALDVIRELQKHFPIKRSPMRLRLTVPVQNFPSLLEKLKEWDGSVVSKDESGTQMSTVCEMEPGLFRECDSHVRSIQGRLEILAVSVHAEGDTSMDHYDEHDDMALQTHKPLLPAETETKDLTDPVVELSKKLQKQEISTTDNIKQEGGEEKKGTKCSTCNTFVGEAKQYREHCKSDWHKHNLKRKTRKLPPISADECMSEIDMDDSRADLKDYSF

SEQ ID NO: 34952 - protein, 253 aa, Arabidopsis thaliana
  peptide (1)..(253): Ceres Seq. ID no. 13497153
  misc_feature (1)..(127): Pfam Name: Uncharacterized protein family UPF0023 Pfam Description: Uncharacterized protein family UPF0023
  misc_feature (1)..(129): Homolog of NCBI NO: 25144459 NR Description: Protein III (28.5 kD) [Caenorhabditis elegans]
  misc_feature (1)..(133): Homolog of NCBI NO: 28828466 NR Description: similar to Homo sapiens (Human). Hypothetical
  misc_feature (1)..(129): Homolog of NCBI NO: 39586134 NR Description: Hypothetical protein CBG15250 [Caenorhabditis
  misc_feature (1)..(133): Homolog of NCBI NO: 29476858 NR Description: Unknown (protein for MGC:56700) [Danio rerio]
  misc_feature (1)..(133): Homolog of NCBI NO: 4929663 NR Description: CGI-97 protein [Homo sapiens]
  misc_feature (1)..(133): Homolog of NCBI NO: 28416940 NR Description: Shwachman-Bodian-Diamond syndrome protein [Homo
  misc_feature (1)..(133): Homolog of NCBI NO: 27664348 NR Description: similar to RIKEN cDNA 4733401P19
  misc_feature (1)..(133): Homolog of NCBI NO: 23956138 NR Description: RIKEN cDNA 4733401P19 [Mus musculus]
  misc_feature (1)..(253): Homolog of NCBI NO: 21554225 NR Description: unknown [Arabidopsis thaliana]
  misc_feature (1)..(253): Homolog of NCBI NO: 18401084 NR Description: expressed protein [Arabidopsis thaliana]
MQKTINPETQRPYTISMVERLMHEIHFAVDPHSNSKKQALDVIRELQKHFPIKRSPMRLRLTVPVQNFPSLLEKLKEWDGSVVSKDESGTQMSTVCEMEPGLFRECDSHVRSIQGRLEILAVSVHAEGDTSMDHYDEHDDMALQTHKPLLPAETETKDLTDPVVELSKKLQKQEISTTDNIKQEGGEEKKGTKCSTCNTFVGEAKQYREHCKSDWHKHNLKRKTRKLPPISADECMSEIDMDDSRADLKDYSF

SEQ ID NO: 34953 - DNA, 1359 bp, Arabidopsis thaliana
  misc_feature (1)..(1359): Ceres Seq. ID no. 13492883
  misc_feature: MA Experiment ID: 108434 Result: Down-regulated in Transcription
  misc_feature: MA Experiment 108434 PARAMETER Experiment Name: At_Root_Tips_cDNA_P Parameter: Tissue Value: Root Tips
  misc_feature: MA Experiment ID: 108464 Result: Up-regulated in Transcription
  misc_feature: MA Experiment 108464 PARAMETER Experiment Name: At_Germinating_Seeds_cDNA_P Parameter: Age (day) Value: 4 vs. 0
  misc_feature: MA Experiment 108464 PARAMETER Experiment Name: At_Germinating_Seeds_cDNA_P Parameter: Tissue Value: Germinating Seeds
  misc_feature: MA Experiment ID: 20000184 Result: Down-regulated in Transcription
  misc_feature: MA Experiment 20000184 PARAMETER Experiment Name: At_Shoots__P Parameter: Age (day) Value: 7
  misc_feature: MA Experiment 20000184 PARAMETER Experiment Name: At_Shoots__P Parameter: Tissue Value: Shoots vs. Whole Plant
  misc_feature: MA Experiment ID: 20000185 Result: Down-regulated in Transcription
  misc_feature: MA Experiment 20000185 PARAMETER Experiment Name: At_Roots__P Parameter: Age (day) Value: 7 vs. 21
  misc_feature: MA Experiment 20000185 PARAMETER Experiment Name: At_Roots__P Parameter: Organism Value: A. thaliana
  misc_feature: MA Experiment 20000185 PARAMETER Experiment Name: At_Roots__P Parameter: Tissue Value: Roots vs. Whole Plant
  misc_feature: MA Experiment ID: 20000234 Result: Down-regulated in Transcription
  misc_feature: MA Experiment 20000234 PARAMETER Experiment Name: At_Siliques_P Parameter: Age (day) Value: 21
  misc_feature: MA Experiment 20000234 PARAMETER Experiment Name: At_Siliques_P Parameter: Organism Value: A. thaliana
  misc_feature: MA Experiment 20000234 PARAMETER Experiment Name: At_Siliques_P Parameter: Plant Line Value: WS
  misc_feature: MA Experiment 20000234 PARAMETER Experiment Name: At_Siliques_P Parameter: Tissue Value: Less Than 5mm Siliques vs. Whole Plant
  misc_feature: MA Experiment ID: 20000439 Result: Down-regulated in Transcription
  misc_feature: MA Experiment 20000439 PARAMETER Experiment Name: At_Roots__P Parameter: Age (day) Value: 14 vs. 21
  misc_feature: MA Experiment 20000439 PARAMETER Experiment Name: At_Roots__P Parameter: Organism Value: A. thaliana
  misc_feature: MA Experiment 20000439 PARAMETER Experiment Name: At_Roots__P Parameter: Tissue Value: Roots vs. Whole Plant
  misc_feature: MA Experiment ID: 20000794 Result: Up-regulated in Transcription
  misc_feature: MA Experiment 20000794 PARAMETER Experiment Name: At_Petals_P Parameter: Age (day) Value: 23-25 days
  misc_feature: MA Experiment 20000794 PARAMETER Experiment Name: At_Petals_P Parameter: Plant Line Value: WS
  misc_feature: MA Experiment 20000794 PARAMETER Experiment Name: At_Petals_P Parameter: Tissue Value: Petals vs. Whole plant
  misc_feature: MA Experiment ID: 20001558 Result: Down-regulated in Transcription
  misc_feature: MA Experiment 20001558 PARAMETER Experiment Name: At_Drought_Soil_Dry_P Parameter: Age (day) Value: 27
  misc_feature: MA Experiment 20001558 PARAMETER Experiment Name: At_Drought_Soil_Dry_P Parameter: Organism Value: A. thaliana
  misc_feature: MA Experiment 20001558 PARAMETER Experiment Name: At_Drought_Soil_Dry_P Parameter: Plant Line Value: WS
  misc_feature: MA Experiment 20001558 PARAMETER Experiment Name: At_Drought_Soil_Dry_P Parameter: Post Timepoint (hr) Value: 6
  misc_feature: MA Experiment 20001558 PARAMETER Experiment Name: At_Drought_Soil_Dry_P Parameter: Post-Treatment Value: Re-Water vs. No Drought
  misc_feature: MA Experiment 20001558 PARAMETER Experiment Name: At_Drought_Soil_Dry_P Parameter: Timepoint (day) Value: 13
  misc_feature: MA Experiment 20001558 PARAMETER Experiment Name: At_Drought_Soil_Dry_P Parameter: Treatment Value: Drought vs. No Drought
  misc_feature: MA Experiment ID: 20001560 Result: Down-regulated in Transcription
  misc_feature: MA Experiment 20001560 PARAMETER Experiment Name: At_Drought_Soil_Dry_P Parameter: Age (day) Value: 28
  misc_feature: MA Experiment 20001560 PARAMETER Experiment Name: At_Drought_Soil_Dry_P Parameter: Organism Value: A. thaliana
  misc_feature: MA Experiment 20001560 PARAMETER Experiment Name: At_Drought_Soil_Dry_P Parameter: Plant Line Value: WS
  misc_feature: MA Experiment 20001560 PARAMETER Experiment Name: At_Drought_Soil_Dry_P Parameter: Post Timepoint (hr) Value: None
  misc_feature: MA Experiment 20001560 PARAMETER Experiment Name: At_Drought_Soil_Dry_P Parameter: Post-Treatment Value: None
  misc_feature: MA Experiment 20001560 PARAMETER Experiment Name: At_Drought_Soil_Dry_P Parameter: Timepoint (day) Value: 14
  misc_feature: MA Experiment 20001560 PARAMETER Experiment Name: At_Drought_Soil_Dry_P Parameter: Treatment Value: Drought vs. No Drought
  misc_feature: MA Experiment ID: 20001911 Result: Up-regulated in Transcription
  misc_feature: MA Experiment 20001911 PARAMETER Experiment Name: At_Drought_Reproduction_P Parameter: Age (day) Value: 40
  misc_feature: MA Experiment 20001911 PARAMETER Experiment Name: At_Drought_Reproduction_P Parameter: Organism Value: A. thaliana
  misc_feature: MA Experiment 20001911 PARAMETER Experiment Name: At_Drought_Reproduction_P Parameter: Plant Line Value: WS
  misc_feature: MA Experiment 20001911 PARAMETER Experiment Name: At_Drought_Reproduction_P Parameter: Timepoint (day) Value: 10
  misc_feature: MA Experiment 20001911 PARAMETER Experiment Name: At_Drought_Reproduction_P Parameter: Tissue Value: Flowers
  misc_feature: MA Experiment 20001911 PARAMETER Experiment Name: At_Drought_Reproduction_P Parameter: Treatment Value: Drought vs. No Drought
aaaaaaaaagaaagattactaacgccgactctctaaaactctctcaaaccataaaaaatattctccgatcatcattttaatggagagtacagattcttccggtggtcctccgccgccgcaaccaaacctccctccaggattccggtttcatccaacagacgaagaacttgtaattcattacctcaaacgcaaagcagattctgttcctttaccagtcgcgatcatcgccgacgttgatctttacaaatttgatccatgggaacttcccgcgaaagcttcgtttggagaacaagaatggtattttttcagtccaagagatcggaaatatcccaacggagctagacctaaccgagctgcgacttccggttattggaaagcgactggtacagataaaccggtgatttcaaccggcggtggtggtagtaaaaaagtgggagttaaaaaggctctagtgttttacagtggtaaaccaccaaaaggagttaaatcagattggattatgcatgaatatcggttaactgataataaacctactcatatttgtgacttcggcaacaagaaaaactctctcaggcttgatgattgggtgttgtgtcgtatctacaagaaaaacaatagtacagcatctagacatcatcatcatcttcatcatattcatctagataatgatcatcatcgtcatgatatgatgattgatgatgatcgattccgtcatgttcctcctggtcttcacttcccggcgattttttctgacaataatgatccgacggctatatatgatggtggcggcggcggatacggaggtggaagttactcgatgaatcattgtttcgcatctggatcaaagcaggagcagttgtttccaccggtgatgatgatgactagtctaaatcaagattccggtattggatcgtcgtcgtcacctagcaagagatttaacggcggcggcgttggagattgttcgacttctatggcggcgacgccgttaatgcagaaccaaggtgggatttaccaattgcctggtttgaattggtattcttgaaaacaatttacgatgaagaatttttaaaatttgtgtatatatatacggtttgagtgattagggggcattgggggatttatttacggttgattattattgtagtgttatagaactaaggagattaaattaaatagattggaggagaggtataaggtaacatatagaaattatacaacaatagtttaaatattcttttcttttctttttcatgttattatttttactaatgtataggtgatgattatacttagatgtttgtagcttgtataaattaatgcatgcatatatataaaaatatattaacagttatagaaact

SEQ ID NO: 34954 - protein, 320 aa, Arabidopsis thaliana
  peptide (1)..(320): Ceres Seq. ID no. 13492884
  misc_feature (17)..(147): Pfam Name: No apical meristem (NAM) protein Pfam Description: No apical meristem (NAM) protein
  misc_feature (13)..(210): Homolog of NCBI NO: 30679026 NR Description: No apical meristem (NAM) protein family
  misc_feature (13)..(210): Homolog of NCBI NO: 6223651 NR Description: NAM-like protein (no apical meristem)
  misc_feature (1)..(183): Homolog of NCBI NO: 34899790 NR Description: OJ1773_H01.21 [Oryza sativa (japonica
  misc_feature (1)..(180): Homolog of NCBI NO: 21593425 NR Description: NAM protein, putative [Arabidopsis thaliana]
  misc_feature (5)..(180): Homolog of NCBI NO: 25352286 NR Description: hypothetical protein F11P17.16 [imported] -
  misc_feature (1)..(320): Homolog of NCBI NO: 18407026 NR Description: No apical meristem (NAM) protein family
  misc_feature (1)..(274): Homolog of NCBI NO: 15232606 NR Description: No apical meristem (NAM) protein family
  misc_feature (1)..(320): Homolog of NCBI NO: 20466640 NR Description: NAM-like protein [Arabidopsis thaliana]
  misc_feature (1)..(320): Homolog of NCBI NO: 21554226 NR Description: NAM-like protein [Arabidopsis thaliana]
  misc_feature (1)..(320): Homolog of NCBI NO: 15219110 NR Description: No apical meristem (NAM) protein family
MESTDSSGGPPPPQPNLPPGFRFHPTDEELVIHYLKRKADSVPLPVAIIADVDLYKFDPWELPAKASFGEQEWYFFSPRDRKYPNGARPNRAATSGYWKATGTDKPVISTGGGGSKKVGVKKALVFYSGKPPKGVKSDWIMHEYRLTDNKPTHICDFGNKKNSLRLDDWVLCRIYKKNNSTASRHHHHLHHIHLDNDHHRHDMMIDDDRFRHVPPGLHFPAIFSDNNDPTAIYDGGGGGYGGGSYSMNHCFASGSKQEQLFPPVMMMTSLNQDSGIGSSSSPSKRFNGGGVGDCSTSMAATPLMQNQGGIYQLPGLNWYS

SEQ ID NO: 34955 - protein, 180 aa, Arabidopsis thaliana
  peptide (1)..(180): Ceres Seq. ID no. 13492885
  misc_feature (1)..(70): Homolog of NCBI NO: 30679026 NR Description: No apical meristem (NAM) protein family
  misc_feature (1)..(70): Homolog of NCBI NO: 6223651 NR Description: NAM-like protein (no apical meristem)
  misc_feature (1)..(43): Homolog of NCBI NO: 34899790 NR Description: OJ1773_H01.21 [Oryza sativa (japonica
  misc_feature (1)..(40): Homolog of NCBI NO: 21593425 NR Description: NAM protein, putative [Arabidopsis thaliana]
  misc_feature (1)..(40): Homolog of NCBI NO: 25352286 NR Description: hypothetical protein F11P17.16 [imported] -
  misc_feature (1)..(180): Homolog of NCBI NO: 18407026 NR Description: No apical meristem (NAM) protein family
  misc_feature (1)..(134): Homolog of NCBI NO: 15232606 NR Description: No apical meristem (NAM) protein family
  misc_feature (1)..(180): Homolog of NCBI NO: 20466640 NR Description: NAM-like protein [Arabidopsis thaliana]
  misc_feature (1)..(180): Homolog of NCBI NO: 21554226 NR Description: NAM-like protein [Arabidopsis thaliana]
  misc_feature (1)..(180): Homolog of NCBI NO: 15219110 NR Description: No apical meristem (NAM) protein family
MHEYRLTDNKPTHICDFGNKKNSLRLDDWVLCRIYKKNNSTASRHHHHLHHIHLDNDHHRHDMMIDDDRFRHVPPGLHFPAIFSDNNDPTAIYDGGGGGYGGGSYSMNHCFASGSKQEQLFPPVMMMTSLNQDSGIGSSSSPSKRFNGGGVGDCSTSMAATPLMQNQGGIYQLPGLNWYS

SEQ ID NO: 34956 - DNA, 694 bp, Arabidopsis thaliana
  misc_feature (1)..(694): Ceres Seq. ID no. 13499746
  misc_feature: MA Experiment ID: 108434 Result: Up-regulated in Transcription
  misc_feature: MA Experiment 108434 PARAMETER Experiment Name: At_Root_Tips_cDNA_P Parameter: Tissue Value: Root Tips
  misc_feature: MA Experiment ID: 108462 Result: Down-regulated in Transcription
  misc_feature: MA Experiment 108462 PARAMETER Experiment Name: At_Germinating_Seeds_cDNA_P Parameter: Age (day) Value: 2 vs. 0
  misc_feature: MA Experiment 108462 PARAMETER Experiment Name: At_Germinating_Seeds_cDNA_P Parameter: Tissue Value: Germinating Seeds
  misc_feature: MA Experiment ID: 108463 Result: Down-regulated in Transcription
  misc_feature: MA Experiment 108463 PARAMETER Experiment Name: At_Germinating_Seeds_cDNA_P Parameter: Age (day) Value: 3 vs. 0
  misc_feature: MA Experiment 108463 PARAMETER Experiment Name: At_Germinating_Seeds_cDNA_P Parameter: Tissue Value: Germinating Seeds
  misc_feature: MA Experiment ID: 108464 Result: Down-regulated in Transcription
  misc_feature: MA Experiment 108464 PARAMETER Experiment Name: At_Germinating_Seeds_cDNA_P Parameter: Age (day) Value: 4 vs. 0
  misc_feature: MA Experiment 108464 PARAMETER Experiment Name: At_Germinating_Seeds_cDNA_P Parameter: Tissue Value: Germinating Seeds
  misc_feature: MA Experiment ID: 108569 Result: Down-regulated in Transcription
  misc_feature: MA Experiment 108569 PARAMETER Experiment Name: At_0.001%_MeJA__cDNA_P Parameter: Timepoint (hr) Value: 6
  misc_feature: MA Experiment 108569 PARAMETER Experiment Name: At_0.001%_MeJA__cDNA_P Parameter: Tissue Value: Aerial
  misc_feature: MA Experiment 108569 PARAMETER Experiment Name: At_0.001%_MeJA__cDNA_P Parameter: Treatment Value: 0.001% MeJA vs. No Treatment
  misc_feature: MA Experiment ID: 108573 Result: Down-regulated in Transcription
  misc_feature: MA Experiment 108573 PARAMETER Experiment Name: At_Drought_cDNA_P Parameter: Timepoint (hr) Value: 6
  misc_feature: MA Experiment 108573 PARAMETER Experiment Name: At_Drought_cDNA_P Parameter: Tissue Value: Aerial
  misc_feature: MA Experiment 108573 PARAMETER Experiment Name: At_Drought_cDNA_P Parameter: Treatment Value: Drought vs. No Drought
  misc_feature: MA Experiment ID: 20000184 Result: Down-regulated in Transcription
  misc_feature: MA Experiment 20000184 PARAMETER Experiment Name: At_Shoots__P Parameter: Age (day) Value: 7
  misc_feature: MA Experiment 20000184 PARAMETER Experiment Name: At_Shoots__P Parameter: Tissue Value: Shoots vs. Whole Plant
  misc_feature: MA Experiment ID: 20000224 Result: Up-regulated in Transcription
  misc_feature: MA Experiment ID: 20000227 Result: Up-regulated in Transcription
  misc_feature: MA Experiment 20000227 PARAMETER Experiment Name: At_Root-Tips-vs-Tops_P Parameter: Tissue Value: Root Tips vs. Root Tops
  misc_feature: MA Experiment ID: 20001905 Result: Down-regulated in Transcription
  misc_feature: MA Experiment 20001905 PARAMETER Experiment Name: At_Drought_Reproduction_P Parameter: Age (day) Value: 40
  misc_feature: MA Experiment 20001905 PARAMETER Experiment Name: At_Drought_Reproduction_P Parameter: Organism Value: A. thaliana
  misc_feature: MA Experiment 20001905 PARAMETER Experiment Name: At_Drought_Reproduction_P Parameter: Plant Line Value: WS
  misc_feature: MA Experiment 20001905 PARAMETER Experiment Name: At_Drought_Reproduction_P Parameter: Timepoint (day) Value: 10
  misc_feature: MA Experiment 20001905 PARAMETER Experiment Name: At_Drought_Reproduction_P Parameter: Tissue Value: Rosettes
  misc_feature: MA Experiment 20001905 PARAMETER Experiment Name: At_Drought_Reproduction_P Parameter: Treatment Value: Drought vs. No Drought
aaaaaaaaaaaaaaagaaataggaaaagggtttactaacgccaaaaaacccaacccttgtctgcgttcttcatcagcgccgcgttctcaaagttgctctcacagtctccgatctccaattttataagttatggctggaaaagctgcagaagctgtggcaaagacagtgacagggtttcaacatccatggagggcgaaactcgataagtacagaaccgagttgacgaaaggtgtgtggggttattgggagatgggagcatggaaaccgttagggataagtgcacgaaggagggctatgctgaggaaagaagtgttgactaatggagaagattggccttatgatccagagaggaaagctatgaggacaaagaggaaagggcataaatgtgatagaatttcagctgagaaaagagagaacactgcgaagcttatgttgaagatgcctcagatgttgcttgattataagaagagaaggtgggaaaagaagatgaaggaagaagagaaagctaaagaagacaagtaattgatttgttgagatcatgattactatagacttggttgatgaataagaataatttagtttgttgatcttatgaaatcttggaaggtttaagatcacaagtttgcttctgatatacttttgtatgatgtttttttatgtttgtttttaacagaacccaaaagtgtttgtggtt

SEQ ID NO: 34957 - protein, 130 aa, Arabidopsis thaliana
  peptide (1)..(130): Ceres Seq. ID no. 13499747
  misc_feature (1)..(130): Homolog of NCBI NO: 18415817 NR Description: expressed protein [Arabidopsis thaliana]
MAGKAAEAVAKTVTGFQHPWRAKLDKYRTELTKGVWGYWEMGAWKPLGISARRRAMLRKEVLTNGEDWPYDPERKAMRTKRKGHKCDRISAEKRENTAKLMLKMPQMLLDYKKRRWEKKMKEEEKAKEDK

SEQ ID NO: 34958 - protein, 90 aa, Arabidopsis thaliana
  peptide (1)..(90): Ceres Seq. ID no. 13499748
  misc_feature (1)..(90): Homolog of NCBI NO: 18415817 NR Description: expressed protein [Arabidopsis thaliana]
MGAWKPLGISARRRAMLRKEVLTNGEDWPYDPERKAMRTKRKGHKCDRISAEKRENTAKLMLKMPQMLLDYKKRRWEKKMKEEEKAKEDK

SEQ ID NO: 34959 - protein, 75 aa, Arabidopsis thaliana
  peptide (1)..(75): Ceres Seq. ID no. 13499749
  misc_feature (1)..(75): Homolog of NCBI NO: 18415817 NR Description: expressed protein [Arabidopsis thaliana]
MLRKEVLTNGEDWPYDPERKAMRTKRKGHKCDRISAEKRENTAKLMLKMPQMLLDYKKRRWEKKMKEEEKAKEDK

SEQ ID NO: 34960 - DNA, 1589 bp, Arabidopsis thaliana
  misc_feature (1)..(1589): Ceres Seq. ID no. 12370521
  misc_feature: MA Experiment ID: 108573 Result: Up-regulated in Transcription
  misc_feature: MA Experiment 108573 PARAMETER Experiment Name: At_Drought_cDNA_P Parameter: Timepoint (hr) Value: 6
  misc_feature: MA Experiment 108573 PARAMETER Experiment Name: At_Drought_cDNA_P Parameter: Tissue Value: Aerial
  misc_feature: MA Experiment 108573 PARAMETER Experiment Name: At_Drought_cDNA_P Parameter: Treatment Value: Drought vs. No Drought
  misc_feature: MA Experiment ID: 108595 Result: Down-regulated in Transcription
  misc_feature: MA Experiment 108595 PARAMETER Experiment Name: At_Ler-pi_Ovule_cDNA_P Parameter: Plant Line Value: null
cgatttgtccgactcatcatcttctttctctttctgtctctctctctctctctctctgttcgaatcgaaaccctaacaaatccaaaattgtctctgagattgaaattgccccaatttaatggcgtaaagcttcaccaatttcatcaattcgatatcaatttttgaaatttcgaagaaaggaagaaactttgaaaagagaaagcaaaatgtcaagagagacgacgacggaagcaacgcctttgattttaaccgacggaggagggggaaggagatcggtgagaagacaagggttaagagaagcggcgaggttactaagacatgcaagtagcgggagaatgatgatgagagagccatcgatgcttgttcgtgaagctgcggctgagcagcttgaagagagacaaagcgattgggcttattcgaaacctgtagtggttttggatttcgtttggaatcttgcttttgtcgttgttgctacagctgttttggtacttagcagcgatgagaatccgaatatgcctcttagggtttggattattgggtatgggttgcaatgtatgatgcatatggtttgtgtttgtgttgagtatcgtaggaggaatagtagaagaagaagagatttgagtccaagatctagctcttcttcttcttcttcttcttcttctatggatgaagaagaaggtttgggtttgagtagaaactcagatgaacgttacttggagctaggtcaattagagaatgaaaacaatagttttgctaagcatctagaatctgcaaatacgatgatctcatttatatggtgggttattggattttattgggtatcttctggtggtcaagagttagcacaaggatccccacagctttattggttgtgtatagtctttcttggtttcgatgtgttctttgttgttttctgcgttgcattggcttgtgttatcggcattgctgtttgctgctgcttgccttgcatcattgcagttctatacgccgtagcagaacaggaaggagcttcgaaagaagacattgaccaacttactaaattcaaattccgaaaggttggtgatactatgaaacacactgttgatgaagaacaaggagaaggagattctggaggagtgatgactgaatgtggtacagattcacccgttgaacatgctcttcctcatgaggatgcagaatgctgcatttgtctttccgcttatgaagacgagacagagctaagagaacttccttgtggccaccatttccattgcggttgtgtggataaatggctttacataaatgctacttgtcccctctgcaaatacaacatcctcaagagtagcaactacgaagaaggcgaggaagtctagaagactagaacagtaagaagaggaaacttgcaaatatgcgaatatctgtatcatttagcagctgaggaacccatgagaaaaagggttcgagatttgatcaatttgttgtttacattgcttgttatatgtttacacattttagttgcttttttctttggagtctgtatgttctgttgttgtcgactcttgttaacatgttttggtacttacttgctcaacaagttaacaacatcttgc

SEQ ID NO: 34961 - protein, 381 aa, Arabidopsis thaliana
  peptide (1)..(381): Ceres Seq. ID no. 12370522
  misc_feature (325)..(365): Pfam Name: Zinc finger, C3HC4 type (RING finger) Pfam Description: Zinc finger, C3HC4 type (RING finger)
  misc_feature (46)..(381): Homolog of NCBI NO: 38344371 NR Description: OSJNBb0032E06.5 [Oryza sativa (japonica
  misc_feature (324)..(376): Homolog of NCBI NO: 7487667 NR Description: hypothetical protein T5C23.110 - Arabidopsis
  misc_feature (22)..(323): Homolog of NCBI NO: 7487667 NR Description: hypothetical protein T5C23.110 - Arabidopsis
  misc_feature (22)..(376): Homolog of NCBI NO: 18413629 NR Description: putative protein
  misc_feature (17)..(180): Homolog of NCBI NO: 15222059 NR Description: unknown protein; protein id: At1g12760.1
  misc_feature (206)..(381): Homolog of NCBI NO: 15222059 NR Description: unknown protein; protein id: At1g12760.1
  misc_feature (17)..(381): Homolog of NCBI NO: 9502381 NR Description: T12C24.29 [Arabidopsis thaliana]
  misc_feature (1)..(381): Homolog of NCBI NO: 16604388 NR Description: At1g63170/F16M19_7 [Arabidopsis thaliana]
  misc_feature (1)..(381): Homolog of NCBI NO: 18407748 NR Description: expressed protein
  misc_feature (1)..(381): Homolog of NCBI NO: 21554228 NR Description: unknown [Arabidopsis thaliana]
MSRETTTEATPLILTDGGGGRRSVRRQGLREAARLLRHASSGRMMMREPSMLVREAAAEQLEERQSDWAYSKPVVVLDFVWNLAFVVVATAVLVLSSDENPNMPLRVWIIGYGLQCMMHMVCVCVEYRRRNSRRRRDLSPRSSSSSSSSSSSMDEEEGLGLSRNSDERYLELGQLENENNSFAKHLESANTMISFIWWVIGFYWVSSGGQELAQGSPQLYWLCIVFLGFDVFFVVFCVALACVIGIAVCCCLPCIIAVLYAVAEQEGASKEDIDQLTKFKFRKVGDTMKHTVDEEQGEGDSGGVMTECGTDSPVEHALPHEDAECCICLSAYEDETELRELPCGHHFHCGCVDKWLYINATCPLCKYNILKSSNYEEGEEV

SEQ ID NO: 34962 - protein, 338 aa, Arabidopsis thaliana
  peptide (1)..(338): Ceres Seq. ID no. 12370523
  misc_feature (282)..(322): Pfam Name: Zinc finger, C3HC4 type (RING finger) Pfam Description: Zinc finger, C3HC4 type (RING finger)
  misc_feature (3)..(338): Homolog of NCBI NO: 38344371 NR Description: OSJNBb0032E06.5 [Oryza sativa (japonica
  misc_feature (281)..(333): Homolog of NCBI NO: 7487667 NR Description: hypothetical protein T5C23.110 - Arabidopsis
  misc_feature (1)..(280): Homolog of NCBI NO: 7487667 NR Description: hypothetical protein T5C23.110 - Arabidopsis
  misc_feature (1)..(333): Homolog of NCBI NO: 18413629 NR Description: putative protein
  misc_feature (1)..(137): Homolog of NCBI NO: 15222059 NR Description: unknown protein; protein id: At1g12760.1
  misc_feature (163)..(338): Homolog of NCBI NO: 15222059 NR Description: unknown protein; protein id: At1g12760.1
  misc_feature (1)..(338): Homolog of NCBI NO: 9502381 NR Description: T12C24.29 [Arabidopsis thaliana]
  misc_feature (1)..(338): Homolog of NCBI NO: 16604388 NR Description: At1g63170/F16M19_7 [Arabidopsis thaliana]
  misc_feature (1)..(338): Homolog of NCBI NO: 18407748 NR Description: expressed protein
  misc_feature (1)..(338): Homolog of NCBI NO: 21554228 NR Description: unknown [Arabidopsis thaliana]
MMMREPSMLVREAAAEQLEERQSDWAYSKPVVVLDFVWNLAFVVVATAVLVLSSDENPNMPLRVWIIGYGLQCMMHMVCVCVEYRRRNSRRRRDLSPRSSSSSSSSSSSMDEEEGLGLSRNSDERYLELGQLENENNSFAKHLESANTMISFIWWVIGFYWVSSGGQELAQGSPQLYWLCIVFLGFDVFFVVFCVALACVIGIAVCCCLPCIIAVLYAVAEQEGASKEDIDQLTKFKFRKVGDTMKHTVDEEQGEGDSGGVMTECGTDSPVEHALPHEDAECCICLSAYEDETELRELPCGHHFHCGCVDKWLYINATCPLCKYNILKSSNYEEGEEV

SEQ ID NO: 34963 - protein, 337 aa, Arabidopsis thaliana
  peptide (1)..(337): Ceres Seq. ID no. 12370524
  misc_feature (281)..(321): Pfam Name: Zinc finger, C3HC4 type (RING finger) Pfam Description: Zinc finger, C3HC4 type (RING finger)
  misc_feature (2)..(337): Homolog of NCBI NO: 38344371 NR Description: OSJNBb0032E06.5 [Oryza sativa (japonica
  misc_feature (280)..(332): Homolog of NCBI NO: 7487667 NR Description: hypothetical protein T5C23.110 - Arabidopsis
  misc_feature (1)..(279): Homolog of NCBI NO: 7487667 NR Description: hypothetical protein T5C23.110 - Arabidopsis
  misc_feature (1)..(332): Homolog of NCBI NO: 18413629 NR Description: putative protein
  misc_feature (1)..(136): Homolog of NCBI NO: 15222059 NR Description: unknown protein; protein id: At1g12760.1
  misc_feature (162)..(337): Homolog of NCBI NO: 15222059 NR Description: unknown protein; protein id: At1g12760.1
  misc_feature (1)..(337): Homolog of NCBI NO: 9502381 NR Description: T12C24.29 [Arabidopsis thaliana]
  misc_feature (1)..(337): Homolog of NCBI NO: 16604388 NR Description: At1g63170/F16M19_7 [Arabidopsis thaliana]
  misc_feature (1)..(337): Homolog of NCBI NO: 18407748 NR Description: expressed protein
  misc_feature (1)..(337): Homolog of NCBI NO: 21554228 NR Description: unknown [Arabidopsis thaliana]
MMREPSMLVREAAAEQLEERQSDWAYSKPVVVLDFVWNLAFVVVATAVLVLSSDENPNMPLRVWIIGYGLQCMMHMVCVCVEYRRRNSRRRRDLSPRSSSSSSSSSSSMDEEEGLGLSRNSDERYLELGQLENENNSFAKHLESANTMISFIWWVIGFYWVSSGGQELAQGSPQLYWLCIVFLGFDVFFVVFCVALACVIGIAVCCCLPCIIAVLYAVAEQEGASKEDIDQLTKFKFRKVGDTMKHTVDEEQGEGDSGGVMTECGTDSPVEHALPHEDAECCICLSAYEDETELRELPCGHHFHCGCVDKWLYINATCPLCKYNILKSSNYEEGEEV

SEQ ID NO: 34964 - DNA, 1613 bp, Arabidopsis thaliana
  misc_feature (1)..(1613): Ceres Seq. ID no. 12396205
  misc_feature: MA Experiment ID: 108463 Result: Up-regulated in Transcription
  misc_feature: MA Experiment 108463 PARAMETER Experiment Name: At_Germinating_Seeds_cDNA_P Parameter: Age (day) Value: 3 vs. 0
  misc_feature: MA Experiment 108463 PARAMETER Experiment Name: At_Germinating_Seeds_cDNA_P Parameter: Tissue Value: Germinating Seeds
  misc_feature: MA Experiment ID: 108464 Result: Up-regulated in Transcription
  misc_feature: MA Experiment 108464 PARAMETER Experiment Name: At_Germinating_Seeds_cDNA_P Parameter: Age (day) Value: 4 vs. 0
  misc_feature: MA Experiment 108464 PARAMETER Experiment Name: At_Germinating_Seeds_cDNA_P Parameter: Tissue Value: Germinating Seeds
  misc_feature: MA Experiment ID: 108489 Result: Up-regulated in Transcription
  misc_feature: MA Experiment ID: 20000182 Result: Up-regulated in Transcription
  misc_feature: MA Experiment 20000182 PARAMETER Experiment Name: At_2mM_SA_P Parameter: Age (day) Value: 14
  misc_feature: MA Experiment 20000182 PARAMETER Experiment Name: At_2mM_SA_P Parameter: Organism Value: A. thaliana
  misc_feature: MA Experiment 20000182 PARAMETER Experiment Name: At_2mM_SA_P Parameter: Plant Line Value: WS
  misc_feature: MA Experiment 20000182 PARAMETER Experiment Name: At_2mM_SA_P Parameter: Timepoint (hr) Value: 6
  misc_feature: MA Experiment 20000182 PARAMETER Experiment Name: At_2mM_SA_P Parameter: Tissue Value: Aerial
  misc_feature: MA Experiment 20000182 PARAMETER Experiment Name: At_2mM_SA_P Parameter: Treatment Value: 2mM SA vs. No Treatment
  misc_feature: MA Experiment ID: 20000224 Result: Down-regulated in Transcription
  misc_feature: MA Experiment ID: 20000527 Result: Down-regulated in Transcription
  misc_feature: MA Experiment 20000527 PARAMETER Experiment Name: At_10percent_PEG_P Parameter: Age (day) Value: 20
  misc_feature: MA Experiment 20000527 PARAMETER Experiment Name: At_10percent_PEG_P Parameter: Organism Value: A. thaliana
  misc_feature: MA Experiment 20000527 PARAMETER Experiment Name: At_10percent_PEG_P Parameter: Plant Line Value: WS
  misc_feature: MA Experiment 20000527 PARAMETER Experiment Name: At_10percent_PEG_P Parameter: Timepoint (day) Value: 20
  misc_feature: MA Experiment 20000527 PARAMETER Experiment Name: At_10percent_PEG_P Parameter: Tissue Value: Whole Plant
  misc_feature: MA Experiment 20000527 PARAMETER Experiment Name: At_10percent_PEG_P Parameter: Treatment Value: 10percent PEG vs. No Treatment
  misc_feature: MA Experiment ID: 20001757 Result: Down-regulated in Transcription
  misc_feature: MA Experiment 20001757 PARAMETER Experiment Name: At_50mM_NH4NO3_L-to-H_P Parameter: Timepoint (hr) Value: 6
  misc_feature: MA Experiment 20001757 PARAMETER Experiment Name: At_50mM_NH4NO3_L-to-H_P Parameter: Tissue Value: Leaf
  misc_feature: MA Experiment 20001757 PARAMETER Experiment Name: At_50mM_NH4NO3_L-to-H_P Parameter: Treatment Value: 50mM NH4NO3 vs 100mM Mannitol
atgcacaatcattcccactaatagtttaataaagtgtataattttttttcaaattaaaacagctaaacacacacaaccacattcaaaaaggggttaagcattgaagaatattctaagaaaaattgtttctcttcttcaagaagtaaaagcgtctctctctctcattaagcatcaaaggagtttcgtttttcttgctttgctgttacattcttcaggaaaaaggcgttacctttactctctctgcatcaacgaggaagcgtgtagaaactaaaggagcttaatttgagagatttttttttttgtttctgggtttgttcaaagatgcaaatttttagttgcttctgctgtggaaaaggatttgatcggcaaaagaaggtgaaaacggagccatcgtggaggatcttttcactcaaggaacttcacgcagcaacaaacagttttaattacgataacaagctcggtgaaggcagatttggcagtgtgtattggggtcagctatgggatggatctcaaattgcagtcaagagattgaaggcatggagtagcagagaagagatagattttgctgtagaagtcgagattcttgctcgtatccgtcacaagaatctattgagtgtacgaggttactgtgcagaaggacaagaacgactcattgtatatgattacatgccaaatttgagcttggtctctcatcttcatggtcaacattcatctgagtcgcttcttgattggactaggcggatgaatattgctgtatcttctgctcaggcgattgcctacttgcatcattttgcaacacctagaatagtccatggagatgtgagagcaagcaatgtgctgctagattctgagtttgaagctcgggttacagatttcggatacgataagctgatgccagatgatggagctaacaaaagcaccaagggtaataacattgggtatctctcaccagaatgtatcgaatctggaaaagaatcagacatgggagatgtgtatagtttcggtgttcttttgctggagcttgtaactggtaagagacctacagagagggtaaacttaacaacaaagaggggtattaccgaatgggttttacctcttgtttacgaaagaaagtttggtgaaattgtggatcaaaggctgaatgggaagtatgtggaagaagagctgaaaaggatagttttggttggtctcatgtgtgctcagagggagtcagagaagagaccaacaatgtctgaagttgtggagatgctaatgattgaatcaaaggagaaaatggctcagcttgaagctaatccactcttcaatggaaacaatgatggtgaagttatagatgaaagctcagagatcatttctgaagtgagagatcatcaataacaagaacaagaatgttattcaaattcacgcattcttgttttcttttgctagaatctggtttttggttgtgcttgtttttagaagagtgtttgtgcttgtttttagaatagcgaagttgggttttaaaagtttattgtgtattttttttcagcttaagattggattttgatcattgatatttgagcttgtaagagagtgtagtggtacatatttggtatttatgagaaagtttttctgac

SEQ ID NO: 34965 - protein, 350 aa, Arabidopsis thaliana
  peptide (1)..(350): Ceres Seq. ID no. 12396206
  misc_feature (28)..(345): Homolog of NCBI NO: 7488244 NR Description: protein kinase homolog F17M5.190 - Arabidopsis
  misc_feature (28)..(310): Homolog of NCBI NO: 9294048 NR Description: protein kinase-like protein [Arabidopsis thaliana]
  misc_feature (7)..(310): Homolog of NCBI NO: 15230129 NR Description: protein kinase, putative; protein id: At3g24540.1
  misc_feature (26)..(310): Homolog of NCBI NO: 34894174 NR Description: putative protein kinase [Oryza sativa (japonica
  misc_feature (28)..(334): Homolog of NCBI NO: 15223161 NR Description: putative protein kinase; protein id: At1g70460.1
  misc_feature (1)..(327): Homolog of NCBI NO: 34898392 NR Description: ESTs C22458(C62866),C22459(C62866) correspond to region of the predicted gene.~Similar to genomic sequence of
  misc_feature (1)..(350): Homolog of NCBI NO: 18400939 NR Description: protein kinase, putative
  misc_feature (1)..(350): Homolog of NCBI NO: 21593950 NR Description: protein kinase, putative [Arabidopsis thaliana]
  misc_feature (15)..(350): Homolog of NCBI NO: 25287618 NR Description: hypothetical protein F6D8.24 [imported] -
  misc_feature (1)..(350): Homolog of NCBI NO: 30695267 NR Description: protein kinase, putative [Arabidopsis thaliana]
MQIFSCFCCGKGFDRQKKVKTEPSWRIFSLKELHAATNSFNYDNKLGEGRFGSVYWGQLWDGSQIAVKRLKAWSSREEIDFAVEVEILARIRHKNLLSVRGYCAEGQERLIVYDYMPNLSLVSHLHGQHSSESLLDWTRRMNIAVSSAQAIAYLHHFATPRIVHGDVRASNVLLDSEFEARVTDFGYDKLMPDDGANKSTKGNNIGYLSPECIESGKESDMGDVYSFGVLLLELVTGKRPTERVNLTTKRGITEWVLPLVYERKFGEIVDQRLNGKYVEEELKRIVLVGLMCAQRESEKRPTMSEVVEMLMIESKEKMAQLEANPLFNGNNDGEVIDESSEIISEVRDHQ

SEQ ID NO: 34966 - protein, 235 aa, Arabidopsis thaliana
  peptide (1)..(235): Ceres Seq. ID no. 12396207
  misc_feature (1)..(230): Homolog of NCBI NO: 7488244 NR Description: protein kinase homolog F17M5.190 - Arabidopsis
  misc_feature (1)..(195): Homolog of NCBI NO: 9294048 NR Description: protein kinase-like protein [Arabidopsis thaliana]
  misc_feature (1)..(195): Homolog of NCBI NO: 15230129 NR Description: protein kinase, putative; protein id: At3g24540.1
  misc_feature (1)..(195): Homolog of NCBI NO: 34894174 NR Description: putative protein kinase [Oryza sativa (japonica
  misc_feature (1)..(219): Homolog of NCBI NO: 15223161 NR Description: putative protein kinase; protein id: At1g70460.1
  misc_feature (1)..(212): Homolog of NCBI NO: 34898392 NR Description: ESTs C22458(C62866),C22459(C62866) correspond to region of the predicted gene.~Similar to genomic sequence of
  misc_feature (1)..(235): Homolog of NCBI NO: 18400939 NR Description: protein kinase, putative
  misc_feature (1)..(235): Homolog of NCBI NO: 21593950 NR Description: protein kinase, putative [Arabidopsis thaliana]
  misc_feature (1)..(235): Homolog of NCBI NO: 25287618 NR Description: hypothetical protein F6D8.24 [imported] -
  misc_feature (1)..(235): Homolog of NCBI NO: 30695267 NR Description: protein kinase, putative [Arabidopsis thaliana]
MPNLSLVSHLHGQHSSESLLDWTRRMNIAVSSAQAIAYLHHFATPRIVHGDVRASNVLLDSEFEARVTDFGYDKLMPDDGANKSTKGNNIGYLSPECIESGKESDMGDVYSFGVLLLELVTGKRPTERVNLTTKRGITEWVLPLVYERKFGEIVDQRLNGKYVEEELKRIVLVGLMCAQRESEKRPTMSEVVEMLMIESKEKMAQLEANPLFNGNNDGEVIDESSEIISEVRDHQ

SEQ ID NO: 34967 - protein, 210 aa, Arabidopsis thaliana
  peptide (1)..(210): Ceres Seq. ID no. 12396208
  misc_feature (1)..(205): Homolog of NCBI NO: 7488244 NR Description: protein kinase homolog F17M5.190 - Arabidopsis
  misc_feature (1)..(170): Homolog of NCBI NO: 9294048 NR Description: protein kinase-like protein [Arabidopsis thaliana]
  misc_feature (1)..(170): Homolog of NCBI NO: 15230129 NR Description: protein kinase, putative; protein id: At3g24540.1
  misc_feature (1)..(170): Homolog of NCBI NO: 34894174 NR Description: putative protein kinase [Oryza sativa (japonica
  misc_feature (1)..(194): Homolog of NCBI NO: 15223161 NR Description: putative protein kinase; protein id: At1g70460.1
  misc_feature (1)..(187): Homolog of NCBI NO: 34898392 NR Description: ESTs C22458(C62866),C22459(C62866) correspond to region of the predicted gene.~Similar to genomic sequence of
  misc_feature (1)..(210): Homolog of NCBI NO: 18400939 NR Description: protein kinase, putative
  misc_feature (1)..(210): Homolog of NCBI NO: 21593950 NR Description: protein kinase, putative [Arabidopsis thaliana]
  misc_feature (1)..(210): Homolog of NCBI NO: 25287618 NR Description: hypothetical protein F6D8.24 [imported] -
  misc_feature (1)..(210): Homolog of NCBI NO: 30695267 NR Description: protein kinase, putative [Arabidopsis thaliana]
MNIAVSSAQAIAYLHHFATPRIVHGDVRASNVLLDSEFEARVTDFGYDKLMPDDGANKSTKGNNIGYLSPECIESGKESDMGDVYSFGVLLLELVTGKRPTERVNLTTKRGITEWVLPLVYERKFGEIVDQRLNGKYVEEELKRIVLVGLMCAQRESEKRPTMSEVVEMLMIESKEKMAQLEANPLFNGNNDGEVIDESSEIISEVRDHQ

SEQ ID NO: 34968 - DNA, 717 bp, Arabidopsis thaliana
  misc_feature (1)..(717): Ceres Seq. ID no. 15178664
  misc_feature: MA Experiment ID: 108434 Result: Up-regulated in Transcription
  misc_feature: MA Experiment 108434 PARAMETER Experiment Name: At_Root_Tips_cDNA_P Parameter: Tissue Value: Root Tips
  misc_feature: MA Experiment ID: 108435 Result: Down-regulated in Transcription
  misc_feature: MA Experiment 108435 PARAMETER Experiment Name: At_stm_Mutants_cDNA_P Parameter: Plant Line Value: wt Landsburg vs stm
  misc_feature: MA Experiment 108435 PARAMETER Experiment Name: At_stm_Mutants_cDNA_P Parameter: Tissue Value: Shoot Apical Meristem Region
  misc_feature: MA Experiment ID: 108461 Result: Up-regulated in Transcription
  misc_feature: MA Experiment 108461 PARAMETER Experiment Name: At_Germinating_Seeds_cDNA_P Parameter: Age (day) Value: 1 vs. 0
  misc_feature: MA Experiment 108461 PARAMETER Experiment Name: At_Germinating_Seeds_cDNA_P Parameter: Tissue Value: Germinating Seeds
  misc_feature: MA Experiment ID: 108462 Result: Up-regulated in Transcription
  misc_feature: MA Experiment 108462 PARAMETER Experiment Name: At_Germinating_Seeds_cDNA_P Parameter: Age (day) Value: 2 vs. 0
  misc_feature: MA Experiment 108462 PARAMETER Experiment Name: At_Germinating_Seeds_cDNA_P Parameter: Tissue Value: Germinating Seeds
  misc_feature: MA Experiment ID: 108488 Result: Up-regulated in Transcription
  misc_feature: MA Experiment ID: 108595 Result: Down-regulated in Transcription
  misc_feature: MA Experiment 108595 PARAMETER Experiment Name: At_Ler-pi_Ovule_cDNA_P Parameter: Plant Line Value: null
  misc_feature: MA Experiment ID: 20000071 Result: Down-regulated in Transcription
  misc_feature: MA Experiment 20000071 PARAMETER Experiment Name: At_100uM_ABA_Mutants_cDNA_P Parameter: Plant Line Value: CS8104
  misc_feature: MA Experiment 20000071 PARAMETER Experiment Name: At_100uM_ABA_Mutants_cDNA_P Parameter: Timepoint (hr) Value: 6
  misc_feature: MA Experiment 20000071 PARAMETER Experiment Name: At_100uM_ABA_Mutants_cDNA_P Parameter: Tissue Value: Aerial
  misc_feature: MA Experiment 20000071 PARAMETER Experiment Name: At_100uM_ABA_Mutants_cDNA_P Parameter: Treatment Value: 100uM ABA vs. No Treatment
  misc_feature: MA Experiment ID: 20000117 Result: Down-regulated in Transcription
  misc_feature: MA Experiment 20000117 PARAMETER Experiment Name: At_100uM_ABA_Mutants_cDNA_P Parameter: Plant Line Value: Columbia
  misc_feature: MA Experiment 20000117 PARAMETER Experiment Name: At_100uM_ABA_Mutants_cDNA_P Parameter: Timepoint (hr) Value: 6
  misc_feature: MA Experiment 20000117 PARAMETER Experiment Name: At_100uM_ABA_Mutants_cDNA_P Parameter: Tissue Value: Aerial
  misc_feature: MA Experiment 20000117 PARAMETER Experiment Name: At_100uM_ABA_Mutants_cDNA_P Parameter: Treatment Value: 100uM ABA vs. No Treatment
  misc_feature: MA Experiment ID: 20000180 Result: Up-regulated in Transcription
  misc_feature: MA Experiment 20000180 PARAMETER Experiment Name: At_Germinating_Seeds_P Parameter: Age (hr) Value: 24 vs. 0
  misc_feature: MA Experiment 20000180 PARAMETER Experiment Name: At_Germinating_Seeds_P Parameter: Tissue Value: Germinating Seeds
  misc_feature: MA Experiment ID: 20000184 Result: Up-regulated in Transcription
  misc_feature: MA Experiment 20000184 PARAMETER Experiment Name: At_Shoots__P Parameter: Age (day) Value: 7
  misc_feature: MA Experiment 20000184 PARAMETER Experiment Name: At_Shoots__P Parameter: Tissue Value: Shoots vs. Whole Plant
  misc_feature: MA Experiment ID: 20000185 Result: Down-regulated in Transcription
  misc_feature: MA Experiment 20000185 PARAMETER Experiment Name: At_Roots__P Parameter: Age (day) Value: 7 vs. 21
  misc_feature: MA Experiment 20000185 PARAMETER Experiment Name: At_Roots__P Parameter: Organism Value: A. thaliana
  misc_feature: MA Experiment 20000185 PARAMETER Experiment Name: At_Roots__P Parameter: Tissue Value: Roots vs. Whole Plant
  misc_feature: MA Experiment ID: 20000224 Result: Up-regulated in Transcription
  misc_feature: MA Experiment ID: 20000227 Result: Up-regulated in Transcription
  misc_feature: MA Experiment 20000227 PARAMETER Experiment Name: At_Root-Tips-vs-Tops_P Parameter: Tissue Value: Root Tips vs. Root Tops
  misc_feature: MA Experiment ID: 20000437 Result: Down-regulated in Transcription
  misc_feature: MA Experiment 20000437 PARAMETER Experiment Name: At_Drought_P Parameter: Age (day) Value: 8
  misc_feature: MA Experiment 20000437 PARAMETER Experiment Name: At_Drought_P Parameter: Organism Value: A. thaliana
  misc_feature: MA Experiment 20000437 PARAMETER Experiment Name: At_Drought_P Parameter: Plant Line Value: WS
  misc_feature: MA Experiment 20000437 PARAMETER Experiment Name: At_Drought_P Parameter: Timepoint (hr) Value: 24
  misc_feature: MA Experiment 20000437 PARAMETER Experiment Name: At_Drought_P Parameter: Tissue Value: Whole Plant
  misc_feature: MA Experiment 20000437 PARAMETER Experiment Name: At_Drought_P Parameter: Treatment Value: Drought vs. No Drought
  misc_feature: MA Experiment ID: 20000438 Result: Up-regulated in Transcription
  misc_feature: MA Experiment 20000438 PARAMETER Experiment Name: At_Shoots__P Parameter: Age (day) Value: 14
  misc_feature: MA Experiment 20000438 PARAMETER Experiment Name: At_Shoots__P Parameter: Tissue Value: Shoots vs. Whole Plant
  misc_feature: MA Experiment ID: 20000439 Result: Down-regulated in Transcription
  misc_feature: MA Experiment 20000439 PARAMETER Experiment Name: At_Roots__P Parameter: Age (day) Value: 14 vs. 21
  misc_feature: MA Experiment 20000439 PARAMETER Experiment Name: At_Roots__P Parameter: Organism Value: A. thaliana
  misc_feature: MA Experiment 20000439 PARAMETER Experiment Name: At_Roots__P Parameter: Tissue Value: Roots vs. Whole Plant
  misc_feature: MA Experiment ID: 20000794 Result: Down-regulated in Transcription
  misc_feature: MA Experiment 20000794 PARAMETER Experiment Name: At_Petals_P Parameter: Age (day) Value: 23-25 days
  misc_feature: MA Experiment 20000794 PARAMETER Experiment Name: At_Petals_P Parameter: Plant Line Value: WS
  misc_feature: MA Experiment 20000794 PARAMETER Experiment Name: At_Petals_P Parameter: Tissue Value: Petals vs. Whole plant
  misc_feature: MA Experiment ID: 20001757 Result: Up-regulated in Transcription
  misc_feature: MA Experiment 20001757 PARAMETER Experiment Name: At_50mM_NH4NO3_L-to-H_P Parameter: Timepoint (hr) Value: 6
  misc_feature: MA Experiment 20001757 PARAMETER Experiment Name: At_50mM_NH4NO3_L-to-H_P Parameter: Tissue Value: Leaf
  misc_feature: MA Experiment 20001757 PARAMETER Experiment Name: At_50mM_NH4NO3_L-to-H_P Parameter: Treatment Value: 50mM NH4NO3 vs 100mM Mannitol
  misc_feature: MA Experiment ID: 20001906 Result: Down-regulated in Transcription
  misc_feature: MA Experiment 20001906 PARAMETER Experiment Name: At_Drought_Reproduction_P Parameter: Age (day) Value: 35
  misc_feature: MA Experiment 20001906 PARAMETER Experiment Name: At_Drought_Reproduction_P Parameter: Organism Value: A. thaliana
  misc_feature: MA Experiment 20001906 PARAMETER Experiment Name: At_Drought_Reproduction_P Parameter: Plant Line Value: WS
  misc_feature: MA Experiment 20001906 PARAMETER Experiment Name: At_Drought_Reproduction_P Parameter: Timepoint (day) Value: 5
  misc_feature: MA Experiment 20001906 PARAMETER Experiment Name: At_Drought_Reproduction_P Parameter: Tissue Value: Siliques
  misc_feature: MA Experiment 20001906 PARAMETER Experiment Name: At_Drought_Reproduction_P Parameter: Treatment Value: Drought vs. No Drought
aattcaatctcttccaatttctcttcttcttcctcgcgacgcgttaatggcggcttcgttctcactcacgagcttcatctccttcatctcaccattcaaatctcaaaccaaacctacaccaccaccaaatctcactcttccttctccaacaatctcccaaaggcgaagaaatgatctcgctatcgaatcaatggcggtcgaagaatcttcttcaaccgcttcttcactttcctctgagcttgcttctgtgatatgcccctcgcttgcttactccaacacgctcttcttcagttctggatacaatgtgcaagtgtttgttgaagataacgagtcagaggagaggcttgtgaatcgatttaggagagaagtgatgagaactggtgttatacaggaatgtaagaggagaagatactttgagaataaacaagatgagaagaaacgtaggactcgtgatgctgctaagcgtaataagaaaaggcgtcctcaagcaaggtttactcaagaaacaagagaagaagcagcagcagcaactaagagtaagaaaaaagatgaggaagaagacaactgggagatgcctggtggagatgtaccttcttgaaacacgattttagtatataaaatctccggtcttttggttaaatttcgtattatcccgtttttattacttggtacattgtgagttggaaatgtgtttactgcacaaaaaaaaaaaaaaaa

SEQ ID NO: 34969 - protein, 198 aa, Arabidopsis thaliana
  peptide (1)..(198): Ceres Seq. ID no. 15178665
  misc_feature (102)..(155): Pfam Name: Ribosomal protein S21 Pfam Description: Ribosomal protein S21
  misc_feature (13)..(159): Homolog of NCBI NO: 15242698 NR Description: hypothetical protein [Arabidopsis thaliana]
  misc_feature (21)..(198): Homolog of NCBI NO: 17154781 NR Description: ribosome-like protein [Cucumis sativus]
  misc_feature (16)..(198): Homolog of NCBI NO: 14532554 NR Description: AT3g27160/MYF5_3 [Arabidopsis thaliana]
  misc_feature (16)..(198): Homolog of NCBI NO: 18405254 NR Description: expressed protein [Arabidopsis thaliana]
IQSLPISLLLPRDALMAASFSLTSFISFISPFKSQTKPTPPPNLTLPSPTISQRRRNDLAIESMAVEESSSTASSLSSELASVICPSLAYSNTLFFSSGYNVQVFVEDNESEERLVNRFRREVMRTGVIQECKRRRYFENKQDEKKRRTRDAAKRNKKRRPQARFTQETREEAAAATKSKKKDEEEDNWEMPGGDVPS

SEQ ID NO: 34970 - protein, 183 aa, Arabidopsis thaliana
  peptide (1)..(183): Ceres Seq. ID no. 15178666
  misc_feature (87)..(140): Pfam Name: Ribosomal protein S21 Pfam Description: Ribosomal protein S21
  misc_feature (1)..(144): Homolog of NCBI NO: 15242698 NR Description: hypothetical protein [Arabidopsis thaliana]
  misc_feature (6)..(183): Homolog of NCBI NO: 17154781 NR Description: ribosome-like protein [Cucumis sativus]
  misc_feature (1)..(183): Homolog of NCBI NO: 14532554 NR Description: AT3g27160/MYF5_3 [Arabidopsis thaliana]
  misc_feature (1)..(183): Homolog of NCBI NO: 18405254 NR Description: expressed protein [Arabidopsis thaliana]
MAASFSLTSFISFISPFKSQTKPTPPPNLTLPSPTISQRRRNDLAIESMAVEESSSTASSLSSELASVICPSLAYSNTLFFSSGYNVQVFVEDNESEERLVNRFRREVMRTGVIQECKRRRYFENKQDEKKRRTRDAAKRNKKRRPQARFTQETREEAAAATKSKKKDEEEDNWEMPGGDVPS

SEQ ID NO: 34971 - protein, 135 aa, Arabidopsis thaliana
  peptide (1)..(135): Ceres Seq. ID no. 15178667
  misc_feature (39)..(92): Pfam Name: Ribosomal protein S21 Pfam Description: Ribosomal protein S21
  misc_feature (1)..(96): Homolog of NCBI NO: 15242698 NR Description: hypothetical protein [Arabidopsis thaliana]
  misc_feature (1)..(135): Homolog of NCBI NO: 17154781 NR Description: ribosome-like protein [Cucumis sativus]
  misc_feature (1)..(135): Homolog of NCBI NO: 14532554 NR Description: AT3g27160/MYF5_3 [Arabidopsis thaliana]
  misc_feature (1)..(135): Homolog of NCBI NO: 18405254 NR Description: expressed protein [Arabidopsis thaliana]
MAVEESSSTASSLSSELASVICPSLAYSNTLFFSSGYNVQVFVEDNESEERLVNRFRREVMRTGVIQECKRRRYFENKQDEKKRRTRDAAKRNKKRRPQARFTQETREEAAAATKSKKKDEEEDNWEMPGGDVPS

SEQ ID NO: 34972 - DNA, 764 bp, Arabidopsis thaliana
  misc_feature (1)..(764): Ceres Seq. ID no. 12393115
  misc_feature: MA Experiment ID: 108461 Result: Up-regulated in Transcription
  misc_feature: MA Experiment 108461 PARAMETER Experiment Name: At_Germinating_Seeds_cDNA_P Parameter: Age (day) Value: 1 vs. 0
  misc_feature: MA Experiment 108461 PARAMETER Experiment Name: At_Germinating_Seeds_cDNA_P Parameter: Tissue Value: Germinating Seeds
  misc_feature: MA Experiment ID: 108462 Result: Up-regulated in Transcription
  misc_feature: MA Experiment 108462 PARAMETER Experiment Name: At_Germinating_Seeds_cDNA_P Parameter: Age (day) Value: 2 vs. 0
  misc_feature: MA Experiment 108462 PARAMETER Experiment Name: At_Germinating_Seeds_cDNA_P Parameter: Tissue Value: Germinating Seeds
  misc_feature: MA Experiment ID: 108463 Result: Up-regulated in Transcription
  misc_feature: MA Experiment 108463 PARAMETER Experiment Name: At_Germinating_Seeds_cDNA_P Parameter: Age (day) Value: 3 vs. 0
  misc_feature: MA Experiment 108463 PARAMETER Experiment Name: At_Germinating_Seeds_cDNA_P Parameter: Tissue Value: Germinating Seeds
  misc_feature: MA Experiment ID: 108464 Result: Up-regulated in Transcription
  misc_feature: MA Experiment 108464 PARAMETER Experiment Name: At_Germinating_Seeds_cDNA_P Parameter: Age (day) Value: 4 vs. 0
  misc_feature: MA Experiment 108464 PARAMETER Experiment Name: At_Germinating_Seeds_cDNA_P Parameter: Tissue Value: Germinating Seeds
  misc_feature: MA Experiment ID: 108488 Result: Up-regulated in Transcription
  misc_feature: MA Experiment ID: 20000180 Result: Up-regulated in Transcription
  misc_feature: MA Experiment 20000180 PARAMETER Experiment Name: At_Germinating_Seeds_P Parameter: Age (hr) Value: 24 vs. 0
  misc_feature: MA Experiment 20000180 PARAMETER Experiment Name: At_Germinating_Seeds_P Parameter: Tissue Value: Germinating Seeds
  misc_feature: MA Experiment ID: 20000185 Result: Down-regulated in Transcription
  misc_feature: MA Experiment 20000185 PARAMETER Experiment Name: At_Roots__P Parameter: Age (day) Value: 7 vs. 21
  misc_feature: MA Experiment 20000185 PARAMETER Experiment Name: At_Roots__P Parameter: Organism Value: A. thaliana
  misc_feature: MA Experiment 20000185 PARAMETER Experiment Name: At_Roots__P Parameter: Tissue Value: Roots vs. Whole Plant
  misc_feature: MA Experiment ID: 20000439 Result: Down-regulated in Transcription
  misc_feature: MA Experiment 20000439 PARAMETER Experiment Name: At_Roots__P Parameter: Age (day) Value: 14 vs. 21
  misc_feature: MA Experiment 20000439 PARAMETER Experiment Name: At_Roots__P Parameter: Organism Value: A. thaliana
  misc_feature: MA Experiment 20000439 PARAMETER Experiment Name: At_Roots__P Parameter: Tissue Value: Roots vs. Whole Plant
  misc_feature: MA Experiment ID: 20000451 Result: Down-regulated in Transcription
  misc_feature: MA Experiment 20000451 PARAMETER Experiment Name: At_CS6879_Shoots-Roots_P Parameter: Age (day) Value: 14
  misc_feature: MA Experiment 20000451 PARAMETER Experiment Name: At_CS6879_Shoots-Roots_P Parameter: Organism Value: A. thaliana
  misc_feature: MA Experiment 20000451 PARAMETER Experiment Name: At_CS6879_Shoots-Roots_P Parameter: Plant Line Value: CS6879 vs. WS
  misc_feature: MA Experiment 20000451 PARAMETER Experiment Name: At_CS6879_Shoots-Roots_P Parameter: Tissue Value: Roots
  misc_feature: MA Experiment ID: 20000794 Result: Down-regulated in Transcription
  misc_feature: MA Experiment 20000794 PARAMETER Experiment Name: At_Petals_P Parameter: Age (day) Value: 23-25 days
  misc_feature: MA Experiment 20000794 PARAMETER Experiment Name: At_Petals_P Parameter: Plant Line Value: WS
  misc_feature: MA Experiment 20000794 PARAMETER Experiment Name: At_Petals_P Parameter: Tissue Value: Petals vs. Whole plant
  misc_feature: MA Experiment ID: 20001248 Result: Down-regulated in Transcription
  misc_feature: MA Experiment 20001248 PARAMETER Experiment Name: At_Far-red-induction_P Parameter: Age (day) Value: 7
  misc_feature: MA Experiment 20001248 PARAMETER Experiment Name: At_Far-red-induction_P Parameter: Light Value: Far-red vs. White
  misc_feature: MA Experiment 20001248 PARAMETER Experiment Name: At_Far-red-induction_P Parameter: Organism Value: A. thaliana
  misc_feature: MA Experiment 20001248 PARAMETER Experiment Name: At_Far-red-induction_P Parameter: Plant Line Value: Columbia
  misc_feature: MA Experiment 20001248 PARAMETER Experiment Name: At_Far-red-induction_P Parameter: Timepoint (hr) Value: 4
  misc_feature: MA Experiment 20001248 PARAMETER Experiment Name: At_Far-red-induction_P Parameter: Tissue Value: Whole Plant
  misc_feature: MA Experiment ID: 20001450 Result: Down-regulated in Transcription
  misc_feature: MA Experiment 20001450 PARAMETER Experiment Name: At_Far-red-induction_P Parameter: Age (day) Value: 7
  misc_feature: MA Experiment 20001450 PARAMETER Experiment Name: At_Far-red-induction_P Parameter: Light Value: Far-red vs. White
  misc_feature: MA Experiment 20001450 PARAMETER Experiment Name: At_Far-red-induction_P Parameter: Organism Value: A. thaliana
  misc_feature: MA Experiment 20001450 PARAMETER Experiment Name: At_Far-red-induction_P Parameter: Plant Line Value: Columbia
  misc_feature: MA Experiment 20001450 PARAMETER Experiment Name: At_Far-red-induction_P Parameter: Timepoint (hr) Value: 8
  misc_feature: MA Experiment 20001450 PARAMETER Experiment Name: At_Far-red-induction_P Parameter: Tissue Value: Whole Plant
  misc_feature: MA Experiment ID: 20001557 Result: Down-regulated in Transcription
  misc_feature: MA Experiment 20001557 PARAMETER Experiment Name: At_Drought_Soil_Dry_P Parameter: Age (day) Value: 27
  misc_feature: MA Experiment 20001557 PARAMETER Experiment Name: At_Drought_Soil_Dry_P Parameter: Organism Value: A. thaliana
  misc_feature: MA Experiment 20001557 PARAMETER Experiment Name: At_Drought_Soil_Dry_P Parameter: Plant Line Value: WS
  misc_feature: MA Experiment 20001557 PARAMETER Experiment Name: At_Drought_Soil_Dry_P Parameter: Post Timepoint (hr) Value: 3
  misc_feature: MA Experiment 20001557 PARAMETER Experiment Name: At_Drought_Soil_Dry_P Parameter: Post-Treatment Value: Re-Water vs. No Drought
  misc_feature: MA Experiment 20001557 PARAMETER Experiment Name: At_Drought_Soil_Dry_P Parameter: Timepoint (day) Value: 13
  misc_feature: MA Experiment 20001557 PARAMETER Experiment Name: At_Drought_Soil_Dry_P Parameter: Treatment Value: Drought vs. No Drought
  misc_feature: MA Experiment ID: 20001558 Result: Down-regulated in Transcription
  misc_feature: MA Experiment 20001558 PARAMETER Experiment Name: At_Drought_Soil_Dry_P Parameter: Age (day) Value: 27
  misc_feature: MA Experiment 20001558 PARAMETER Experiment Name: At_Drought_Soil_Dry_P Parameter: Organism Value: A. thaliana
  misc_feature: MA Experiment 20001558 PARAMETER Experiment Name: At_Drought_Soil_Dry_P Parameter: Plant Line Value: WS
  misc_feature: MA Experiment 20001558 PARAMETER Experiment Name: At_Drought_Soil_Dry_P Parameter: Post Timepoint (hr) Value: 6
  misc_feature: MA Experiment 20001558 PARAMETER Experiment Name: At_Drought_Soil_Dry_P Parameter: Post-Treatment Value: Re-Water vs. No Drought
  misc_feature: MA Experiment 20001558 PARAMETER Experiment Name: At_Drought_Soil_Dry_P Parameter: Timepoint (day) Value: 13
  misc_feature: MA Experiment 20001558 PARAMETER Experiment Name: At_Drought_Soil_Dry_P Parameter: Treatment Value: Drought vs. No Drought
  misc_feature: MA Experiment ID: 20001559 Result: Down-regulated in Transcription
  misc_feature: MA Experiment 20001559 PARAMETER Experiment Name: At_Drought_Soil_Dry_P Parameter: Age (day) Value: 28
  misc_feature: MA Experiment 20001559 PARAMETER Experiment Name: At_Drought_Soil_Dry_P Parameter: Organism Value: A. thaliana
  misc_feature: MA Experiment 20001559 PARAMETER Experiment Name: At_Drought_Soil_Dry_P Parameter: Plant Line Value: WS
  misc_feature: MA Experiment 20001559 PARAMETER Experiment Name: At_Drought_Soil_Dry_P Parameter: Post Timepoint (hr) Value: 29
  misc_feature: MA Experiment 20001559 PARAMETER Experiment Name: At_Drought_Soil_Dry_P Parameter: Post-Treatment Value: Re-Water vs. No Drought
  misc_feature: MA Experiment 20001559 PARAMETER Experiment Name: At_Drought_Soil_Dry_P Parameter: Timepoint (day) Value: 14
  misc_feature: MA Experiment 20001559 PARAMETER Experiment Name: At_Drought_Soil_Dry_P Parameter: Treatment Value: Drought vs. No Drought
  misc_feature: MA Experiment ID: 20001757 Result: Up-regulated in Transcription
  misc_feature: MA Experiment 20001757 PARAMETER Experiment Name: At_50mM_NH4NO3_L-to-H_P Parameter: Timepoint (hr) Value: 6
  misc_feature: MA Experiment 20001757 PARAMETER Experiment Name: At_50mM_NH4NO3_L-to-H_P Parameter: Tissue Value: Leaf
  misc_feature: MA Experiment 20001757 PARAMETER Experiment Name: At_50mM_NH4NO3_L-to-H_P Parameter: Treatment Value: 50mM NH4NO3 vs 100mM Mannitol
  misc_feature: MA Experiment ID: 20001904 Result: Down-regulated in Transcription
  misc_feature: MA Experiment 20001904 PARAMETER Experiment Name: At_Drought_Reproduction_P Parameter: Age (day) Value: 37
  misc_feature: MA Experiment 20001904 PARAMETER Experiment Name: At_Drought_Reproduction_P Parameter: Organism Value: A. thaliana
  misc_feature: MA Experiment 20001904 PARAMETER Experiment Name: At_Drought_Reproduction_P Parameter: Plant Line Value: WS
  misc_feature: MA Experiment 20001904 PARAMETER Experiment Name: At_Drought_Reproduction_P Parameter: Timepoint (day) Value: 7
  misc_feature: MA Experiment 20001904 PARAMETER Experiment Name: At_Drought_Reproduction_P Parameter: Tissue Value: Rosettes
  misc_feature: MA Experiment 20001904 PARAMETER Experiment Name: At_Drought_Reproduction_P Parameter: Treatment Value: Drought vs. No Drought
  misc_feature: MA Experiment ID: 20001906 Result: Down-regulated in Transcription
  misc_feature: MA Experiment 20001906 PARAMETER Experiment Name: At_Drought_Reproduction_P Parameter: Age (day) Value: 35
  misc_feature: MA Experiment 20001906 PARAMETER Experiment Name: At_Drought_Reproduction_P Parameter: Organism Value: A. thaliana
  misc_feature: MA Experiment 20001906 PARAMETER Experiment Name: At_Drought_Reproduction_P Parameter: Plant Line Value: WS
  misc_feature: MA Experiment 20001906 PARAMETER Experiment Name: At_Drought_Reproduction_P Parameter: Timepoint (day) Value: 5
  misc_feature: MA Experiment 20001906 PARAMETER Experiment Name: At_Drought_Reproduction_P Parameter: Tissue Value: Siliques
  misc_feature: MA Experiment 20001906 PARAMETER Experiment Name: At_Drought_Reproduction_P Parameter: Treatment Value: Drought vs. No Drought
aaccaaaaatttcttcgtctctgtctccaaaatcgaatcaaaatctctaaagtttcaatttttttgttctgttcttttttttttttaaagaatggcttcaatttctgcaactttgccttcgccattgttactcacacagagaaaatccaatctcacatcgattcaaaaactcccattttctctaactcgaggtacgaatgatctttctccattatctcttactcgaaaccctagcagcatcagtctgatggtgaaagctagtggagaaagctcagattcatcgactgatctcgacgttgttagtacgattcagaatgtttgggataagtctgaagataggttaggtcttattggtttgggttttgctggtattgtagctctttgggcatcattgaatctcatcacggcaattgacaaattgcccgttatctcgagcggattcgaactagttggtatcttgttctccacgtggttcacatatcgatatctcttgttcaaaccggacagacaggagctttcgaaaattgtcaagaaatcagtagcggatatacttggccagtgaaccttgtgtgtgtgataatactttcatctttggaagatgatttgtttgcaagtttgtaaaattacatgacagggtggttgttgtttctagtccaataatgtcatgcatttgaaacctgtaaatactttattgttggtttttggttgtgagcaaaatcaatcttttctaatttcaaagattctcttttatgattatacgtttt

SEQ ID NO: 34973 - protein, 156 aa, Arabidopsis thaliana
  peptide (1)..(156): Ceres Seq. ID no. 12393116
  misc_feature (68)..(154): Homolog of NCBI NO: 37536446 NR Description: hypothetical protein [Oryza sativa (japonica
  misc_feature (3)..(151): Homolog of NCBI NO: 18411555 NR Description: expressed protein
  misc_feature (3)..(151): Homolog of NCBI NO: 687677 NR Description: unknown
  misc_feature (46)..(143): Homolog of NCBI NO: 38175474 NR Description: unknown protein [Oryza sativa (japonica
  misc_feature (48)..(155): Homolog of NCBI NO: 34393236 NR Description: unknown protein [Oryza sativa (japonica
  misc_feature (1)..(155): Homolog of NCBI NO: 21555057 NR Description: unknown [Arabidopsis thaliana]
  misc_feature (1)..(155): Homolog of NCBI NO: 18407178 NR Description: expressed protein
  misc_feature (1)..(156): Homolog of NCBI NO: 34909746 NR Description: contains ESTs
  misc_feature (1)..(156): Homolog of NCBI NO: 21554231 NR Description: unknown [Arabidopsis thaliana]
  misc_feature (1)..(156): Homolog of NCBI NO: 18403896 NR Description: expressed protein
MASISATLPSPLLLTQRKSNLTSIQKLPFSLTRGTNDLSPLSLTRNPSSISLMVKASGESSDSSTDLDVVSTIQNVWDKSEDRLGLIGLGFAGIVALWASLNLITAIDKLPVISSGFELVGILFSTWFTYRYLLFKPDRQELSKIVKKSVADILGQ

SEQ ID NO: 34974 - protein, 104 aa, Arabidopsis thaliana
  peptide (1)..(104): Ceres Seq. ID no. 12393117
  misc_feature (16)..(102): Homolog of NCBI NO: 37536446 NR Description: hypothetical protein [Oryza sativa (japonica
  misc_feature (1)..(99): Homolog of NCBI NO: 18411555 NR Description: expressed protein
  misc_feature (1)..(99): Homolog of NCBI NO: 687677 NR Description: unknown
  misc_feature (1)..(91): Homolog of NCBI NO: 38175474 NR Description: unknown protein [Oryza sativa (japonica
  misc_feature (1)..(103): Homolog of NCBI NO: 34393236 NR Description: unknown protein [Oryza sativa (japonica
  misc_feature (1)..(103): Homolog of NCBI NO: 21555057 NR Description: unknown [Arabidopsis thaliana]
  misc_feature (1)..(103): Homolog of NCBI NO: 18407178 NR Description: expressed protein
  misc_feature (1)..(104): Homolog of NCBI NO: 34909746 NR Description: contains ESTs
  misc_feature (1)..(104): Homolog of NCBI NO: 21554231 NR Description: unknown [Arabidopsis thaliana]
  misc_feature (1)..(104): Homolog of NCBI NO: 18403896 NR Description: expressed protein
MVKASGESSDSSTDLDVVSTIQNVWDKSEDRLGLIGLGFAGIVALWASLNLITAIDKLPVISSGFELVGILFSTWFTYRYLLFKPDRQELSKIVKKSVADILGQ

SEQ ID NO: 34975 - DNA, 1616 bp, Arabidopsis thaliana
  misc_feature (1)..(1616): Ceres Seq. ID no. 13495890
  misc_feature: MA Experiment ID: 108434 Result: Up-regulated in Transcription
  misc_feature: MA Experiment 108434 PARAMETER Experiment Name: At_Root_Tips_cDNA_P Parameter: Tissue Value: Root Tips
  misc_feature: MA Experiment ID: 20000112 Result: Down-regulated in Transcription
  misc_feature: MA Experiment 20000112 PARAMETER Experiment Name: At_42deg_Heat_cDNA_P Parameter: Temperature (deg C) Value: 42 vs. 22
  misc_feature: MA Experiment 20000112 PARAMETER Experiment Name: At_42deg_Heat_cDNA_P Parameter: Timepoint (hr) Value: 2
  misc_feature: MA Experiment 20000112 PARAMETER Experiment Name: At_42deg_Heat_cDNA_P Parameter: Tissue Value: Aerial
  misc_feature: MA Experiment ID: 20000113 Result: Down-regulated in Transcription
  misc_feature: MA Experiment 20000113 PARAMETER Experiment Name: At_42deg_Heat_cDNA_P Parameter: Temperature (deg C) Value: 42 vs. 22
  misc_feature: MA Experiment 20000113 PARAMETER Experiment Name: At_42deg_Heat_cDNA_P Parameter: Timepoint (hr) Value: 8
  misc_feature: MA Experiment 20000113 PARAMETER Experiment Name: At_42deg_Heat_cDNA_P Parameter: Tissue Value: Aerial
  misc_feature: MA Experiment ID: 20000184 Result: Up-regulated in Transcription
  misc_feature: MA Experiment 20000184 PARAMETER Experiment Name: At_Shoots__P Parameter: Age (day) Value: 7
  misc_feature: MA Experiment 20000184 PARAMETER Experiment Name: At_Shoots__P Parameter: Tissue Value: Shoots vs. Whole Plant
  misc_feature: MA Experiment ID: 20001451 Result: Down-regulated in Transcription
  misc_feature: MA Experiment 20001451 PARAMETER Experiment Name: At_Far-red-induction_P Parameter: Age (day) Value: 7
  misc_feature: MA Experiment 20001451 PARAMETER Experiment Name: At_Far-red-induction_P Parameter: Light Value: Far-red vs. White
  misc_feature: MA Experiment 20001451 PARAMETER Experiment Name: At_Far-red-induction_P Parameter: Organism Value: A. thaliana
  misc_feature: MA Experiment 20001451 PARAMETER Experiment Name: At_Far-red-induction_P Parameter: Plant Line Value: Columbia
  misc_feature: MA Experiment 20001451 PARAMETER Experiment Name: At_Far-red-induction_P Parameter: Timepoint (hr) Value: 24
  misc_feature: MA Experiment 20001451 PARAMETER Experiment Name: At_Far-red-induction_P Parameter: Tissue Value: Whole Plant
  misc_feature: MA Experiment ID: 20001911 Result: Down-regulated in Transcription
  misc_feature: MA Experiment 20001911 PARAMETER Experiment Name: At_Drought_Reproduction_P Parameter: Age (day) Value: 40
  misc_feature: MA Experiment 20001911 PARAMETER Experiment Name: At_Drought_Reproduction_P Parameter: Organism Value: A. thaliana
  misc_feature: MA Experiment 20001911 PARAMETER Experiment Name: At_Drought_Reproduction_P Parameter: Plant Line Value: WS
  misc_feature: MA Experiment 20001911 PARAMETER Experiment Name: At_Drought_Reproduction_P Parameter: Timepoint (day) Value: 10
  misc_feature: MA Experiment 20001911 PARAMETER Experiment Name: At_Drought_Reproduction_P Parameter: Tissue Value: Flowers
  misc_feature: MA Experiment 20001911 PARAMETER Experiment Name: At_Drought_Reproduction_P Parameter: Treatment Value: Drought vs. No Drought
agaattgcttctcttagtatttgctttcaccaacccactcgacggagtctccaacgccttcctcctcattctccactctcacaccaccaacttctgattccagatctcaacgatgcaaagctccgccgtattctccctctctccgtcgcttcctctcctaaaaccacgtcggctctctctccgccaccatcccataaccaccgccgcttcttcaagcgatctaaacgtttctccaaatgttgtctctattccttctttatctcgtcgatcttggcgtctcgcttcgtctgattcgcctctccgtgcttggtccggtgttccttctccgatctctcactccttagacacgaatcgtttcagaaccgccgctactgcagttcctgaaagtgctgaggaaggtgataacagtggtaaattgacgaaggttttggaacttggcttgttgttcgctatgtggtaccttttcaatatctacttcaacatctacaataaacaggttttgaaagctctacatgctccaatgactgtgactttggttcagtttgctgttggtagtgtgctcattactatcatgtgggttcttaacctgtacaagagaccaaagatcagtggtgctcagctagctgccatcttgccgcttgctgttgtgcacacacttggtaatctgtttacgaacatgagtcttgggaaagtttctgtttcctttactcacaccattaaagccatggagcctttcttctctgttttattgtctgctatgtttctcggggagaaacctactccatgggtactcggtgccattgtaccaattgttggtggagttgcacttgcttcaatttcggaggtctcattcaactgggctggattttcgagtgcaatggcatcaaacttgactaaccaatcccgtaatgtgctgagtaagaaagtcatggttaagaaagatgattctcttgacaacatcactctcttctcaattataacattgatgtctctcgttctgatggctcctgtgactttctttacggaaggcatcaagttcactccttcatacattcaatcagctggtgtgaatgttaaacaaatatatacaaagtctcttatcgctgcactctgcttccacgcataccagcaggtgtcgtacatgatattggcgagagtatcaccggttacacattctgtcggaaactgtgtgaaacgtgttgtggttattgtgagctctgtcatcttcttcaagacacccgtctcgcctgttaatgctttcggaactggaatcgcccttgcgggtgtcttcttatactccagagtgaagggtattaagccaaagccaaagactgcttaagcaaatatcggctaatacctaatgtcatatcactcccgcgctttggatttgtatacaatttctcgagctaaagttttcagatagatggttttattcttttgcgggtttttttcacgaagtttcatcatccctttctaagcttttcgctgcagccatcggttctcttagagtttgttataagttctcttctgtgtctagacaaatgctaaactcttaaatttcttacagtttttccaagaataacttgtcaacacattctcattactgcttttagttt

SEQ ID NO: 34976 - protein, 408 aa, Arabidopsis thaliana
  peptide (1)..(408): Ceres Seq. ID no. 13495891
  misc_feature (117)..(242): Pfam Name: Integral membrane protein DUF6 Pfam Description: Integral membrane protein DUF6
  misc_feature (69)..(408): Homolog of NCBI NO: 7489742 NR Description: glucose-6-phosphate/phosphate-translocator
  misc_feature (84)..(408): Homolog of NCBI NO: 13991929 NR Description: phosphoenolpyruvate/phosphate translocator [Oryza
  misc_feature (1)..(408): Homolog of NCBI NO: 7489170 NR Description: phosphate/phosphoenolpyruvate translocator
  misc_feature (1)..(408): Homolog of NCBI NO: 9295275 NR Description: phosphoenolpyruvate/phosphate translocator
  misc_feature (1)..(407): Homolog of NCBI NO: 7489171 NR Description: phosphate/phosphoenolpyruvate translocator
  misc_feature (1)..(408): Homolog of NCBI NO: 1706110 NR Description: Triose phosphate/phosphate translocator,
  misc_feature (1)..(408): Homolog of NCBI NO: 7546829 NR Description: phosphate/phosphoenolpyruvate translocator
  misc_feature (1)..(408): Homolog of NCBI NO: 21554233 NR Description: phosphate/phosphoenolpyruvate translocator
  misc_feature (1)..(408): Homolog of NCBI NO: 1778141 NR Description: phosphate/phosphoenolpyruvate translocator
  misc_feature (1)..(408): Homolog of NCBI NO: 15242801 NR Description: triose phosphate/phosphate translocator, putative
MQSSAVFSLSPSLPLLKPRRLSLRHHPITTAASSSDLNVSPNVVSIPSLSRRSWRLASSDSPLRAWSGVPSPISHSLDTNRFRTAATAVPESAEEGDNSGKLTKVLELGLLFAMWYLFNIYFNIYNKQVLKALHAPMTVTLVQFAVGSVLITIMWVLNLYKRPKISGAQLAAILPLAVVHTLGNLFTNMSLGKVSVSFTHTIKAMEPFFSVLLSAMFLGEKPTPWVLGAIVPIVGGVALASISEVSFNWAGFSSAMASNLTNQSRNVLSKKVMVKKDDSLDNITLFSIITLMSLVLMAPVTFFTEGIKFTPSYIQSAGVNVKQIYTKSLIAALCFHAYQQVSYMILARVSPVTHSVGNCVKRVVVIVSSVIFFKTPVSPVNAFGTGIALAGVFLYSRVKGIKPKPKTA

SEQ ID NO: 34977 - protein, 295 aa, Arabidopsis thaliana
  peptide (1)..(295): Ceres Seq. ID no. 13495892
  misc_feature (4)..(129): Pfam Name: Integral membrane protein DUF6 Pfam Description: Integral membrane protein DUF6
  misc_feature (1)..(295): Homolog of NCBI NO: 7489742 NR Description: glucose-6-phosphate/phosphate-translocator
  misc_feature (1)..(295): Homolog of NCBI NO: 13991929 NR Description: phosphoenolpyruvate/phosphate translocator [Oryza
  misc_feature (1)..(295): Homolog of NCBI NO: 7489170 NR Description: phosphate/phosphoenolpyruvate translocator
  misc_feature (1)..(295): Homolog of NCBI NO: 9295275 NR Description: phosphoenolpyruvate/phosphate translocator
  misc_feature (1)..(294): Homolog of NCBI NO: 7489171 NR Description: phosphate/phosphoenolpyruvate translocator
  misc_feature (1)..(295): Homolog of NCBI NO: 1706110 NR Description: Triose phosphate/phosphate translocator,
  misc_feature (1)..(295): Homolog of NCBI NO: 7546829 NR Description: phosphate/phosphoenolpyruvate translocator
  misc_feature (1)..(295): Homolog of NCBI NO: 21554233 NR Description: phosphate/phosphoenolpyruvate translocator
  misc_feature (1)..(295): Homolog of NCBI NO: 1778141 NR Description: phosphate/phosphoenolpyruvate translocator
  misc_feature (1)..(295): Homolog of NCBI NO: 15242801 NR Description: triose phosphate/phosphate translocator, putative
MWYLFNIYFNIYNKQVLKALHAPMTVTLVQFAVGSVLITIMWVLNLYKRPKISGAQLAAILPLAVVHTLGNLFTNMSLGKVSVSFTHTIKAMEPFFSVLLSAMFLGEKPTPWVLGAIVPIVGGVALASISEVSFNWAGFSSAMASNLTNQSRNVLSKKVMVKKDDSLDNITLFSIITLMSLVLMAPVTFFTEGIKFTPSYIQSAGVNVKQIYTKSLIAALCFHAYQQVSYMILARVSPVTHSVGNCVKRVVVIVSSVIFFKTPVSPVNAFGTGIALAGVFLYSRVKGIKPKPKTA

SEQ ID NO: 34978 - protein, 272 aa, Arabidopsis thaliana
  peptide (1)..(272): Ceres Seq. ID no. 13495893
  misc_feature (1)..(106): Pfam Name: Integral membrane protein DUF6 Pfam Description: Integral membrane protein DUF6
  misc_feature (1)..(272): Homolog of NCBI NO: 7489742 NR Description: glucose-6-phosphate/phosphate-translocator
  misc_feature (1)..(272): Homolog of NCBI NO: 13991929 NR Description: phosphoenolpyruvate/phosphate translocator [Oryza
  misc_feature (1)..(272): Homolog of NCBI NO: 7489170 NR Description: phosphate/phosphoenolpyruvate translocator
  misc_feature (1)..(272): Homolog of NCBI NO: 9295275 NR Description: phosphoenolpyruvate/phosphate translocator
  misc_feature (1)..(271): Homolog of NCBI NO: 7489171 NR Description: phosphate/phosphoenolpyruvate translocator
  misc_feature (1)..(272): Homolog of NCBI NO: 1706110 NR Description: Triose phosphate/phosphate translocator,
  misc_feature (1)..(272): Homolog of NCBI NO: 7546829 NR Description: phosphate/phosphoenolpyruvate translocator
  misc_feature (1)..(272): Homolog of NCBI NO: 21554233 NR Description: phosphate/phosphoenolpyruvate translocator
  misc_feature (1)..(272): Homolog of NCBI NO: 1778141 NR Description: phosphate/phosphoenolpyruvate translocator
  misc_feature (1)..(272): Homolog of NCBI NO: 15242801 NR Description: triose phosphate/phosphate translocator, putative
MTVTLVQFAVGSVLITIMWVLNLYKRPKISGAQLAAILPLAVVHTLGNLFTNMSLGKVSVSFTHTIKAMEPFFSVLLSAMFLGEKPTPWVLGAIVPIVGGVALASISEVSFNWAGFSSAMASNLTNQSRNVLSKKVMVKKDDSLDNITLFSIITLMSLVLMAPVTFFTEGIKFTPSYIQSAGVNVKQIYTKSLIAALCFHAYQQVSYMILARVSPVTHSVGNCVKRVVVIVSSVIFFKTPVSPVNAFGTGIALAGVFLYSRVKGIKPKPKTA

SEQ ID NO: 34979 - DNA, 1110 bp, Arabidopsis thaliana
  misc_feature (1)..(1110): Ceres Seq. ID no. 12394066
  misc_feature: MA Experiment ID: 108461 Result: Up-regulated in Transcription
  misc_feature: MA Experiment 108461 PARAMETER Experiment Name: At_Germinating_Seeds_cDNA_P Parameter: Age (day) Value: 1 vs. 0
  misc_feature: MA Experiment 108461 PARAMETER Experiment Name: At_Germinating_Seeds_cDNA_P Parameter: Tissue Value: Germinating Seeds
  misc_feature: MA Experiment ID: 108462 Result: Up-regulated in Transcription
  misc_feature: MA Experiment 108462 PARAMETER Experiment Name: At_Germinating_Seeds_cDNA_P Parameter: Age (day) Value: 2 vs. 0
  misc_feature: MA Experiment 108462 PARAMETER Experiment Name: At_Germinating_Seeds_cDNA_P Parameter: Tissue Value: Germinating Seeds
  misc_feature: MA Experiment ID: 108463 Result: Up-regulated in Transcription
  misc_feature: MA Experiment 108463 PARAMETER Experiment Name: At_Germinating_Seeds_cDNA_P Parameter: Age (day) Value: 3 vs. 0
  misc_feature: MA Experiment 108463 PARAMETER Experiment Name: At_Germinating_Seeds_cDNA_P Parameter: Tissue Value: Germinating Seeds
  misc_feature: MA Experiment ID: 108595 Result: Down-regulated in Transcription
  misc_feature: MA Experiment 108595 PARAMETER Experiment Name: At_Ler-pi_Ovule_cDNA_P Parameter: Plant Line Value: null
  misc_feature: MA Experiment ID: 108607 Result: Up-regulated in Transcription
  misc_feature: MA Experiment 108607 PARAMETER Experiment Name: At_100uM_ABA_cDNA_P Parameter: Timepoint (hr) Value: 4
  misc_feature: MA Experiment 108607 PARAMETER Experiment Name: At_100uM_ABA_cDNA_P Parameter: Tissue Value: Aerial
  misc_feature: MA Experiment 108607 PARAMETER Experiment Name: At_100uM_ABA_cDNA_P Parameter: Treatment Value: 100uM ABA vs. No Treatment
  misc_feature: MA Experiment ID: 20000111 Result: Down-regulated in Transcription
  misc_feature: MA Experiment 20000111 PARAMETER Experiment Name: At_42deg_Heat_cDNA_P Parameter: Temperature (deg C) Value: 42 vs. 22
  misc_feature: MA Experiment 20000111 PARAMETER Experiment Name: At_42deg_Heat_cDNA_P Parameter: Timepoint (hr) Value: 6
  misc_feature: MA Experiment 20000111 PARAMETER Experiment Name: At_42deg_Heat_cDNA_P Parameter: Tissue Value: Aerial
  misc_feature: MA Experiment ID: 20000180 Result: Up-regulated in Transcription
  misc_feature: MA Experiment 20000180 PARAMETER Experiment Name: At_Germinating_Seeds_P Parameter: Age (hr) Value: 24 vs. 0
  misc_feature: MA Experiment 20000180 PARAMETER Experiment Name: At_Germinating_Seeds_P Parameter: Tissue Value: Germinating Seeds
  misc_feature: MA Experiment ID: 20000264 Result: Up-regulated in Transcription
  misc_feature: MA Experiment 20000264 PARAMETER Experiment Name: At_Open_Flower_P Parameter: Age (day) Value: 21
  misc_feature: MA Experiment 20000264 PARAMETER Experiment Name: At_Open_Flower_P Parameter: Plant Line Value: WS
  misc_feature: MA Experiment 20000264 PARAMETER Experiment Name: At_Open_Flower_P Parameter: Tissue Value: Open Flower vs. Whole Plant
  misc_feature: MA Experiment ID: 20000265 Result: Up-regulated in Transcription
  misc_feature: MA Experiment 20000265 PARAMETER Experiment Name: At_Open_Flower_P Parameter: Age (day) Value: 21
  misc_feature: MA Experiment 20000265 PARAMETER Experiment Name: At_Open_Flower_P Parameter: Plant Line Value: WS
  misc_feature: MA Experiment 20000265 PARAMETER Experiment Name: At_Open_Flower_P Parameter: Tissue Value: Closed Flower vs. Whole Plant
gagacgttcatgcatttaatctcgcaccttacgacaaagagtgagagagaggatcgctcaggtttgttcatcttcaccggacgattagcttttgcggtgggagaaagaacggcctgtcttcagctctgaaacagaggaacagagaggttaggaaggagacaatggttggacccgcgcggcctcagatcgttttgtttggatcttccattgttcagatgagctttggccatggtggttggggcgccattctctccgaggtctacgctcgtaaggccgacatcattctgcgaggatattatggatggaactcttctcgtgctttggaagttgtcgaccaagtgttccccaaggatgctgcagtacaaccttctctggtcattgtctattttggaggaaacgactcaatggcgcctcactcgtctggtctaggacctcatgtaccacttactgaatatgttgataacatgaagaagatcgctcttcatcttcagagcctttcagactccacccgaatcatatttcttagttctcctccagtggatgaggctaaagttcgccagaaccaaagcccatacttgagcgaggtaatccgcacaaacgacctctgcaagacttattcagatgcttgtgtagagctgtgccaagaactcggcttagaagtagttgatctcttctctacttttcagaaagcagatgactggaaaactgtttgcttcacagacgggattcatttgtcagcacaaggaagcaaaatagtagcgggagagatactaagagtggttaaagaagcggaatggcatccatcacttcactggaaatcaatgccaacagaattcgcagatgactctccttatgatcttgtttcagcagatggcaaacagacagtaaattcttcagaatggacttatttctgggaagaacaatgggactaaacatttcaacacacacaacaacaacaacaagaccctatcttcacataattcactgtcttaatgtgataaagctttgcattagattgtttacattacaagtgtctctgctataatctgattcagtttcgctcgaaaaacgttaccattttaaagtttatacttatctaaatcttaaatc

SEQ ID NO: 34980 - protein, 256 aa, Arabidopsis thaliana
  peptide (1)..(256): Ceres Seq. ID no. 12394067
  misc_feature (9)..(203): Pfam Name: GDSL-like Lipase/Acylhydrolase Pfam Description: GDSL-like Lipase/Acylhydrolase
  misc_feature (6)..(236): Homolog of NCBI NO: 34903948 NR Description: OSJNBa0038J17.19 [Oryza sativa (japonica
  misc_feature (6)..(209): Homolog of NCBI NO: 38454102 NR Description: At5g45920 [Arabidopsis thaliana]
  misc_feature (6)..(209): Homolog of NCBI NO: 15242539 NR Description: putative protein; protein id: At5g45920.1
  misc_feature (6)..(232): Homolog of NCBI NO: 37535366 NR Description: putative esterase [Oryza sativa (japonica
  misc_feature (6)..(232): Homolog of NCBI NO: 15242002 NR Description: putative protein
  misc_feature (1)..(244): Homolog of NCBI NO: 18404664 NR Description: expressed protein
  misc_feature (1)..(244): Homolog of NCBI NO: 16974631 NR Description: At2g38180/F16M14.11 [Arabidopsis thaliana]
  misc_feature (1)..(256): Homolog of NCBI NO: 13161403 NR Description: CPRD49 [Vigna unguiculata]
  misc_feature (1)..(256): Homolog of NCBI NO: 18399151 NR Description: expressed protein
  misc_feature (1)..(256): Homolog of NCBI NO: 21554235 NR Description: CPRD49 [Arabidopsis thaliana]
MVGPARPQIVLFGSSIVQMSFGHGGWGAILSEVYARKADIILRGYYGWNSSRALEVVDQVFPKDAAVQPSLVIVYFGGNDSMAPHSSGLGPHVPLTEYVDNMKKIALHLQSLSDSTRIIFLSSPPVDEAKVRQNQSPYLSEVIRTNDLCKTYSDACVELCQELGLEVVDLFSTFQKADDWKTVCFTDGIHLSAQGSKIVAGEILRVVKEAEWHPSLHWKSMPTEFADDSPYDLVSADGKQTVNSSEWTYFWEEQWD

SEQ ID NO: 34981 - protein, 238 aa, Arabidopsis thaliana
  peptide (1)..(238): Ceres Seq. ID no. 12394068
  misc_feature (1)..(185): Pfam Name: GDSL-like Lipase/Acylhydrolase Pfam Description: GDSL-like Lipase/Acylhydrolase
  misc_feature (1)..(218): Homolog of NCBI NO: 34903948 NR Description: OSJNBa0038J17.19 [Oryza sativa (japonica
  misc_feature (1)..(191): Homolog of NCBI NO: 38454102 NR Description: At5g45920 [Arabidopsis thaliana]
  misc_feature (1)..(191): Homolog of NCBI NO: 15242539 NR Description: putative protein; protein id: At5g45920.1
  misc_feature (1)..(214): Homolog of NCBI NO: 37535366 NR Description: putative esterase [Oryza sativa (japonica
  misc_feature (1)..(214): Homolog of NCBI NO: 15242002 NR Description: putative protein
  misc_feature (1)..(226): Homolog of NCBI NO: 18404664 NR Description: expressed protein
  misc_feature (1)..(226): Homolog of NCBI NO: 16974631 NR Description: At2g38180/F16M14.11 [Arabidopsis thaliana]
  misc_feature (1)..(238): Homolog of NCBI NO: 13161403 NR Description: CPRD49 [Vigna unguiculata]
  misc_feature (1)..(238): Homolog of NCBI NO: 18399151 NR Description: expressed protein
  misc_feature (1)..(238): Homolog of NCBI NO: 21554235 NR Description: CPRD49 [Arabidopsis thaliana]
MSFGHGGWGAILSEVYARKADIILRGYYGWNSSRALEVVDQVFPKDAAVQPSLVIVYFGGNDSMAPHSSGLGPHVPLTEYVDNMKKIALHLQSLSDSTRIIFLSSPPVDEAKVRQNQSPYLSEVIRTNDLCKTYSDACVELCQELGLEVVDLFSTFQKADDWKTVCFTDGIHLSAQGSKIVAGEILRVVKEAEWHPSLHWKSMPTEFADDSPYDLVSADGKQTVNSSEWTYFWEEQWD

SEQ ID NO: 34982 - protein, 175 aa, Arabidopsis thaliana
  peptide (1)..(175): Ceres Seq. ID no. 12394069
  misc_feature (1)..(122): Pfam Name: GDSL-like Lipase/Acylhydrolase Pfam Description: GDSL-like Lipase/Acylhydrolase
  misc_feature (1)..(155): Homolog of NCBI NO: 34903948 NR Description: OSJNBa0038J17.19 [Oryza sativa (japonica
  misc_feature (1)..(128): Homolog of NCBI NO: 38454102 NR Description: At5g45920 [Arabidopsis thaliana]
  misc_feature (1)..(128): Homolog of NCBI NO: 15242539 NR Description: putative protein; protein id: At5g45920.1
  misc_feature (1)..(151): Homolog of NCBI NO: 37535366 NR Description: putative esterase [Oryza sativa (japonica
  misc_feature (1)..(151): Homolog of NCBI NO: 15242002 NR Description: putative protein
  misc_feature (1)..(163): Homolog of NCBI NO: 18404664 NR Description: expressed protein
  misc_feature (1)..(163): Homolog of NCBI NO: 16974631 NR Description: At2g38180/F16M14.11 [Arabidopsis thaliana]
  misc_feature (1)..(175): Homolog of NCBI NO: 13161403 NR Description: CPRD49 [Vigna unguiculata]
  misc_feature (1)..(175): Homolog of NCBI NO: 18399151 NR Description: expressed protein
  misc_feature (1)..(175): Homolog of NCBI NO: 21554235 NR Description: CPRD49 [Arabidopsis thaliana]
MAPHSSGLGPHVPLTEYVDNMKKIALHLQSLSDSTRIIFLSSPPVDEAKVRQNQSPYLSEVIRTNDLCKTYSDACVELCQELGLEVVDLFSTFQKADDWKTVCFTDGIHLSAQGSKIVAGEILRVVKEAEWHPSLHWKSMPTEFADDSPYDLVSADGKQTVNSSEWTYFWEEQWD

SEQ ID NO: 34983 - DNA, 961 bp, Arabidopsis thaliana
  misc_feature (1)..(961): Ceres Seq. ID no. 13493909
  misc_feature: MA Experiment ID: 108474 Result: Down-regulated in Transcription
  misc_feature: MA Experiment 108474 PARAMETER Experiment Name: At_Drought_Flowers_cDNA_P Parameter: Timepoint (hr) Value: null
  misc_feature: MA Experiment 108474 PARAMETER Experiment Name: At_Drought_Flowers_cDNA_P Parameter: Treatment Value: Drought vs. No Drought
  misc_feature: MA Experiment ID: 108501 Result: Down-regulated in Transcription
  misc_feature: MA Experiment 108501 PARAMETER Experiment Name: At_ap2_floral_buds_cDNA_P Parameter: Plant Line Value: ap2 (Ler.)
  misc_feature: MA Experiment 108501 PARAMETER Experiment Name: At_ap2_floral_buds_cDNA_P Parameter: Tissue Value: Closed Flower
  misc_feature: MA Experiment ID: 20000182 Result: Down-regulated in Transcription
  misc_feature: MA Experiment 20000182 PARAMETER Experiment Name: At_2mM_SA_P Parameter: Age (day) Value: 14
  misc_feature: MA Experiment 20000182 PARAMETER Experiment Name: At_2mM_SA_P Parameter: Organism Value: A. thaliana
  misc_feature: MA Experiment 20000182 PARAMETER Experiment Name: At_2mM_SA_P Parameter: Plant Line Value: WS
  misc_feature: MA Experiment 20000182 PARAMETER Experiment Name: At_2mM_SA_P Parameter: Timepoint (hr) Value: 6
  misc_feature: MA Experiment 20000182 PARAMETER Experiment Name: At_2mM_SA_P Parameter: Tissue Value: Aerial
  misc_feature: MA Experiment 20000182 PARAMETER Experiment Name: At_2mM_SA_P Parameter: Treatment Value: 2mM SA vs. No Treatment
  misc_feature: MA Experiment ID: 20000265 Result: Up-regulated in Transcription
  misc_feature: MA Experiment 20000265 PARAMETER Experiment Name: At_Open_Flower_P Parameter: Age (day) Value: 21
  misc_feature: MA Experiment 20000265 PARAMETER Experiment Name: At_Open_Flower_P Parameter: Plant Line Value: WS
  misc_feature: MA Experiment 20000265 PARAMETER Experiment Name: At_Open_Flower_P Parameter: Tissue Value: Closed Flower vs. Whole Plant
  misc_feature: MA Experiment ID: 20000286 Result: Up-regulated in Transcription
  misc_feature: MA Experiment 20000286 PARAMETER Experiment Name: At_Open_Flower_P Parameter: Age (day) Value: 21
  misc_feature: MA Experiment 20000286 PARAMETER Experiment Name: At_Open_Flower_P Parameter: Plant Line Value: WS
  misc_feature: MA Experiment 20000286 PARAMETER Experiment Name: At_Open_Flower_P Parameter: Tissue Value: Half Open vs. Whole Plant
  misc_feature: MA Experiment ID: 20000709 Result: Down-regulated in Transcription
  misc_feature: MA Experiment 20000709 PARAMETER Experiment Name: At_15mM_NH4NO3_L-to-H_P Parameter: Age (hr) Value: 14
  misc_feature: MA Experiment 20000709 PARAMETER Experiment Name: At_15mM_NH4NO3_L-to-H_P Parameter: Organism Value: A. thaliana
  misc_feature: MA Experiment 20000709 PARAMETER Experiment Name: At_15mM_NH4NO3_L-to-H_P Parameter: Plant Line Value: WS
  misc_feature: MA Experiment 20000709 PARAMETER Experiment Name: At_15mM_NH4NO3_L-to-H_P Parameter: Timepoint (hr) Value: 4
  misc_feature: MA Experiment 20000709 PARAMETER Experiment Name: At_15mM_NH4NO3_L-to-H_P Parameter: Tissue Value: Aerial
  misc_feature: MA Experiment 20000709 PARAMETER Experiment Name: At_15mM_NH4NO3_L-to-H_P Parameter: Treatment Value: 15mM NH4NO3 vs. 30mM Mannitol
  misc_feature: MA Experiment ID: 20001773 Result: Up-regulated in Transcription
  misc_feature: MA Experiment 20001773 PARAMETER Experiment Name: At_Far-red-enriched-adult_P Parameter: Age (day) Value: 30
  misc_feature: MA Experiment 20001773 PARAMETER Experiment Name: At_Far-red-enriched-adult_P Parameter: Light Value: Far-red enriched vs. White
  misc_feature: MA Experiment 20001773 PARAMETER Experiment Name: At_Far-red-enriched-adult_P Parameter: Organism Value: A. thaliana
  misc_feature: MA Experiment 20001773 PARAMETER Experiment Name: At_Far-red-enriched-adult_P Parameter: Plant Line Value: Columbia
  misc_feature: MA Experiment 20001773 PARAMETER Experiment Name: At_Far-red-enriched-adult_P Parameter: Timepoint (hr) Value: 48
  misc_feature: MA Experiment 20001773 PARAMETER Experiment Name: At_Far-red-enriched-adult_P Parameter: Tissue Value: Aerial
  misc_feature: MA Experiment ID: 20001910 Result: Down-regulated in Transcription
  misc_feature: MA Experiment 20001910 PARAMETER Experiment Name: At_Drought_Reproduction_P Parameter: Age (day) Value: 37
  misc_feature: MA Experiment 20001910 PARAMETER Experiment Name: At_Drought_Reproduction_P Parameter: Organism Value: A. thaliana
  misc_feature: MA Experiment 20001910 PARAMETER Experiment Name: At_Drought_Reproduction_P Parameter: Plant Line Value: WS
  misc_feature: MA Experiment 20001910 PARAMETER Experiment Name: At_Drought_Reproduction_P Parameter: Timepoint (day) Value: 7
  misc_feature: MA Experiment 20001910 PARAMETER Experiment Name: At_Drought_Reproduction_P Parameter: Tissue Value: Flowers
  misc_feature: MA Experiment 20001910 PARAMETER Experiment Name: At_Drought_Reproduction_P Parameter: Treatment Value: Drought vs. No Drought
caagatcgtcaagagacagtaaacctaaaatggcgaactcagacaaaagattattcgagaaggtagctataataaccggaggagcaagagggataggagcggccacggcgagattgttcacagagaatggcgcgtatgtgatagtcgcggatatccttgataatgaaggcatccttgtggcggaatcgatcggtgggtgttacgttcattgtgacgtatcgaaggaggctgatgttgaggcggcagtggagctagcaatgagacgtaaaggtagactagatgtgatgttcaacaatgccgggatgtcgcttaacgaaggtagtatcatggggatggacgtggacatggttaacaaacttgtctcggttaatgtcaatggtgttttgcatggtatcaaacatgccgctaaggccatgatcaaagggggacgaggaggctcgataatatgcacatcgagctcatcagggctaatgggaggacttggaggacatgcgtatacgctctccaaaggaggcatcaacggggtggtgaggacaacggagtgcgagcttgggtctcacggcatccgtgtgaatagcatctctcctcatggagttcccactgacatcttggttaatgcgtaccgtaagttccttaacaatgacaaactcaacgtcgctgaggtcaccgacattattgctgagaaagggagtttgctgaccggaagagccggtactgtggaggacgtagctcaagcagctttgtttcttgcaagccaagaatcgtcggggttcattaccggacataacttggttgttgatggtggttacacatctgccactagtactatgagatttatctacaactagttttcgtttggtggtgtttccttttcaaagttgttctttgaaaaaagaaaaaaaaaaagagtttatcttaattgctaacttgtcaatctttcttaattcggttgaataatccg

SEQ ID NO: 34984 - protein, 281 aa, Arabidopsis thaliana
  peptide (1)..(281): Ceres Seq. ID no. 13493910
  misc_feature (11)..(277): Homolog of NCBI NO: 34899230 NR Description: alcohol dehydrogenase-like protein
  misc_feature (15)..(276): Homolog of NCBI NO: 34898190 NR Description: putative short-chain alcohol dehydrogenase
  misc_feature (12)..(276): Homolog of NCBI NO: 33146885 NR Description: putative short-chain alcohol dehydrogenase
  misc_feature (15)..(272): Homolog of NCBI NO: 15230558 NR Description: short-chain dehydrogenase/reductase family
  misc_feature (11)..(270): Homolog of NCBI NO: 30688484 NR Description: short-chain dehydrogenase/reductase family
  misc_feature (11)..(280): Homolog of NCBI NO: 1293688 NR Description: STA1-2
  misc_feature (11)..(280): Homolog of NCBI NO: 1293690 NR Description: STA1-12
  misc_feature (10)..(281): Homolog of NCBI NO: 15229190 NR Description: tapetal-specific alcohol dehydrogenase (ATA1)
  misc_feature (10)..(281): Homolog of NCBI NO: 21554236 NR Description: alcohol dehydrogenase (ATA1) [Arabidopsis
  misc_feature (10)..(281): Homolog of NCBI NO: 2501781 NR Description: alcohol dehydrogenase [Arabidopsis thaliana]
RSSRDSKPKMANSDKRLFEKVAIITGGARGIGAATARLFTENGAYVIVADILDNEGILVAESIGGCYVHCDVSKEADVEAAVELAMRRKGRLDVMFNNAGMSLNEGSIMGMDVDMVNKLVSVNVNGVLHGIKHAAKAMIKGGRGGSIICTSSSSGLMGGLGGHAYTLSKGGINGVVRTTECELGSHGIRVNSISPHGVPTDILVNAYRKFLNNDKLNVAEVTDIIAEKGSLLTGRAGTVEDVAQAALFLASQESSGFITGHNLVVDGGYTSATSTMRFIYN

SEQ ID NO: 34985 - protein, 272 aa, Arabidopsis thaliana
  peptide (1)..(272): Ceres Seq. ID no. 13493911
  misc_feature (2)..(268): Homolog of NCBI NO: 34899230 NR Description: alcohol dehydrogenase-like protein
  misc_feature (6)..(267): Homolog of NCBI NO: 34898190 NR Description: putative short-chain alcohol dehydrogenase
  misc_feature (3)..(267): Homolog of NCBI NO: 33146885 NR Description: putative short-chain alcohol dehydrogenase
  misc_feature (6)..(263): Homolog of NCBI NO: 15230558 NR Description: short-chain dehydrogenase/reductase family
  misc_feature (2)..(261): Homolog of NCBI NO: 30688484 NR Description: short-chain dehydrogenase/reductase family
  misc_feature (2)..(271): Homolog of NCBI NO: 1293688 NR Description: STA1-2
  misc_feature (2)..(271): Homolog of NCBI NO: 1293690 NR Description: STA1-12
  misc_feature (1)..(272): Homolog of NCBI NO: 15229190 NR Description: tapetal-specific alcohol dehydrogenase (ATA1)
  misc_feature (1)..(272): Homolog of NCBI NO: 21554236 NR Description: alcohol dehydrogenase (ATA1) [Arabidopsis
  misc_feature (1)..(272): Homolog of NCBI NO: 2501781 NR Description: alcohol dehydrogenase [Arabidopsis thaliana]
MANSDKRLFEKVAIITGGARGIGAATARLFTENGAYVIVADILDNEGILVAESIGGCYVHCDVSKEADVEAAVELAMRRKGRLDVMFNNAGMSLNEGSIMGMDVDMVNKLVSVNVNGVLHGIKHAAKAMIKGGRGGSIICTSSSSGLMGGLGGHAYTLSKGGINGVVRTTECELGSHGIRVNSISPHGVPTDILVNAYRKFLNNDKLNVAEVTDIIAEKGSLLTGRAGTVEDVAQAALFLASQESSGFITGHNLVVDGGYTSATSTMRFIYN

SEQ ID NO: 34986 - protein, 196 aa, Arabidopsis thaliana
  peptide (1)..(196): Ceres Seq. ID no. 13493912
  misc_feature (1)..(192): Homolog of NCBI NO: 34899230 NR Description: alcohol dehydrogenase-like protein
  misc_feature (1)..(191): Homolog of NCBI NO: 34898190 NR Description: putative short-chain alcohol dehydrogenase
  misc_feature (1)..(191): Homolog of NCBI NO: 33146885 NR Description: putative short-chain alcohol dehydrogenase
  misc_feature (1)..(187): Homolog of NCBI NO: 15230558 NR Description: short-chain dehydrogenase/reductase family
  misc_feature (1)..(185): Homolog of NCBI NO: 30688484 NR Description: short-chain dehydrogenase/reductase family
  misc_feature (1)..(195): Homolog of NCBI NO: 1293688 NR Description: STA1-2
  misc_feature (1)..(195): Homolog of NCBI NO: 1293690 NR Description: STA1-12
  misc_feature (1)..(196): Homolog of NCBI NO: 15229190 NR Description: tapetal-specific alcohol dehydrogenase (ATA1)
  misc_feature (1)..(196): Homolog of NCBI NO: 21554236 NR Description: alcohol dehydrogenase (ATA1) [Arabidopsis
  misc_feature (1)..(196): Homolog of NCBI NO: 2501781 NR Description: alcohol dehydrogenase [Arabidopsis thaliana]
MRRKGRLDVMFNNAGMSLNEGSIMGMDVDMVNKLVSVNVNGVLHGIKHAAKAMIKGGRGGSIICTSSSSGLMGGLGGHAYTLSKGGINGVVRTTECELGSHGIRVNSISPHGVPTDILVNAYRKFLNNDKLNVAEVTDIIAEKGSLLTGRAGTVEDVAQAALFLASQESSGFITGHNLVVDGGYTSATSTMRFIYN

SEQ ID NO: 34987 - DNA, 1072 bp, Arabidopsis thaliana; identical to SEQ ID NO: 30225
  misc_feature (1)..(1072): Ceres Seq. ID no. 12394892
  misc_feature: MA Experiment ID: 108461 Result: Up-regulated in Transcription
  misc_feature: MA Experiment 108461 PARAMETER Experiment Name: At_Germinating_Seeds_cDNA_P Parameter: Age (day) Value: 1 vs. 0
  misc_feature: MA Experiment 108461 PARAMETER Experiment Name: At_Germinating_Seeds_cDNA_P Parameter: Tissue Value: Germinating Seeds
  misc_feature: MA Experiment ID: 108462 Result: Up-regulated in Transcription
  misc_feature: MA Experiment 108462 PARAMETER Experiment Name: At_Germinating_Seeds_cDNA_P Parameter: Age (day) Value: 2 vs. 0
  misc_feature: MA Experiment 108462 PARAMETER Experiment Name: At_Germinating_Seeds_cDNA_P Parameter: Tissue Value: Germinating Seeds
  misc_feature: MA Experiment ID: 108464 Result: Up-regulated in Transcription
  misc_feature: MA Experiment 108464 PARAMETER Experiment Name: At_Germinating_Seeds_cDNA_P Parameter: Age (day) Value: 4 vs. 0
  misc_feature: MA Experiment 108464 PARAMETER Experiment Name: At_Germinating_Seeds_cDNA_P Parameter: Tissue Value: Germinating Seeds
  misc_feature: MA Experiment ID: 20000112 Result: Up-regulated in Transcription
  misc_feature: MA Experiment 20000112 PARAMETER Experiment Name: At_42deg_Heat_cDNA_P Parameter: Temperature (deg C) Value: 42 vs. 22
  misc_feature: MA Experiment 20000112 PARAMETER Experiment Name: At_42deg_Heat_cDNA_P Parameter: Timepoint (hr) Value: 2
  misc_feature: MA Experiment 20000112 PARAMETER Experiment Name: At_42deg_Heat_cDNA_P Parameter: Tissue Value: Aerial
  misc_feature: MA Experiment ID: 20000144 Result: Up-regulated in Transcription
  misc_feature: MA Experiment 20000144 PARAMETER Experiment Name: At_42deg_Heat_cDNA_P Parameter: Temperature (deg C) Value: 42 vs. 22
  misc_feature: MA Experiment 20000144 PARAMETER Experiment Name: At_42deg_Heat_cDNA_P Parameter: Timepoint (hr) Value: 1
  misc_feature: MA Experiment 20000144 PARAMETER Experiment Name: At_42deg_Heat_cDNA_P Parameter: Tissue Value: Aerial

SEQ ID NO: 34988 - protein, 288 aa, Arabidopsis thaliana; identical to SEQ ID NO: 30226
  peptide (1)..(288): Ceres Seq. ID no. 12394893
  misc_feature (22)..(260): Pfam Name: Tetraspanin family Pfam Description: Tetraspanin family
  misc_feature (22)..(260): Pfam Name: Tetraspanin family Pfam Description: Tetraspanin family
  misc_feature (23)..(278): Homolog of NCBI NO: 15234743 NR Description: senescence-associated protein homolog
  misc_feature (24)..(275): Homolog of NCBI NO: 15238641 NR Description: senescence-associated protein - like; protein id:
  misc_feature (20)..(278): Homolog of NCBI NO: 15231187 NR Description: putative protein
  misc_feature (22)..(284): Homolog of NCBI NO: 3551954 NR Description: senescence-associated protein 5 [Hemerocallis
  misc_feature (22)..(287): Homolog of NCBI NO: 29367553 NR Description: senescence-associated protein-like protein
  misc_feature (23)..(278): Homolog of NCBI NO: 15234743 NR Description: senescence-associated protein homolog
  misc_feature (20)..(278): Homolog of NCBI NO: 15231187 NR Description: putative protein
  misc_feature (22)..(287): Homolog of NCBI NO: 29367553 NR Description: senescence-associated protein-like protein
  misc_feature (20)..(288): Homolog of NCBI NO: 15237490 NR Description: senescence-associated protein 5-like protein
  misc_feature (20)..(288): Homolog of NCBI NO: 17979386 NR Description: putative senescence-associated protein 5
  misc_feature (20)..(287): Homolog of NCBI NO: 15224802 NR Description: putative senescence-associated protein 5; protein
  misc_feature (23)..(287): Homolog of NCBI NO: 20197174 NR Description: hypothetical protein [Arabidopsis thaliana]
  misc_feature (23)..(273): Homolog of NCBI NO: 15234374 NR Description: senescence-associated protein -like
  misc_feature (22)..(284): Homolog of NCBI NO: 3551954 NR Description: senescence-associated protein 5 [Hemerocallis
  misc_feature (24)..(275): Homolog of NCBI NO: 15238641 NR Description: senescence-associated protein - like; protein id:
  misc_feature (23)..(273): Homolog of NCBI NO: 15234374 NR Description: senescence-associated protein -like
  misc_feature (23)..(287): Homolog of NCBI NO: 20197174 NR Description: hypothetical protein [Arabidopsis thaliana]
  misc_feature (20)..(287): Homolog of NCBI NO: 15224802 NR Description: putative senescence-associated protein 5; protein
  misc_feature (20)..(288): Homolog of NCBI NO: 17979386 NR Description: putative senescence-associated protein 5
  misc_feature (20)..(288): Homolog of NCBI NO: 15237490 NR Description: senescence-associated protein 5-like protein

SEQ ID NO: 34989 - protein, 269 aa, Arabidopsis thaliana; identical to SEQ ID NO: 30227
  peptide (1)..(269): Ceres Seq. ID no. 12394894
  misc_feature (3)..(241): Pfam Name: Tetraspanin family Pfam Description: Tetraspanin family
  misc_feature (3)..(241): Pfam Name: Tetraspanin family Pfam Description: Tetraspanin family
  misc_feature (4)..(259): Homolog of NCBI NO: 15234743 NR Description: senescence-associated protein homolog
  misc_feature (5)..(256): Homolog of NCBI NO: 15238641 NR Description: senescence-associated protein - like; protein id:
  misc_feature (1)..(259): Homolog of NCBI NO: 15231187 NR Description: putative protein
  misc_feature (3)..(265): Homolog of NCBI NO: 3551954 NR Description: senescence-associated protein 5 [Hemerocallis
  misc_feature (3)..(268): Homolog of NCBI NO: 29367553 NR Description: senescence-associated protein-like protein
  misc_feature (4)..(259): Homolog of NCBI NO: 15234743 NR Description: senescence-associated protein homolog
  misc_feature (1)..(259): Homolog of NCBI NO: 15231187 NR Description: putative protein
  misc_feature (3)..(268): Homolog of NCBI NO: 29367553 NR Description: senescence-associated protein-like protein
  misc_feature (1)..(269): Homolog of NCBI NO: 15237490 NR Description: senescence-associated protein 5-like protein
  misc_feature (1)..(269): Homolog of NCBI NO: 17979386 NR Description: putative senescence-associated protein 5
  misc_feature (1)..(268): Homolog of NCBI NO: 15224802 NR Description: putative senescence-associated protein 5; protein
  misc_feature (4)..(268): Homolog of NCBI NO: 20197174 NR Description: hypothetical protein [Arabidopsis thaliana]
  misc_feature (4)..(254): Homolog of NCBI NO: 15234374 NR Description: senescence-associated protein -like
  misc_feature (3)..(265): Homolog of NCBI NO: 3551954 NR Description: senescence-associated protein 5 [Hemerocallis
  misc_feature (5)..(256): Homolog of NCBI NO: 15238641 NR Description: senescence-associated protein - like; protein id:
  misc_feature (4)..(254): Homolog of NCBI NO: 15234374 NR Description: senescence-associated protein -like
  misc_feature (4)..(268): Homolog of NCBI NO: 20197174 NR Description: hypothetical protein [Arabidopsis thaliana]
  misc_feature (1)..(268): Homolog of NCBI NO: 15224802 NR Description: putative senescence-associated protein 5; protein
  misc_feature (1)..(269): Homolog of NCBI NO: 17979386 NR Description: putative senescence-associated protein 5
  misc_feature (1)..(269): Homolog of NCBI NO: 15237490 NR Description: senescence-associated protein 5-like protein

SEQ ID NO: 34990 - protein, 192 aa, Arabidopsis thaliana; identical to SEQ ID NO: 30228
  peptide (1)..(192): Ceres Seq. ID no. 12394895
  misc_feature (1)..(164): Pfam Name: Tetraspanin family Pfam Description: Tetraspanin family
  misc_feature (1)..(164): Pfam Name: Tetraspanin family Pfam Description: Tetraspanin family
  misc_feature (1)..(182): Homolog of NCBI NO: 15234743 NR Description: senescence-associated protein homolog
  misc_feature (1)..(179): Homolog of NCBI NO: 15238641 NR Description: senescence-associated protein - like; protein id:
  misc_feature (1)..(182): Homolog of NCBI NO: 15231187 NR Description: putative protein
  misc_feature (1)..(188): Homolog of NCBI NO: 3551954 NR Description: senescence-associated protein 5 [Hemerocallis
  misc_feature (1)..(191): Homolog of NCBI NO: 29367553 NR Description: senescence-associated protein-like protein
  misc_feature (1)..(182): Homolog of NCBI NO: 15234743 NR Description: senescence-associated protein homolog
  misc_feature (1)..(182): Homolog of NCBI NO: 15231187 NR Description: putative protein
  misc_feature (1)..(191): Homolog of NCBI NO: 29367553 NR Description: senescence-associated protein-like protein
  misc_feature (1)..(192): Homolog of NCBI NO: 15237490 NR Description: senescence-associated protein 5-like protein
  misc_feature (1)..(192): Homolog of NCBI NO: 17979386 NR Description: putative senescence-associated protein 5
  misc_feature (1)..(191): Homolog of NCBI NO: 15224802 NR Description: putative senescence-associated protein 5; protein
  misc_feature (1)..(191): Homolog of NCBI NO: 20197174 NR Description: hypothetical protein [Arabidopsis thaliana]
  misc_feature (1)..(177): Homolog of NCBI NO: 15234374 NR Description: senescence-associated protein -like
  misc_feature (1)..(188): Homolog of NCBI NO: 3551954 NR Description: senescence-associated protein 5 [Hemerocallis
  misc_feature (1)..(179): Homolog of NCBI NO: 15238641 NR Description: senescence-associated protein - like; protein id:
  misc_feature (1)..(177): Homolog of NCBI NO: 15234374 NR Description: senescence-associated protein -like
  misc_feature (1)..(191): Homolog of NCBI NO: 20197174 NR Description: hypothetical protein [Arabidopsis thaliana]
  misc_feature (1)..(191): Homolog of NCBI NO: 15224802 NR Description: putative senescence-associated protein 5; protein
  misc_feature (1)..(192): Homolog of NCBI NO: 17979386 NR Description: putative senescence-associated protein 5
  misc_feature (1)..(192): Homolog of NCBI NO: 15237490 NR Description: senescence-associated protein 5-like protein

SEQ ID NO: 34991 - DNA, 958 bp, Arabidopsis thaliana
  misc_feature (1)..(958): Ceres Seq. ID no. 12334376
  misc_feature: MA Experiment ID: 108461 Result: Up-regulated in Transcription
  misc_feature: MA Experiment 108461 PARAMETER Experiment Name: At_Germinating_Seeds_cDNA_P Parameter: Age (day) Value: 1 vs. 0
  misc_feature: MA Experiment 108461 PARAMETER Experiment Name: At_Germinating_Seeds_cDNA_P Parameter: Tissue Value: Germinating Seeds
  misc_feature: MA Experiment ID: 108462 Result: Up-regulated in Transcription
  misc_feature: MA Experiment 108462 PARAMETER Experiment Name: At_Germinating_Seeds_cDNA_P Parameter: Age (day) Value: 2 vs. 0
  misc_feature: MA Experiment 108462 PARAMETER Experiment Name: At_Germinating_Seeds_cDNA_P Parameter: Tissue Value: Germinating Seeds
  misc_feature: MA Experiment ID: 108463 Result: Up-regulated in Transcription
  misc_feature: MA Experiment 108463 PARAMETER Experiment Name: At_Germinating_Seeds_cDNA_P Parameter: Age (day) Value: 3 vs. 0
  misc_feature: MA Experiment 108463 PARAMETER Experiment Name: At_Germinating_Seeds_cDNA_P Parameter: Tissue Value: Germinating Seeds
  misc_feature: MA Experiment ID: 108595 Result: Down-regulated in Transcription
  misc_feature: MA Experiment 108595 PARAMETER Experiment Name: At_Ler-pi_Ovule_cDNA_P Parameter: Plant Line Value: null
  misc_feature: MA Experiment ID: 20000111 Result: Down-regulated in Transcription
  misc_feature: MA Experiment 20000111 PARAMETER Experiment Name: At_42deg_Heat_cDNA_P Parameter: Temperature (deg C) Value: 42 vs. 22
  misc_feature: MA Experiment 20000111 PARAMETER Experiment Name: At_42deg_Heat_cDNA_P Parameter: Timepoint (hr) Value: 6
  misc_feature: MA Experiment 20000111 PARAMETER Experiment Name: At_42deg_Heat_cDNA_P Parameter: Tissue Value: Aerial
  misc_feature: MA Experiment ID: 20000113 Result: Down-regulated in Transcription
  misc_feature: MA Experiment 20000113 PARAMETER Experiment Name: At_42deg_Heat_cDNA_P Parameter: Temperature (deg C) Value: 42 vs. 22
  misc_feature: MA Experiment 20000113 PARAMETER Experiment Name: At_42deg_Heat_cDNA_P Parameter: Timepoint (hr) Value: 8
  misc_feature: MA Experiment 20000113 PARAMETER Experiment Name: At_42deg_Heat_cDNA_P Parameter: Tissue Value: Aerial
  misc_feature: MA Experiment ID: 20000224 Result: Up-regulated in Transcription
  misc_feature: MA Experiment ID: 20000306 Result: Up-regulated in Transcription
  misc_feature: MA Experiment 20000306 PARAMETER Experiment Name: At_Germinating_Seeds_Sub_P Parameter: Age (hr) Value: 6 vs. 0
  misc_feature: MA Experiment 20000306 PARAMETER Experiment Name: At_Germinating_Seeds_Sub_P Parameter: Organism Value: A. thaliana
  misc_feature: MA Experiment 20000306 PARAMETER Experiment Name: At_Germinating_Seeds_Sub_P Parameter: Plant Line Value: WS
  misc_feature: MA Experiment 20000306 PARAMETER Experiment Name: At_Germinating_Seeds_Sub_P Parameter: Tissue Value: Germinating Seeds
  misc_feature: MA Experiment ID: 20000307 Result: Up-regulated in Transcription
  misc_feature: MA Experiment 20000307 PARAMETER Experiment Name: At_Germinating_Seeds_Sub_P Parameter: Age (hr) Value: 24 vs. 0
  misc_feature: MA Experiment 20000307 PARAMETER Experiment Name: At_Germinating_Seeds_Sub_P Parameter: Organism Value: A. thaliana
  misc_feature: MA Experiment 20000307 PARAMETER Experiment Name: At_Germinating_Seeds_Sub_P Parameter: Plant Line Value: WS
  misc_feature: MA Experiment 20000307 PARAMETER Experiment Name: At_Germinating_Seeds_Sub_P Parameter: Tissue Value: Germinating Seeds
  misc_feature: MA Experiment ID: 20000315 Result: Down-regulated in Transcription
  misc_feature: MA Experiment 20000315 PARAMETER Experiment Name: At_14day_Shoots-Roots_Sub_P Parameter: Age (day) Value: 14
  misc_feature: MA Experiment 20000315 PARAMETER Experiment Name: At_14day_Shoots-Roots_Sub_P Parameter: Organism Value: A. thaliana
  misc_feature: MA Experiment 20000315 PARAMETER Experiment Name: At_14day_Shoots-Roots_Sub_P Parameter: Plant Line Value: WS
  misc_feature: MA Experiment 20000315 PARAMETER Experiment Name: At_14day_Shoots-Roots_Sub_P Parameter: Tissue Value: Shoots vs. Whole Plant
  misc_feature: MA Experiment ID: 20000349 Result: Up-regulated in Transcription
  misc_feature: MA Experiment 20000349 PARAMETER Experiment Name: At_100uM_ABA_Sub_P Parameter: Age (day) Value: 14
  misc_feature: MA Experiment 20000349 PARAMETER Experiment Name: At_100uM_ABA_Sub_P Parameter: Organism Value: A. thaliana
  misc_feature: MA Experiment 20000349 PARAMETER Experiment Name: At_100uM_ABA_Sub_P Parameter: Plant Line Value: WS
  misc_feature: MA Experiment 20000349 PARAMETER Experiment Name: At_100uM_ABA_Sub_P Parameter: Timepoint (hr) Value: 6
  misc_feature: MA Experiment 20000349 PARAMETER Experiment Name: At_100uM_ABA_Sub_P Parameter: Tissue Value: Aerial
  misc_feature: MA Experiment 20000349 PARAMETER Experiment Name: At_100uM_ABA_Sub_P Parameter: Treatment Value: 100uM ABA vs. No Treatment
acaaaacgtccccttttcccacatcatccttcttcaacgttcgctttcccatcaagaacaaccaaatctcttgtaacaaagcaaagaatttgagaatggatccgtctaagggaatccaagaacagaggattgtgattccaaacagacacaacgagaagctggttggtctgcttcatgaaactggttctacagacatcgtagtcttgtgccatggctttcgatcaaacaagagtaaccaaataatgaataatgtggctgctgctatacagaaagaagggatcagcgcttttcgttttgatttctccgggaatggagagagtgaaggcagtttctattatggtaactataaccatgaagctgatgatttacattctgttgtccaatacttctctaacaagaaccgtgtggttcctataatcctcggtcacagtaagggaggtgatgttgtcctcctctacgcctccaagtatcatgatgtcagcaatgtaatcaatctctcgggacgttatgatcttaaaaagggtataagagagcgtcttggagaagattttttggaaagaattaagcaacaaggattcatcgatattggagatggaaaatcggggtatcgtgttactgagaagagcttaatggacaggttaagcactgatattcatgaagcttgcctcaagattgacaaagagtgcagggtcttgacggttcatggatcggaggacgaggtaatacctgtggaagatgcgaaggagtttgcgaagatcataccaaaccacaagctggagattgtggaagtagctaatcatggttatactgagcaccaaagtcaattagtttcaacagttatggagttcataaagacagtcattgtgaagaacaactagaattgagttacgtttgccttttaaatcatgaaagtttgtaattcaaaaaaaaaaaaaaaaaagcttatcgggccgtcgac

SEQ ID NO: 34992 - protein, 291 aa, Arabidopsis thaliana
  peptide (1)..(291): Ceres Seq. ID no. 12334377
  misc_feature (38)..(284): Homolog of NCBI NO: 11358640 NR Description: probable esterase-like protein - Arabidopsis
  misc_feature (39)..(283): Homolog of NCBI NO: 34913064 NR Description: P0013G02.24 [Oryza sativa (japonica
  misc_feature (25)..(284): Homolog of NCBI NO: 18416707 NR Description: putative esterase - like protein
  misc_feature (25)..(284): Homolog of NCBI NO: 21595418 NR Description: putative esterase-like protein [Arabidopsis
  misc_feature (42)..(291): Homolog of NCBI NO: 15224799 NR Description: putative esterase; protein id: At2g19550.1
  misc_feature (32)..(291): Homolog of NCBI NO: 22135864 NR Description: putative protein [Arabidopsis thaliana]
  misc_feature (32)..(291): Homolog of NCBI NO: 15232826 NR Description: putative protein
  misc_feature (32)..(285): Homolog of NCBI NO: 21554728 NR Description: putative esterase [Arabidopsis thaliana]
  misc_feature (32)..(291): Homolog of NCBI NO: 15220578 NR Description: hypothetical protein; protein id: At1g29840.1
  misc_feature (1)..(291): Homolog of NCBI NO: 15228202 NR Description: putative protein; protein id: At3g47590.1
KTSPFPTSSFFNVRFPIKNNQISCNKAKNLRMDPSKGIQEQRIVIPNRHNEKLVGLLHETGSTDIVVLCHGFRSNKSNQIMNNVAAAIQKEGISAFRFDFSGNGESEGSFYYGNYNHEADDLHSVVQYFSNKNRVVPIILGHSKGGDVVLLYASKYHDVSNVINLSGRYDLKKGIRERLGEDFLERIKQQGFIDIGDGKSGYRVTEKSLMDRLSTDIHEACLKIDKECRVLTVHGSEDEVIPVEDAKEFAKIIPNHKLEIVEVANHGYTEHQSQLVSTVMEFIKTVIVKNN

SEQ ID NO: 34993 - protein, 260 aa, Arabidopsis thaliana
  peptide (1)..(260): Ceres Seq. ID no. 12334378
  misc_feature (7)..(253): Homolog of NCBI NO: 11358640 NR Description: probable esterase-like protein - Arabidopsis
  misc_feature (8)..(252): Homolog of NCBI NO: 34913064 NR Description: P0013G02.24 [Oryza sativa (japonica
  misc_feature (1)..(253): Homolog of NCBI NO: 18416707 NR Description: putative esterase - like protein
  misc_feature (1)..(253): Homolog of NCBI NO: 21595418 NR Description: putative esterase-like protein [Arabidopsis
  misc_feature (11)..(260): Homolog of NCBI NO: 15224799 NR Description: putative esterase; protein id: At2g19550.1
  misc_feature (1)..(260): Homolog of NCBI NO: 22135864 NR Description: putative protein [Arabidopsis thaliana]
  misc_feature (1)..(260): Homolog of NCBI NO: 15232826 NR Description: putative protein
  misc_feature (1)..(254): Homolog of NCBI NO: 21554728 NR Description: putative esterase [Arabidopsis thaliana]
  misc_feature (1)..(260): Homolog of NCBI NO: 15220578 NR Description: hypothetical protein; protein id: At1g29840.1
  misc_feature (1)..(260): Homolog of NCBI NO: 15228202 NR Description: putative protein; protein id: At3g47590.1
MDPSKGIQEQRIVIPNRHNEKLVGLLHETGSTDIVVLCHGFRSNKSNQIMNNVAAAIQKEGISAFRFDFSGNGESEGSFYYGNYNHEADDLHSVVQYFSNKNRVVPIILGHSKGGDVVLLYASKYHDVSNVINLSGRYDLKKGIRERLGEDFLERIKQQGFIDIGDGKSGYRVTEKSLMDRLSTDIHEACLKIDKECRVLTVHGSEDEVIPVEDAKEFAKIIPNHKLEIVEVANHGYTEHQSQLVSTVMEFIKTVIVKNN

SEQ ID NO: 34994 - protein, 211 aa, Arabidopsis thaliana
  peptide (1)..(211): Ceres Seq. ID no. 12334379
  misc_feature (1)..(204): Homolog of NCBI NO: 11358640 NR Description: probable esterase-like protein - Arabidopsis
  misc_feature (1)..(203): Homolog of NCBI NO: 34913064 NR Description: P0013G02.24 [Oryza sativa (japonica
  misc_feature (1)..(204): Homolog of NCBI NO: 18416707 NR Description: putative esterase - like protein
  misc_feature (1)..(204): Homolog of NCBI NO: 21595418 NR Description: putative esterase-like protein [Arabidopsis
  misc_feature (1)..(211): Homolog of NCBI NO: 15224799 NR Description: putative esterase; protein id: At2g19550.1
  misc_feature (1)..(211): Homolog of NCBI NO: 22135864 NR Description: putative protein [Arabidopsis thaliana]
  misc_feature (1)..(211): Homolog of NCBI NO: 15232826 NR Description: putative protein
  misc_feature (1)..(205): Homolog of NCBI NO: 21554728 NR Description: putative esterase [Arabidopsis thaliana]
  misc_feature (1)..(211): Homolog of NCBI NO: 15220578 NR Description: hypothetical protein; protein id: At1g29840.1
  misc_feature (1)..(211): Homolog of NCBI NO: 15228202 NR Description: putative protein; protein id: At3g47590.1
MNNVAAAIQKEGISAFRFDFSGNGESEGSFYYGNYNHEADDLHSVVQYFSNKNRVVPIILGHSKGGDVVLLYASKYHDVSNVINLSGRYDLKKGIRERLGEDFLERIKQQGFIDIGDGKSGYRVTEKSLMDRLSTDIHEACLKIDKECRVLTVHGSEDEVIPVEDAKEFAKIIPNHKLEIVEVANHGYTEHQSQLVSTVMEFIKTVIVKNN

SEQ ID NO: 34995 - DNA, 1082 bp, Arabidopsis thaliana
  misc_feature (1)..(1082): Ceres Seq. ID no. 12333955
  misc_feature: MA Experiment ID: 108435 Result: Down-regulated in Transcription
  misc_feature: MA Experiment 108435 PARAMETER Experiment Name: At_stm_Mutants_cDNA_P Parameter: Plant Line Value: wt Landsburg vs stm
  misc_feature: MA Experiment 108435 PARAMETER Experiment Name: At_stm_Mutants_cDNA_P Parameter: Tissue Value: Shoot Apical Meristem Region
  misc_feature: MA Experiment ID: 108461 Result: Up-regulated in Transcription
  misc_feature: MA Experiment 108461 PARAMETER Experiment Name: At_Germinating_Seeds_cDNA_P Parameter: Age (day) Value: 1 vs. 0
  misc_feature: MA Experiment 108461 PARAMETER Experiment Name: At_Germinating_Seeds_cDNA_P Parameter: Tissue Value: Germinating Seeds
  misc_feature: MA Experiment ID: 108462 Result: Up-regulated in Transcription
  misc_feature: MA Experiment 108462 PARAMETER Experiment Name: At_Germinating_Seeds_cDNA_P Parameter: Age (day) Value: 2 vs. 0
  misc_feature: MA Experiment 108462 PARAMETER Experiment Name: At_Germinating_Seeds_cDNA_P Parameter: Tissue Value: Germinating Seeds
  misc_feature: MA Experiment ID: 108463 Result: Up-regulated in Transcription
  misc_feature: MA Experiment 108463 PARAMETER Experiment Name: At_Germinating_Seeds_cDNA_P Parameter: Age (day) Value: 3 vs. 0
  misc_feature: MA Experiment 108463 PARAMETER Experiment Name: At_Germinating_Seeds_cDNA_P Parameter: Tissue Value: Germinating Seeds
  misc_feature: MA Experiment ID: 108464 Result: Up-regulated in Transcription
  misc_feature: MA Experiment 108464 PARAMETER Experiment Name: At_Germinating_Seeds_cDNA_P Parameter: Age (day) Value: 4 vs. 0
  misc_feature: MA Experiment 108464 PARAMETER Experiment Name: At_Germinating_Seeds_cDNA_P Parameter: Tissue Value: Germinating Seeds
  misc_feature: MA Experiment ID: 108488 Result: Up-regulated in Transcription
  misc_feature: MA Experiment ID: 108489 Result: Down-regulated in Transcription
  misc_feature: MA Experiment ID: 108573 Result: Up-regulated in Transcription
  misc_feature: MA Experiment 108573 PARAMETER Experiment Name: At_Drought_cDNA_P Parameter: Timepoint (hr) Value: 6
  misc_feature: MA Experiment 108573 PARAMETER Experiment Name: At_Drought_cDNA_P Parameter: Tissue Value: Aerial
  misc_feature: MA Experiment 108573 PARAMETER Experiment Name: At_Drought_cDNA_P Parameter: Treatment Value: Drought vs. No Drought
  misc_feature: MA Experiment ID: 20000072 Result: Down-regulated in Transcription
  misc_feature: MA Experiment 20000072 PARAMETER Experiment Name: At_100uM_ABA_Mutants_cDNA_P Parameter: Plant Line Value: CS8105
  misc_feature: MA Experiment 20000072 PARAMETER Experiment Name: At_100uM_ABA_Mutants_cDNA_P Parameter: Timepoint (hr) Value: 6
  misc_feature: MA Experiment 20000072 PARAMETER Experiment Name: At_100uM_ABA_Mutants_cDNA_P Parameter: Tissue Value: Aerial
  misc_feature: MA Experiment 20000072 PARAMETER Experiment Name: At_100uM_ABA_Mutants_cDNA_P Parameter: Treatment Value: 100uM ABA vs. No Treatment
  misc_feature: MA Experiment ID: 20000086 Result: Down-regulated in Transcription
  misc_feature: MA Experiment 20000086 PARAMETER Experiment Name: At_100uM_ABA_Mutants_cDNA_P Parameter: Plant Line Value: CS22
  misc_feature: MA Experiment 20000086 PARAMETER Experiment Name: At_100uM_ABA_Mutants_cDNA_P Parameter: Timepoint (hr) Value: 6
  misc_feature: MA Experiment 20000086 PARAMETER Experiment Name: At_100uM_ABA_Mutants_cDNA_P Parameter: Tissue Value: Aerial
  misc_feature: MA Experiment 20000086 PARAMETER Experiment Name: At_100uM_ABA_Mutants_cDNA_P Parameter: Treatment Value: 100uM ABA vs. No Treatment
  misc_feature: MA Experiment ID: 20000087 Result: Down-regulated in Transcription
  misc_feature: MA Experiment 20000087 PARAMETER Experiment Name: At_100uM_ABA_Mutants_cDNA_P Parameter: Plant Line Value: WS
  misc_feature: MA Experiment 20000087 PARAMETER Experiment Name: At_100uM_ABA_Mutants_cDNA_P Parameter: Timepoint (hr) Value: 6
  misc_feature: MA Experiment 20000087 PARAMETER Experiment Name: At_100uM_ABA_Mutants_cDNA_P Parameter: Tissue Value: Aerial
  misc_feature: MA Experiment 20000087 PARAMETER Experiment Name: At_100uM_ABA_Mutants_cDNA_P Parameter: Treatment Value: 100uM ABA vs. No Treatment
  misc_feature: MA Experiment ID: 20000089 Result: Down-regulated in Transcription
  misc_feature: MA Experiment ID: 20000307 Result: Up-regulated in Transcription
  misc_feature: MA Experiment 20000307 PARAMETER Experiment Name: At_Germinating_Seeds_Sub_P Parameter: Age (hr) Value: 24 vs. 0
  misc_feature: MA Experiment 20000307 PARAMETER Experiment Name: At_Germinating_Seeds_Sub_P Parameter: Organism Value: A. thaliana
  misc_feature: MA Experiment 20000307 PARAMETER Experiment Name: At_Germinating_Seeds_Sub_P Parameter: Plant Line Value: WS
  misc_feature: MA Experiment 20000307 PARAMETER Experiment Name: At_Germinating_Seeds_Sub_P Parameter: Tissue Value: Germinating Seeds
  misc_feature: MA Experiment ID: 20000314 Result: Down-regulated in Transcription
  misc_feature: MA Experiment 20000314 PARAMETER Experiment Name: At_14day_Shoots-Roots_Sub_P Parameter: Age (day) Value: 14
  misc_feature: MA Experiment 20000314 PARAMETER Experiment Name: At_14day_Shoots-Roots_Sub_P Parameter: Organism Value: A. thaliana
  misc_feature: MA Experiment 20000314 PARAMETER Experiment Name: At_14day_Shoots-Roots_Sub_P Parameter: Plant Line Value: WS
  misc_feature: MA Experiment 20000314 PARAMETER Experiment Name: At_14day_Shoots-Roots_Sub_P Parameter: Tissue Value: Roots vs. Whole Plant
  misc_feature: MA Experiment ID: 20000327 Result: Up-regulated in Transcription
  misc_feature: MA Experiment 20000327 PARAMETER Experiment Name: At_42deg_Heat_Sub_P Parameter: Age (day) Value: 14
  misc_feature: MA Experiment 20000327 PARAMETER Experiment Name: At_42deg_Heat_Sub_P Parameter: Organism Value: A. thaliana
  misc_feature: MA Experiment 20000327 PARAMETER Experiment Name: At_42deg_Heat_Sub_P Parameter: Plant Line Value: WS
  misc_feature: MA Experiment 20000327 PARAMETER Experiment Name: At_42deg_Heat_Sub_P Parameter: Temperature (deg C) Value: 42 vs. 22
  misc_feature: MA Experiment 20000327 PARAMETER Experiment Name: At_42deg_Heat_Sub_P Parameter: Timepoint (hr) Value: 1
  misc_feature: MA Experiment 20000327 PARAMETER Experiment Name: At_42deg_Heat_Sub_P Parameter: Tissue Value: Aerial
  misc_feature: MA Experiment ID: 20000328 Result: Up-regulated in Transcription
  misc_feature: MA Experiment 20000328 PARAMETER Experiment Name: At_42deg_Heat_Sub_P Parameter: Age (day) Value: 14
  misc_feature: MA Experiment 20000328 PARAMETER Experiment Name: At_42deg_Heat_Sub_P Parameter: Organism Value: A. thaliana
  misc_feature: MA Experiment 20000328 PARAMETER Experiment Name: At_42deg_Heat_Sub_P Parameter: Plant Line Value: WS
  misc_feature: MA Experiment 20000328 PARAMETER Experiment Name: At_42deg_Heat_Sub_P Parameter: Temperature (deg C) Value: 42 vs. 22
  misc_feature: MA Experiment 20000328 PARAMETER Experiment Name: At_42deg_Heat_Sub_P Parameter: Timepoint (hr) Value: 6
  misc_feature: MA Experiment 20000328 PARAMETER Experiment Name: At_42deg_Heat_Sub_P Parameter: Tissue Value: Aerial
  misc_feature: MA Experiment ID: 20000355 Result: Down-regulated in Transcription
  misc_feature: MA Experiment 20000355 PARAMETER Experiment Name: At_Siliques_Sub_P Parameter: Age (day) Value: 21
  misc_feature: MA Experiment 20000355 PARAMETER Experiment Name: At_Siliques_Sub_P Parameter: Organism Value: A. thaliana
  misc_feature: MA Experiment 20000355 PARAMETER Experiment Name: At_Siliques_Sub_P Parameter: Plant Line Value: WS
  misc_feature: MA Experiment 20000355 PARAMETER Experiment Name: At_Siliques_Sub_P Parameter: Tissue Value: Less Than 5mm Siliques vs. Whole Plant
  misc_feature: MA Experiment ID: 20000440 Result: Down-regulated in Transcription
  misc_feature: MA Experiment 20000440 PARAMETER Experiment Name: At_Closed-Flower__Sub_P Parameter: Tissue Value: Closed Flower vs. Whole Plant
acaaaccgcaaactcgacataactaacaaacgacgccggagatggccgccacttcaaccgccgctgctgcttcttcaatcatgggtacccgggtggtttccgacattagctccaattcaagccggttcacagcccggttcggattcggaaccaagaaagcatctcccaaaaaggctaagacggttatctcagaccggcctctatggttcccaggcgcaaaatcacccgaatatctcgacggttcacttgtcggggactacgggttcgatccttttggtttaggcaaaccggcggagtatctccaattcgatttggattccttggaccagaacttagccaagaacttatacggagaagtgatcgggactcgtaccgaggcggtggaccccaaatcgacgccgtttcagccatatagtgaagtcttcgggctacaaagattcagagaatgtgagctgattcacggtcggtgggcaatgctcgccactcttggcgctatcaccgtcgaatggctcaccggtgttacttggcaagacgccggcaaggtagagctagtggatggatcatcttacttaggacagccattgccgttctctatctcgacattgatatggatcgaagtgttagtgatcggctacattgagttccaacgaaacgctgaactggactcggagaagcgtttgtatccaggaggcaagttctttgacccgttaggactagcgtctgacccggtgaagaaggctcagcttcagctagctgagatcaaacatgctcgtttagccatggttggattcttgggttttgcggttcaggcggctgcaaccggtaaaggaccgctcaacaactgggcgactcaccttagtgacccacttcacaccaccattatcgataccttctcttcctcctgatgtggtggcttttagcttctataggtgtcatgtaatgatgtactgtcgttattttaaagaaaatttggcaccttttgtataaacagaatttcttatacctcgcagtttgtgtttacgtagatcatcggagttatgatgagcatttacatcaaattaatcgtttgctaaattctgtcc

SEQ ID NO: 34996 - protein, 287 aa, Arabidopsis thaliana
  peptide (1)..(287): Ceres Seq. ID no. 12333956
  misc_feature (60)..(258): Pfam Name: Chlorophyll A-B binding protein Pfam Description: Chlorophyll A-B binding protein
  misc_feature (1)..(183): Homolog of NCBI NO: 30680697 NR Description: chlorophyll a/b-binding protein -related
  misc_feature (3)..(287): Homolog of NCBI NO: 7443231 NR Description: chlorophyll a/b-binding protein CP29 precursor -
  misc_feature (3)..(287): Homolog of NCBI NO: 7443230 NR Description: probable chlorophyll a/b-binding protein - rice
  misc_feature (3)..(287): Homolog of NCBI NO: 445116 NR Description: light-harvesting complex IIa protein;
  misc_feature (3)..(287): Homolog of NCBI NO: 4689382 NR Description: chlorophyll a/b binding protein CP29 [Vigna
  misc_feature (1)..(287): Homolog of NCBI NO: 15081739 NR Description: AT5g01530/F7A7_50 [Arabidopsis thaliana]
  misc_feature (1)..(287): Homolog of NCBI NO: 13877547 NR Description: chlorophyll a/b-binding protein CP29 [Arabidopsis
  misc_feature (1)..(287): Homolog of NCBI NO: 20260162 NR Description: chlorophyll a/b-binding protein CP29 [Arabidopsis
  misc_feature (1)..(287): Homolog of NCBI NO: 15241005 NR Description: light-harvesting chlorophyll a/b binding protein
  misc_feature (1)..(287): Homolog of NCBI NO: 15231990 NR Description: putative chlorophyll a/b-binding protein
MAATSTAAAASSIMGTRVVSDISSNSSRFTARFGFGTKKASPKKAKTVISDRPLWFPGAKSPEYLDGSLVGDYGFDPFGLGKPAEYLQFDLDSLDQNLAKNLYGEVIGTRTEAVDPKSTPFQPYSEVFGLQRFRECELIHGRWAMLATLGAITVEWLTGVTWQDAGKVELVDGSSYLGQPLPFSISTLIWIEVLVIGYIEFQRNAELDSEKRLYPGGKFFDPLGLASDPVKKAQLQLAEIKHARLAMVGFLGFAVQAAATGKGPLNNWATHLSDPLHTTIIDTFSSS

SEQ ID NO: 34997 - protein, 274 aa, Arabidopsis thaliana
  peptide (1)..(274): Ceres Seq. ID no. 12333957
  misc_feature (47)..(245): Pfam Name: Chlorophyll A-B binding protein Pfam Description: Chlorophyll A-B binding protein
  misc_feature (1)..(170): Homolog of NCBI NO: 30680697 NR Description: chlorophyll a/b-binding protein -related
  misc_feature (1)..(274): Homolog of NCBI NO: 7443231 NR Description: chlorophyll a/b-binding protein CP29 precursor -
  misc_feature (1)..(274): Homolog of NCBI NO: 7443230 NR Description: probable chlorophyll a/b-binding protein - rice
  misc_feature (1)..(274): Homolog of NCBI NO: 445116 NR Description: light-harvesting complex IIa protein;
  misc_feature (1)..(274): Homolog of NCBI NO: 4689382 NR Description: chlorophyll a/b binding protein CP29 [Vigna
  misc_feature (1)..(274): Homolog of NCBI NO: 15081739 NR Description: AT5g01530/F7A7_50 [Arabidopsis thaliana]
  misc_feature (1)..(274): Homolog of NCBI NO: 13877547 NR Description: chlorophyll a/b-binding protein CP29 [Arabidopsis
  misc_feature (1)..(274): Homolog of NCBI NO: 20260162 NR Description: chlorophyll a/b-binding protein CP29 [Arabidopsis
  misc_feature (1)..(274): Homolog of NCBI NO: 15241005 NR Description: light-harvesting chlorophyll a/b binding protein
  misc_feature (1)..(274): Homolog of NCBI NO: 15231990 NR Description: putative chlorophyll a/b-binding protein
MGTRVVSDISSNSSRFTARFGFGTKKASPKKAKTVISDRPLWFPGAKSPEYLDGSLVGDYGFDPFGLGKPAEYLQFDLDSLDQNLAKNLYGEVIGTRTEAVDPKSTPFQPYSEVFGLQRFRECELIHGRWAMLATLGAITVEWLTGVTWQDAGKVELVDGSSYLGQPLPFSISTLIWIEVLVIGYIEFQRNAELDSEKRLYPGGKFFDPLGLASDPVKKAQLQLAEIKHARLAMVGFLGFAVQAAATGKGPLNNWATHLSDPLHTTIIDTFSSS

SEQ ID NO: 34998 - protein, 143 aa, Arabidopsis thaliana
  peptide (1)..(143): Ceres Seq. ID no. 12333958
  misc_feature (1)..(114): Pfam Name: Chlorophyll A-B binding protein Pfam Description: Chlorophyll A-B binding protein
  misc_feature (1)..(39): Homolog of NCBI NO: 30680697 NR Description: chlorophyll a/b-binding protein -related
  misc_feature (1)..(143): Homolog of NCBI NO: 7443231 NR Description: chlorophyll a/b-binding protein CP29 precursor -
  misc_feature (1)..(143): Homolog of NCBI NO: 7443230 NR Description: probable chlorophyll a/b-binding protein - rice
  misc_feature (1)..(143): Homolog of NCBI NO: 445116 NR Description: light-harvesting complex IIa protein;
  misc_feature (1)..(143): Homolog of NCBI NO: 4689382 NR Description: chlorophyll a/b binding protein CP29 [Vigna
  misc_feature (1)..(143): Homolog of NCBI NO: 15081739 NR Description: AT5g01530/F7A7_50 [Arabidopsis thaliana]
  misc_feature (1)..(143): Homolog of NCBI NO: 13877547 NR Description: chlorophyll a/b-binding protein CP29 [Arabidopsis
  misc_feature (1)..(143): Homolog of NCBI NO: 20260162 NR Description: chlorophyll a/b-binding protein CP29 [Arabidopsis
  misc_feature (1)..(143): Homolog of NCBI NO: 15241005 NR Description: light-harvesting chlorophyll a/b binding protein
  misc_feature (1)..(143): Homolog of NCBI NO: 15231990 NR Description: putative chlorophyll a/b-binding protein
MLATLGAITVEWLTGVTWQDAGKVELVDGSSYLGQPLPFSISTLIWIEVLVIGYIEFQRNAELDSEKRLYPGGKFFDPLGLASDPVKKAQLQLAEIKHARLAMVGFLGFAVQAAATGKGPLNNWATHLSDPLHTTIIDTFSSS

SEQ ID NO: 34999 - DNA, 1289 bp, Arabidopsis thaliana
  misc_feature (1)..(1289): Ceres Seq. ID no. 12334274
  misc_feature: MA Experiment ID: 108434 Result: Down-regulated in Transcription
  misc_feature: MA Experiment 108434 PARAMETER Experiment Name: At_Root_Tips_cDNA_P Parameter: Tissue Value: Root Tips
  misc_feature: MA Experiment ID: 108462 Result: Up-regulated in Transcription
  misc_feature: MA Experiment 108462 PARAMETER Experiment Name: At_Germinating_Seeds_cDNA_P Parameter: Age (day) Value: 2 vs. 0
  misc_feature: MA Experiment 108462 PARAMETER Experiment Name: At_Germinating_Seeds_cDNA_P Parameter: Tissue Value: Germinating Seeds
  misc_feature: MA Experiment ID: 108463 Result: Up-regulated in Transcription
  misc_feature: MA Experiment 108463 PARAMETER Experiment Name: At_Germinating_Seeds_cDNA_P Parameter: Age (day) Value: 3 vs. 0
  misc_feature: MA Experiment 108463 PARAMETER Experiment Name: At_Germinating_Seeds_cDNA_P Parameter: Tissue Value: Germinating Seeds
  misc_feature: MA Experiment ID: 108469 Result: Up-regulated in Transcription
  misc_feature: MA Experiment ID: 108561 Result: Up-regulated in Transcription
  misc_feature: MA Experiment 108561 PARAMETER Experiment Name: At_100uM_ABA_cDNA_P Parameter: Timepoint (hr) Value: 6
  misc_feature: MA Experiment 108561 PARAMETER Experiment Name: At_100uM_ABA_cDNA_P Parameter: Tissue Value: Aerial
  misc_feature: MA Experiment 108561 PARAMETER Experiment Name: At_100uM_ABA_cDNA_P Parameter: Treatment Value: 100uM ABA vs. No Treatment
  misc_feature: MA Experiment ID: 108585 Result: Up-regulated in Transcription
  misc_feature: MA Experiment 108585 PARAMETER Experiment Name: At_5mM_NaNP_cDNA_P Parameter: Timepoint (hr) Value: 6
  misc_feature: MA Experiment 108585 PARAMETER Experiment Name: At_5mM_NaNP_cDNA_P Parameter: Tissue Value: Aerial
  misc_feature: MA Experiment 108585 PARAMETER Experiment Name: At_5mM_NaNP_cDNA_P Parameter: Treatment Value: null
  misc_feature: MA Experiment ID: 108595 Result: Up-regulated in Transcription
  misc_feature: MA Experiment 108595 PARAMETER Experiment Name: At_Ler-pi_Ovule_cDNA_P Parameter: Plant Line Value: null
  misc_feature: MA Experiment ID: 108605 Result: Up-regulated in Transcription
  misc_feature: MA Experiment 108605 PARAMETER Experiment Name: At_100uM_ABA_cDNA_P Parameter: Timepoint (hr) Value: 6
  misc_feature: MA Experiment 108605 PARAMETER Experiment Name: At_100uM_ABA_cDNA_P Parameter: Tissue Value: Aerial
  misc_feature: MA Experiment 108605 PARAMETER Experiment Name: At_100uM_ABA_cDNA_P Parameter: Treatment Value: 100uM ABA vs. No Treatment
  misc_feature: MA Experiment ID: 108607 Result: Up-regulated in Transcription
  misc_feature: MA Experiment 108607 PARAMETER Experiment Name: At_100uM_ABA_cDNA_P Parameter: Timepoint (hr) Value: 4
  misc_feature: MA Experiment 108607 PARAMETER Experiment Name: At_100uM_ABA_cDNA_P Parameter: Tissue Value: Aerial
  misc_feature: MA Experiment 108607 PARAMETER Experiment Name: At_100uM_ABA_cDNA_P Parameter: Treatment Value: 100uM ABA vs. No Treatment
  misc_feature: MA Experiment ID: 108667 Result: Up-regulated in Transcription
  misc_feature: MA Experiment 108667 PARAMETER Experiment Name: At_2mM_SA_cDNA_P Parameter: Plant Line Value: WS
  misc_feature: MA Experiment 108667 PARAMETER Experiment Name: At_2mM_SA_cDNA_P Parameter: Timepoint (hr) Value: 1
  misc_feature: MA Experiment 108667 PARAMETER Experiment Name: At_2mM_SA_cDNA_P Parameter: Treatment Value: 2mM SA vs. No Treatment
  misc_feature: MA Experiment ID: 20000069 Result: Up-regulated in Transcription
  misc_feature: MA Experiment 20000069 PARAMETER Experiment Name: At_100uM_ABA_Mutants_cDNA_P Parameter: Plant Line Value: CS23
  misc_feature: MA Experiment 20000069 PARAMETER Experiment Name: At_100uM_ABA_Mutants_cDNA_P Parameter: Timepoint (hr) Value: 6
  misc_feature: MA Experiment 20000069 PARAMETER Experiment Name: At_100uM_ABA_Mutants_cDNA_P Parameter: Tissue Value: Aerial
  misc_feature: MA Experiment 20000069 PARAMETER Experiment Name: At_100uM_ABA_Mutants_cDNA_P Parameter: Treatment Value: 100uM ABA vs. No Treatment
  misc_feature: MA Experiment ID: 20000070 Result: Up-regulated in Transcription
  misc_feature: MA Experiment 20000070 PARAMETER Experiment Name: At_100uM_ABA_Mutants_cDNA_P Parameter: Plant Line Value: CS24
  misc_feature: MA Experiment 20000070 PARAMETER Experiment Name: At_100uM_ABA_Mutants_cDNA_P Parameter: Timepoint (hr) Value: 6
  misc_feature: MA Experiment 20000070 PARAMETER Experiment Name: At_100uM_ABA_Mutants_cDNA_P Parameter: Tissue Value: Aerial
  misc_feature: MA Experiment 20000070 PARAMETER Experiment Name: At_100uM_ABA_Mutants_cDNA_P Parameter: Treatment Value: 100uM ABA vs. No Treatment
  misc_feature: MA Experiment ID: 20000072 Result: Up-regulated in Transcription
  misc_feature: MA Experiment 20000072 PARAMETER Experiment Name: At_100uM_ABA_Mutants_cDNA_P Parameter: Plant Line Value: CS8105
  misc_feature: MA Experiment 20000072 PARAMETER Experiment Name: At_100uM_ABA_Mutants_cDNA_P Parameter: Timepoint (hr) Value: 6
  misc_feature: MA Experiment 20000072 PARAMETER Experiment Name: At_100uM_ABA_Mutants_cDNA_P Parameter: Tissue Value: Aerial
  misc_feature: MA Experiment 20000072 PARAMETER Experiment Name: At_100uM_ABA_Mutants_cDNA_P Parameter: Treatment Value: 100uM ABA vs. No Treatment
  misc_feature: MA Experiment ID: 20000087 Result: Up-regulated in Transcription
  misc_feature: MA Experiment 20000087 PARAMETER Experiment Name: At_100uM_ABA_Mutants_cDNA_P Parameter: Plant Line Value: WS
  misc_feature: MA Experiment 20000087 PARAMETER Experiment Name: At_100uM_ABA_Mutants_cDNA_P Parameter: Timepoint (hr) Value: 6
  misc_feature: MA Experiment 20000087 PARAMETER Experiment Name: At_100uM_ABA_Mutants_cDNA_P Parameter: Tissue Value: Aerial
  misc_feature: MA Experiment 20000087 PARAMETER Experiment Name: At_100uM_ABA_Mutants_cDNA_P Parameter: Treatment Value: 100uM ABA vs. No Treatment
  misc_feature: MA Experiment ID: 20000169 Result: Up-regulated in Transcription
  misc_feature: MA Experiment 20000169 PARAMETER Experiment Name: At_100uM_ABA_P Parameter: Age (day) Value: 14
  misc_feature: MA Experiment 20000169 PARAMETER Experiment Name: At_100uM_ABA_P Parameter: Organism Value: A. thaliana
  misc_feature: MA Experiment 20000169 PARAMETER Experiment Name: At_100uM_ABA_P Parameter: Plant Line Value: WS
  misc_feature: MA Experiment 20000169 PARAMETER Experiment Name: At_100uM_ABA_P Parameter: Timepoint (hr) Value: 6
  misc_feature: MA Experiment 20000169 PARAMETER Experiment Name: At_100uM_ABA_P Parameter: Tissue Value: Aerial
  misc_feature: MA Experiment 20000169 PARAMETER Experiment Name: At_100uM_ABA_P Parameter: Treatment Value: 100uM ABA vs. No Treatment
  misc_feature: MA Experiment ID: 20000171 Result: Down-regulated in Transcription
  misc_feature: MA Experiment 20000171 PARAMETER Experiment Name: At_42deg_Heat_P Parameter: Age (day) Value: 14
  misc_feature: MA Experiment 20000171 PARAMETER Experiment Name: At_42deg_Heat_P Parameter: Organism Value: A. thaliana
  misc_feature: MA Experiment 20000171 PARAMETER Experiment Name: At_42deg_Heat_P Parameter: Plant Line Value: WS
  misc_feature: MA Experiment 20000171 PARAMETER Experiment Name: At_42deg_Heat_P Parameter: Temperature (deg C) Value: 42 vs. 22
  misc_feature: MA Experiment 20000171 PARAMETER Experiment Name: At_42deg_Heat_P Parameter: Timepoint (hr) Value: 1
  misc_feature: MA Experiment 20000171 PARAMETER Experiment Name: At_42deg_Heat_P Parameter: Tissue Value: Aerial
  misc_feature: MA Experiment ID: 20000173 Result: Down-regulated in Transcription
  misc_feature: MA Experiment 20000173 PARAMETER Experiment Name: At_42deg_Heat_P Parameter: Age (day) Value: 14
  misc_feature: MA Experiment 20000173 PARAMETER Experiment Name: At_42deg_Heat_P Parameter: Organism Value: A. thaliana
  misc_feature: MA Experiment 20000173 PARAMETER Experiment Name: At_42deg_Heat_P Parameter: Plant Line Value: WS
  misc_feature: MA Experiment 20000173 PARAMETER Experiment Name: At_42deg_Heat_P Parameter: Temperature (deg C) Value: 42 vs. 22
  misc_feature: MA Experiment 20000173 PARAMETER Experiment Name: At_42deg_Heat_P Parameter: Timepoint (hr) Value: 6
  misc_feature: MA Experiment 20000173 PARAMETER Experiment Name: At_42deg_Heat_P Parameter: Tissue Value: Aerial
  misc_feature: MA Experiment ID: 20000180 Result: Up-regulated in Transcription
  misc_feature: MA Experiment 20000180 PARAMETER Experiment Name: At_Germinating_Seeds_P Parameter: Age (hr) Value: 24 vs. 0
  misc_feature: MA Experiment 20000180 PARAMETER Experiment Name: At_Germinating_Seeds_P Parameter: Tissue Value: Germinating Seeds
  misc_feature: MA Experiment ID: 20000184 Result: Down-regulated in Transcription
  misc_feature: MA Experiment 20000184 PARAMETER Experiment Name: At_Shoots__P Parameter: Age (day) Value: 7
  misc_feature: MA Experiment 20000184 PARAMETER Experiment Name: At_Shoots__P Parameter: Tissue Value: Shoots vs. Whole Plant
  misc_feature: MA Experiment ID: 20000213 Result: Down-regulated in Transcription
  misc_feature: MA Experiment 20000213 PARAMETER Experiment Name: At_4deg_Cold_P Parameter: Timepoint (hr) Value: 2
  misc_feature: MA Experiment ID: 20000224 Result: Down-regulated in Transcription
  misc_feature: MA Experiment ID: 20000265 Result: Down-regulated in Transcription
  misc_feature: MA Experiment 20000265 PARAMETER Experiment Name: At_Open_Flower_P Parameter: Age (day) Value: 21
  misc_feature: MA Experiment 20000265 PARAMETER Experiment Name: At_Open_Flower_P Parameter: Plant Line Value: WS
  misc_feature: MA Experiment 20000265 PARAMETER Experiment Name: At_Open_Flower_P Parameter: Tissue Value: Closed Flower vs. Whole Plant
  misc_feature: MA Experiment ID: 20000268 Result: Down-regulated in Transcription
  misc_feature: MA Experiment 20000268 PARAMETER Experiment Name: At_100mM_NaCl__P Parameter: Age (day) Value: 14
  misc_feature: MA Experiment 20000268 PARAMETER Experiment Name: At_100mM_NaCl__P Parameter: Organism Value: A. thaliana
  misc_feature: MA Experiment 20000268 PARAMETER Experiment Name: At_100mM_NaCl__P Parameter: Plant Line Value: WS
  misc_feature: MA Experiment 20000268 PARAMETER Experiment Name: At_100mM_NaCl__P Parameter: Timepoint (hr) Value: 6
  misc_feature: MA Experiment 20000268 PARAMETER Experiment Name: At_100mM_NaCl__P Parameter: Tissue Value: Whole Plant
  misc_feature: MA Experiment 20000268 PARAMETER Experiment Name: At_100mM_NaCl__P Parameter: Treatment Value: 100mM NaCl vs. No Treatment
  misc_feature: MA Experiment ID: 20000438 Result: Down-regulated in Transcription
  misc_feature: MA Experiment 20000438 PARAMETER Experiment Name: At_Shoots__P Parameter: Age (day) Value: 14
  misc_feature: MA Experiment 20000438 PARAMETER Experiment Name: At_Shoots__P Parameter: Tissue Value: Shoots vs. Whole Plant
  misc_feature: MA Experiment ID: 20000452 Result: Down-regulated in Transcription
  misc_feature: MA Experiment 20000452 PARAMETER Experiment Name: At_CS6879_Shoots-Roots_P Parameter: Age (day) Value: 14
  misc_feature: MA Experiment 20000452 PARAMETER Experiment Name: At_CS6879_Shoots-Roots_P Parameter: Organism Value: A. thaliana
  misc_feature: MA Experiment 20000452 PARAMETER Experiment Name: At_CS6879_Shoots-Roots_P Parameter: Plant Line Value: CS6879 vs. WS
  misc_feature: MA Experiment 20000452 PARAMETER Experiment Name: At_CS6879_Shoots-Roots_P Parameter: Tissue Value: Shoots
  misc_feature: MA Experiment ID: 20000453 Result: Up-regulated in Transcription
  misc_feature: MA Experiment 20000453 PARAMETER Experiment Name: At_100uM_ABA_P Parameter: Age (day) Value: 15
  misc_feature: MA Experiment 20000453 PARAMETER Experiment Name: At_100uM_ABA_P Parameter: Organism Value: A. thaliana
  misc_feature: MA Experiment 20000453 PARAMETER Experiment Name: At_100uM_ABA_P Parameter: Plant Line Value: WS
  misc_feature: MA Experiment 20000453 PARAMETER Experiment Name: At_100uM_ABA_P Parameter: Timepoint (hr) Value: 24
  misc_feature: MA Experiment 20000453 PARAMETER Experiment Name: At_100uM_ABA_P Parameter: Tissue Value: Aerial
  misc_feature: MA Experiment 20000453 PARAMETER Experiment Name: At_100uM_ABA_P Parameter: Treatment Value: 100uM ABA vs. No Treatment
  misc_feature: MA Experiment ID: 20000460 Result: Up-regulated in Transcription
  misc_feature: MA Experiment 20000460 PARAMETER Experiment Name: At_10percent_PEG_P Parameter: Age (day) Value: 12
  misc_feature: MA Experiment 20000460 PARAMETER Experiment Name: At_10percent_PEG_P Parameter: Organism Value: A. thaliana
  misc_feature: MA Experiment 20000460 PARAMETER Experiment Name: At_10percent_PEG_P Parameter: Plant Line Value: WS
  misc_feature: MA Experiment 20000460 PARAMETER Experiment Name: At_10percent_PEG_P Parameter: Timepoint (day) Value: 12
  misc_feature: MA Experiment 20000460 PARAMETER Experiment Name: At_10percent_PEG_P Parameter: Tissue Value: Whole Plant
  misc_feature: MA Experiment 20000460 PARAMETER Experiment Name: At_10percent_PEG_P Parameter: Treatment Value: 10percent PEG vs. No Treatment
  misc_feature: MA Experiment ID: 20000495 Result: Up-regulated in Transcription
  misc_feature: MA Experiment 20000495 PARAMETER Experiment Name: At_Guard_Cells_P Parameter: Harvest Date Value: 8/2/2002
  misc_feature: MA Experiment 20000495 PARAMETER Experiment Name: At_Guard_Cells_P Parameter: Organism Value: A. thaliana
  misc_feature: MA Experiment 20000495 PARAMETER Experiment Name: At_Guard_Cells_P Parameter: Tissue Value: Guard Cells vs. Leaves
  misc_feature: MA Experiment ID: 20000709 Result: Up-regulated in Transcription
  misc_feature: MA Experiment 20000709 PARAMETER Experiment Name: At_15mM_NH4NO3_L-to-H_P Parameter: Age (hr) Value: 14
  misc_feature: MA Experiment 20000709 PARAMETER Experiment Name: At_15mM_NH4NO3_L-to-H_P Parameter: Organism Value: A. thaliana
  misc_feature: MA Experiment 20000709 PARAMETER Experiment Name: At_15mM_NH4NO3_L-to-H_P Parameter: Plant Line Value: WS
  misc_feature: MA Experiment 20000709 PARAMETER Experiment Name: At_15mM_NH4NO3_L-to-H_P Parameter: Timepoint (hr) Value: 4
  misc_feature: MA Experiment 20000709 PARAMETER Experiment Name: At_15mM_NH4NO3_L-to-H_P Parameter: Tissue Value: Aerial
  misc_feature: MA Experiment 20000709 PARAMETER Experiment Name: At_15mM_NH4NO3_L-to-H_P Parameter: Treatment Value: 15mM NH4NO3 vs. 30mM Mannitol
  misc_feature: MA Experiment ID: 20000794 Result: Up-regulated in Transcription
  misc_feature: MA Experiment 20000794 PARAMETER Experiment Name: At_Petals_P Parameter: Age (day) Value: 23-25 days
  misc_feature: MA Experiment 20000794 PARAMETER Experiment Name: At_Petals_P Parameter: Plant Line Value: WS
  misc_feature: MA Experiment 20000794 PARAMETER Experiment Name: At_Petals_P Parameter: Tissue Value: Petals vs. Whole plant
  misc_feature: MA Experiment ID: 20001247 Result: Up-regulated in Transcription
  misc_feature: MA Experiment 20001247 PARAMETER Experiment Name: At_Far-red-induction_P Parameter: Age (day) Value: 7
  misc_feature: MA Experiment 20001247 PARAMETER Experiment Name: At_Far-red-induction_P Parameter: Light Value: Far-red vs. White
  misc_feature: MA Experiment 20001247 PARAMETER Experiment Name: At_Far-red-induction_P Parameter: Organism Value: A. thaliana
  misc_feature: MA Experiment 20001247 PARAMETER Experiment Name: At_Far-red-induction_P Parameter: Plant Line Value: Columbia
  misc_feature: MA Experiment 20001247 PARAMETER Experiment Name: At_Far-red-induction_P Parameter: Timepoint (hr) Value: 1
  misc_feature: MA Experiment 20001247 PARAMETER Experiment Name: At_Far-red-induction_P Parameter: Tissue Value: Whole Plant
  misc_feature: MA Experiment ID: 20001248 Result: Up-regulated in Transcription
  misc_feature: MA Experiment 20001248 PARAMETER Experiment Name: At_Far-red-induction_P Parameter: Age (day) Value: 7
  misc_feature: MA Experiment 20001248 PARAMETER Experiment Name: At_Far-red-induction_P Parameter: Light Value: Far-red vs. White
  misc_feature: MA Experiment 20001248 PARAMETER Experiment Name: At_Far-red-induction_P Parameter: Organism Value: A. thaliana
  misc_feature: MA Experiment 20001248 PARAMETER Experiment Name: At_Far-red-induction_P Parameter: Plant Line Value: Columbia
  misc_feature: MA Experiment 20001248 PARAMETER Experiment Name: At_Far-red-induction_P Parameter: Timepoint (hr) Value: 4
  misc_feature: MA Experiment 20001248 PARAMETER Experiment Name: At_Far-red-induction_P Parameter: Tissue Value: Whole Plant
  misc_feature: MA Experiment ID: 20001451 Result: Up-regulated in Transcription
  misc_feature: MA Experiment 20001451 PARAMETER Experiment Name: At_Far-red-induction_P Parameter: Age (day) Value: 7
  misc_feature: MA Experiment 20001451 PARAMETER Experiment Name: At_Far-red-induction_P Parameter: Light Value: Far-red vs. White
  misc_feature: MA Experiment 20001451 PARAMETER Experiment Name: At_Far-red-induction_P Parameter: Organism Value: A. thaliana
  misc_feature: MA Experiment 20001451 PARAMETER Experiment Name: At_Far-red-induction_P Parameter: Plant Line Value: Columbia
  misc_feature: MA Experiment 20001451 PARAMETER Experiment Name: At_Far-red-induction_P Parameter: Timepoint (hr) Value: 24
  misc_feature: MA Experiment 20001451 PARAMETER Experiment Name: At_Far-red-induction_P Parameter: Tissue Value: Whole Plant
  misc_feature: MA Experiment ID: 20001555 Result: Down-regulated in Transcription
  misc_feature: MA Experiment 20001555 PARAMETER Experiment Name: At_Drought_Soil_Dry_P Parameter: Age (day) Value: 24
  misc_feature: MA Experiment 20001555 PARAMETER Experiment Name: At_Drought_Soil_Dry_P Parameter: Organism Value: A. thaliana
  misc_feature: MA Experiment 20001555 PARAMETER Experiment Name: At_Drought_Soil_Dry_P Parameter: Plant Line Value: WS
  misc_feature: MA Experiment 20001555 PARAMETER Experiment Name: At_Drought_Soil_Dry_P Parameter: Post Timepoint (hr) Value: None
  misc_feature: MA Experiment 20001555 PARAMETER Experiment Name: At_Drought_Soil_Dry_P Parameter: Post-Treatment Value: None
  misc_feature: MA Experiment 20001555 PARAMETER Experiment Name: At_Drought_Soil_Dry_P Parameter: Timepoint (day) Value: 10
  misc_feature: MA Experiment 20001555 PARAMETER Experiment Name: At_Drought_Soil_Dry_P Parameter: Treatment Value: Drought vs. No Drought
  misc_feature: MA Experiment ID: 20001556 Result: Down-regulated in Transcription
  misc_feature: MA Experiment 20001556 PARAMETER Experiment Name: At_Drought_Soil_Dry_P Parameter: Age (day) Value: 26
  misc_feature: MA Experiment 20001556 PARAMETER Experiment Name: At_Drought_Soil_Dry_P Parameter: Organism Value: A. thaliana
  misc_feature: MA Experiment 20001556 PARAMETER Experiment Name: At_Drought_Soil_Dry_P Parameter: Plant Line Value: WS
  misc_feature: MA Experiment 20001556 PARAMETER Experiment Name: At_Drought_Soil_Dry_P Parameter: Post Timepoint (hr) Value: None
  misc_feature: MA Experiment 20001556 PARAMETER Experiment Name: At_Drought_Soil_Dry_P Parameter: Post-Treatment Value: None
  misc_feature: MA Experiment 20001556 PARAMETER Experiment Name: At_Drought_Soil_Dry_P Parameter: Timepoint (day) Value: 12
  misc_feature: MA Experiment 20001556 PARAMETER Experiment Name: At_Drought_Soil_Dry_P Parameter: Treatment Value: Drought vs. No Drought
  misc_feature: MA Experiment ID: 20001560 Result: Up-regulated in Transcription
  misc_feature: MA Experiment 20001560 PARAMETER Experiment Name: At_Drought_Soil_Dry_P Parameter: Age (day) Value: 28
  misc_feature: MA Experiment 20001560 PARAMETER Experiment Name: At_Drought_Soil_Dry_P Parameter: Organism Value: A. thaliana
  misc_feature: MA Experiment 20001560 PARAMETER Experiment Name: At_Drought_Soil_Dry_P Parameter: Plant Line Value: WS
  misc_feature: MA Experiment 20001560 PARAMETER Experiment Name: At_Drought_Soil_Dry_P Parameter: Post Timepoint (hr) Value: None
  misc_feature: MA Experiment 20001560 PARAMETER Experiment Name: At_Drought_Soil_Dry_P Parameter: Post-Treatment Value: None
  misc_feature: MA Experiment 20001560 PARAMETER Experiment Name: At_Drought_Soil_Dry_P Parameter: Timepoint (day) Value: 14
  misc_feature: MA Experiment 20001560 PARAMETER Experiment Name: At_Drought_Soil_Dry_P Parameter: Treatment Value: Drought vs. No Drought
  misc_feature: MA Experiment ID: 20001773 Result: Up-regulated in Transcription
  misc_feature: MA Experiment 20001773 PARAMETER Experiment Name: At_Far-red-enriched-adult_P Parameter: Age (day) Value: 30
  misc_feature: MA Experiment 20001773 PARAMETER Experiment Name: At_Far-red-enriched-adult_P Parameter: Light Value: Far-red enriched vs. White
  misc_feature: MA Experiment 20001773 PARAMETER Experiment Name: At_Far-red-enriched-adult_P Parameter: Organism Value: A. thaliana
  misc_feature: MA Experiment 20001773 PARAMETER Experiment Name: At_Far-red-enriched-adult_P Parameter: Plant Line Value: Columbia
  misc_feature: MA Experiment 20001773 PARAMETER Experiment Name: At_Far-red-enriched-adult_P Parameter: Timepoint (hr) Value: 48
  misc_feature: MA Experiment 20001773 PARAMETER Experiment Name: At_Far-red-enriched-adult_P Parameter: Tissue Value: Aerial
  misc_feature: MA Experiment ID: 20001906 Result: Down-regulated in Transcription
  misc_feature: MA Experiment 20001906 PARAMETER Experiment Name: At_Drought_Reproduction_P Parameter: Age (day) Value: 35
  misc_feature: MA Experiment 20001906 PARAMETER Experiment Name: At_Drought_Reproduction_P Parameter: Organism Value: A. thaliana
  misc_feature: MA Experiment 20001906 PARAMETER Experiment Name: At_Drought_Reproduction_P Parameter: Plant Line Value: WS
  misc_feature: MA Experiment 20001906 PARAMETER Experiment Name: At_Drought_Reproduction_P Parameter: Timepoint (day) Value: 5
  misc_feature: MA Experiment 20001906 PARAMETER Experiment Name: At_Drought_Reproduction_P Parameter: Tissue Value: Siliques
  misc_feature: MA Experiment 20001906 PARAMETER Experiment Name: At_Drought_Reproduction_P Parameter: Treatment Value: Drought vs. No Drought
  misc_feature: MA Experiment ID: 20001908 Result: Down-regulated in Transcription
  misc_feature: MA Experiment 20001908 PARAMETER Experiment Name: At_Drought_Reproduction_P Parameter: Age (day) Value: 40
  misc_feature: MA Experiment 20001908 PARAMETER Experiment Name: At_Drought_Reproduction_P Parameter: Organism Value: A. thaliana
  misc_feature: MA Experiment 20001908 PARAMETER Experiment Name: At_Drought_Reproduction_P Parameter: Plant Line Value: WS
  misc_feature: MA Experiment 20001908 PARAMETER Experiment Name: At_Drought_Reproduction_P Parameter: Timepoint (day) Value: 10
  misc_feature: MA Experiment 20001908 PARAMETER Experiment Name: At_Drought_Reproduction_P Parameter: Tissue Value: Siliques
  misc_feature: MA Experiment 20001908 PARAMETER Experiment Name: At_Drought_Reproduction_P Parameter: Treatment Value: Drought vs. No Drought
aattttctcccccacaccaaaagataaacctctctctctctatctatcttatgtcaaaagacagatttattaacaaacacaaatcataaatctttttcttcttccgagaaagaatgtctaaatcatcgtataatcacatcttcatcttgatcttgtgtttatgtttgagatcatcatcagccttcacgaatctcaacaccttaagctttgaagaatcactttctcctctctttggagatgccaatctcgtccgttcacctgatgatctctccgttcgtcttctcctcgatcgctataccggttctggtttcatatcatcgaatatgtatcaacatggattttacagctccatgattaagcttcccgctgattatactgccggcgtcgtcgtcgccttttatacatcaaacggagacgtgttcgagaaaacacacgacgagttagacatagagtttctagggaacataaaaggaaagccgtggaggtttcagacaaatctatacggaaatggaagtacacatagaggtcgtgaagagagatatcgtctctggtttgatccttctaaggagtttcatcgttatagcattctctggactcctcacaagatcatattttgggtagatgatgtgccaataagagaagtgatcagaaacgatgcaatgggagcagattatccggcaaagccaatggctctttacgccaccatttgggacgcttctgattgggctacttccggcggcaaatacaaagctaattacaaatttgcccctttcgtagctgaattcaaatctttctctctagacggttgctccgttgatcctattcaagaagtccccatggattgttccgactcagtcgatttccttgagtctcaagattactcttccattaattcccatcaacgcgccgccatgcgaagatttcgacaacgtttcatgtactattcttactgttacgatacacttaggtatcctgagcctctaccggaatgtgtgattgttccggctgagaaagataggtttaaggaaacgggaaggttgaagtttggtggtacggaggcgcgtgaacggcggagaaatcgccggcagcaacgtcggcctgagattgagattgagagtgatcctgacgacagaaaacttttataagatttgtttgtgccattctttttacttaaaattcgtttgtgagtataataaaataaagagtaaagatttgaaaaagaaagaaagaaatagaggataaatttgataggcctttgggctttcatgaattgtgaatgatttaagctc

SEQ ID NO: 35000 - protein, 343 aa, Arabidopsis thaliana
  peptide (1)..(343): Ceres Seq. ID no. 12334275
  misc_feature (32)..(217): Pfam Name: Glycosyl hydrolases family 16 Pfam Description: Glycosyl hydrolases family 16
  misc_feature (18)..(327): Homolog of NCBI NO: 15226364 NR Description: xyloglucan endotransglycosylase (EXGT-A3)
  misc_feature (18)..(327): Homolog of NCBI NO: 5533313 NR Description: endoxyloglucan transferase [Arabidopsis thaliana]
  misc_feature (10)..(328): Homolog of NCBI NO: 15223878 NR Description: xyloglucan endotransglycosylase (XTR2)
  misc_feature (6)..(327): Homolog of NCBI NO: 13560781 NR Description: endoxyloglucan transferase [Daucus carota]
  misc_feature (23)..(327): Homolog of NCBI NO: 32470643 NR Description: putative xyloglucan endotransglycosylase-related
  misc_feature (9)..(336): Homolog of NCBI NO: 15234083 NR Description: xyloglucan endotransglycosylase, putative
  misc_feature (9)..(336): Homolog of NCBI NO: 7447409 NR Description: xyloglucan endo-1,4-beta-D-glucanase (EC 3.2.1.-)
  misc_feature (3)..(343): Homolog of NCBI NO: 2129774 NR Description: xyloglucan endo-1,4-beta-D-glucanase (EC 3.2.1.-)
  misc_feature (1)..(343): Homolog of NCBI NO: 21618261 NR Description: endoxyloglucan transferase, putative [Arabidopsis
  misc_feature (1)..(343): Homolog of NCBI NO: 15222593 NR Description: xyloglucan endotransglycosylase (XTR4), putative
MSKSSYNHIFILILCLCLRSSSAFTNLNTLSFEESLSPLFGDANLVRSPDDLSVRLLLDRYTGSGFISSNMYQHGFYSSMIKLPADYTAGVVVAFYTSNGDVFEKTHDELDIEFLGNIKGKPWRFQTNLYGNGSTHRGREERYRLWFDPSKEFHRYSILWTPHKIIFWVDDVPIREVIRNDAMGADYPAKPMALYATIWDASDWATSGGKYKANYKFAPFVAEFKSFSLDGCSVDPIQEVPMDCSDSVDFLESQDYSSINSHQRAAMRRFRQRFMYYSYCYDTLRYPEPLPECVIVPAEKDRFKETGRLKFGGTEARERRRNRRQQRRPEIEIESDPDDRKLL

SEQ ID NO: 35001 - protein, 273 aa, Arabidopsis thaliana
  peptide (1)..(273): Ceres Seq. ID no. 12334276
  misc_feature (1)..(147): Pfam Name: Glycosyl hydrolases family 16 Pfam Description: Glycosyl hydrolases family 16
  misc_feature (1)..(257): Homolog of NCBI NO: 15226364 NR Description: xyloglucan endotransglycosylase (EXGT-A3)
  misc_feature (1)..(257): Homolog of NCBI NO: 5533313 NR Description: endoxyloglucan transferase [Arabidopsis thaliana]
  misc_feature (1)..(258): Homolog of NCBI NO: 15223878 NR Description: xyloglucan endotransglycosylase (XTR2)
  misc_feature (1)..(257): Homolog of NCBI NO: 13560781 NR Description: endoxyloglucan transferase [Daucus carota]
  misc_feature (1)..(257): Homolog of NCBI NO: 32470643 NR Description: putative xyloglucan endotransglycosylase-related
  misc_feature (1)..(266): Homolog of NCBI NO: 15234083 NR Description: xyloglucan endotransglycosylase, putative
  misc_feature (1)..(266): Homolog of NCBI NO: 7447409 NR Description: xyloglucan endo-1,4-beta-D-glucanase (EC 3.2.1.-)
  misc_feature (1)..(273): Homolog of NCBI NO: 2129774 NR Description: xyloglucan endo-1,4-beta-D-glucanase (EC 3.2.1.-)
  misc_feature (1)..(273): Homolog of NCBI NO: 21618261 NR Description: endoxyloglucan transferase, putative [Arabidopsis
  misc_feature (1)..(273): Homolog of NCBI NO: 15222593 NR Description: xyloglucan endotransglycosylase (XTR4), putative
MYQHGFYSSMIKLPADYTAGVVVAFYTSNGDVFEKTHDELDIEFLGNIKGKPWRFQTNLYGNGSTHRGREERYRLWFDPSKEFHRYSILWTPHKIIFWVDDVPIREVIRNDAMGADYPAKPMALYATIWDASDWATSGGKYKANYKFAPFVAEFKSFSLDGCSVDPIQEVPMDCSDSVDFLESQDYSSINSHQRAAMRRFRQRFMYYSYCYDTLRYPEPLPECVIVPAEKDRFKETGRLKFGGTEARERRRNRRQQRRPEIEIESDPDDRKLL

SEQ ID NO: 35002 - protein, 264 aa, Arabidopsis thaliana
  peptide (1)..(264): Ceres Seq. ID no. 12334277
  misc_feature (1)..(138): Pfam Name: Glycosyl hydrolases family 16 Pfam Description: Glycosyl hydrolases family 16
  misc_feature (1)..(248): Homolog of NCBI NO: 21553969 NR Description: putative xyloglucan-specific glucanase
  misc_feature (1)..(248): Homolog of NCBI NO: 5533313 NR Description: endoxyloglucan transferase [Arabidopsis thaliana]
  misc_feature (1)..(249): Homolog of NCBI NO: 15223878 NR Description: xyloglucan endotransglycosylase (XTR2)
  misc_feature (1)..(248): Homolog of NCBI NO: 13560781 NR Description: endoxyloglucan transferase [Daucus carota]
  misc_feature (1)..(248): Homolog of NCBI NO: 32470643 NR Description: putative xyloglucan endotransglycosylase-related
  misc_feature (1)..(257): Homolog of NCBI NO: 15234083 NR Description: xyloglucan endotransglycosylase, putative
  misc_feature (1)..(257): Homolog of NCBI NO: 7447409 NR Description: xyloglucan endo-1,4-beta-D-glucanase (EC 3.2.1.-)
  misc_feature (1)..(264): Homolog of NCBI NO: 2129774 NR Description: xyloglucan endo-1,4-beta-D-glucanase (EC 3.2.1.-)
  misc_feature (1)..(264): Homolog of NCBI NO: 21618261 NR Description: endoxyloglucan transferase, putative [Arabidopsis
  misc_feature (1)..(264): Homolog of NCBI NO: 15222593 NR Description: xyloglucan endotransglycosylase (XTR4), putative
MIKLPADYTAGVVVAFYTSNGDVFEKTHDELDIEFLGNIKGKPWRFQTNLYGNGSTHRGREERYRLWFDPSKEFHRYSILWTPHKIIFWVDDVPIREVIRNDAMGADYPAKPMALYATIWDASDWATSGGKYKANYKFAPFVAEFKSFSLDGCSVDPIQEVPMDCSDSVDFLESQDYSSINSHQRAAMRRFRQRFMYYSYCYDTLRYPEPLPECVIVPAEKDRFKETGRLKFGGTEARERRRNRRQQRRPEIEIESDPDDRKLL

SEQ ID NO: 35003 - DNA, 1376 bp, Arabidopsis thaliana
  misc_feature (1)..(1376): Ceres Seq. ID no. 12371724
  misc_feature: MA Experiment ID: 108576 Result: Down-regulated in Transcription
  misc_feature: MA Experiment 108576 PARAMETER Experiment Name: At_42deg_Heat_cDNA_P Parameter: Temperature (deg C) Value: 42 vs. 22
  misc_feature: MA Experiment 108576 PARAMETER Experiment Name: At_42deg_Heat_cDNA_P Parameter: Timepoint (hr) Value: 1
  misc_feature: MA Experiment 108576 PARAMETER Experiment Name: At_42deg_Heat_cDNA_P Parameter: Tissue Value: Aerial
  misc_feature: MA Experiment ID: 108595 Result: Down-regulated in Transcription
  misc_feature: MA Experiment 108595 PARAMETER Experiment Name: At_Ler-pi_Ovule_cDNA_P Parameter: Plant Line Value: null
  misc_feature: MA Experiment ID: 20000069 Result: Up-regulated in Transcription
  misc_feature: MA Experiment 20000069 PARAMETER Experiment Name: At_100uM_ABA_Mutants_cDNA_P Parameter: Plant Line Value: CS23
  misc_feature: MA Experiment 20000069 PARAMETER Experiment Name: At_100uM_ABA_Mutants_cDNA_P Parameter: Timepoint (hr) Value: 6
  misc_feature: MA Experiment 20000069 PARAMETER Experiment Name: At_100uM_ABA_Mutants_cDNA_P Parameter: Tissue Value: Aerial
  misc_feature: MA Experiment 20000069 PARAMETER Experiment Name: At_100uM_ABA_Mutants_cDNA_P Parameter: Treatment Value: 100uM ABA vs. No Treatment
  misc_feature: MA Experiment ID: 20000089 Result: Up-regulated in Transcription
  misc_feature: MA Experiment ID: 20000113 Result: Down-regulated in Transcription
  misc_feature: MA Experiment 20000113 PARAMETER Experiment Name: At_42deg_Heat_cDNA_P Parameter: Temperature (deg C) Value: 42 vs. 22
  misc_feature: MA Experiment 20000113 PARAMETER Experiment Name: At_42deg_Heat_cDNA_P Parameter: Timepoint (hr) Value: 8
  misc_feature: MA Experiment 20000113 PARAMETER Experiment Name: At_42deg_Heat_cDNA_P Parameter: Tissue Value: Aerial
  misc_feature: MA Experiment ID: 20000166 Result: Down-regulated in Transcription
  misc_feature: MA Experiment 20000166 PARAMETER Experiment Name: At_100uM_ABA_P Parameter: Age (day) Value: 14
  misc_feature: MA Experiment 20000166 PARAMETER Experiment Name: At_100uM_ABA_P Parameter: Organism Value: A. thaliana
  misc_feature: MA Experiment 20000166 PARAMETER Experiment Name: At_100uM_ABA_P Parameter: Plant Line Value: WS
  misc_feature: MA Experiment 20000166 PARAMETER Experiment Name: At_100uM_ABA_P Parameter: Timepoint (hr) Value: 1
  misc_feature: MA Experiment 20000166 PARAMETER Experiment Name: At_100uM_ABA_P Parameter: Tissue Value: Aerial
  misc_feature: MA Experiment 20000166 PARAMETER Experiment Name: At_100uM_ABA_P Parameter: Treatment Value: 100uM ABA vs. No Treatment
  misc_feature: MA Experiment ID: 20000173 Result: Down-regulated in Transcription
  misc_feature: MA Experiment 20000173 PARAMETER Experiment Name: At_42deg_Heat_P Parameter: Age (day) Value: 14
  misc_feature: MA Experiment 20000173 PARAMETER Experiment Name: At_42deg_Heat_P Parameter: Organism Value: A. thaliana
  misc_feature: MA Experiment 20000173 PARAMETER Experiment Name: At_42deg_Heat_P Parameter: Plant Line Value: WS
  misc_feature: MA Experiment 20000173 PARAMETER Experiment Name: At_42deg_Heat_P Parameter: Temperature (deg C) Value: 42 vs. 22
  misc_feature: MA Experiment 20000173 PARAMETER Experiment Name: At_42deg_Heat_P Parameter: Timepoint (hr) Value: 6
  misc_feature: MA Experiment 20000173 PARAMETER Experiment Name: At_42deg_Heat_P Parameter: Tissue Value: Aerial
  misc_feature: MA Experiment ID: 20000184 Result: Down-regulated in Transcription
  misc_feature: MA Experiment 20000184 PARAMETER Experiment Name: At_Shoots__P Parameter: Age (day) Value: 7
  misc_feature: MA Experiment 20000184 PARAMETER Experiment Name: At_Shoots__P Parameter: Tissue Value: Shoots vs. Whole Plant
  misc_feature: MA Experiment ID: 20000234 Result: Down-regulated in Transcription
  misc_feature: MA Experiment 20000234 PARAMETER Experiment Name: At_Siliques_P Parameter: Age (day) Value: 21
  misc_feature: MA Experiment 20000234 PARAMETER Experiment Name: At_Siliques_P Parameter: Organism Value: A. thaliana
  misc_feature: MA Experiment 20000234 PARAMETER Experiment Name: At_Siliques_P Parameter: Plant Line Value: WS
  misc_feature: MA Experiment 20000234 PARAMETER Experiment Name: At_Siliques_P Parameter: Tissue Value: Less Than 5mm Siliques vs. Whole Plant
  misc_feature: MA Experiment ID: 20001248 Result: Up-regulated in Transcription
  misc_feature: MA Experiment 20001248 PARAMETER Experiment Name: At_Far-red-induction_P Parameter: Age (day) Value: 7
  misc_feature: MA Experiment 20001248 PARAMETER Experiment Name: At_Far-red-induction_P Parameter: Light Value: Far-red vs. White
  misc_feature: MA Experiment 20001248 PARAMETER Experiment Name: At_Far-red-induction_P Parameter: Organism Value: A. thaliana
  misc_feature: MA Experiment 20001248 PARAMETER Experiment Name: At_Far-red-induction_P Parameter: Plant Line Value: Columbia
  misc_feature: MA Experiment 20001248 PARAMETER Experiment Name: At_Far-red-induction_P Parameter: Timepoint (hr) Value: 4
  misc_feature: MA Experiment 20001248 PARAMETER Experiment Name: At_Far-red-induction_P Parameter: Tissue Value: Whole Plant
  misc_feature: MA Experiment ID: 20001555 Result: Down-regulated in Transcription
  misc_feature: MA Experiment 20001555 PARAMETER Experiment Name: At_Drought_Soil_Dry_P Parameter: Age (day) Value: 24
  misc_feature: MA Experiment 20001555 PARAMETER Experiment Name: At_Drought_Soil_Dry_P Parameter: Organism Value: A. thaliana
  misc_feature: MA Experiment 20001555 PARAMETER Experiment Name: At_Drought_Soil_Dry_P Parameter: Plant Line Value: WS
  misc_feature: MA Experiment 20001555 PARAMETER Experiment Name: At_Drought_Soil_Dry_P Parameter: Post Timepoint (hr) Value: None
  misc_feature: MA Experiment 20001555 PARAMETER Experiment Name: At_Drought_Soil_Dry_P Parameter: Post-Treatment Value: None
  misc_feature: MA Experiment 20001555 PARAMETER Experiment Name: At_Drought_Soil_Dry_P Parameter: Timepoint (day) Value: 10
  misc_feature: MA Experiment 20001555 PARAMETER Experiment Name: At_Drought_Soil_Dry_P Parameter: Treatment Value: Drought vs. No Drought
  misc_feature: MA Experiment ID: 20001556 Result: Down-regulated in Transcription
  misc_feature: MA Experiment 20001556 PARAMETER Experiment Name: At_Drought_Soil_Dry_P Parameter: Age (day) Value: 26
  misc_feature: MA Experiment 20001556 PARAMETER Experiment Name: At_Drought_Soil_Dry_P Parameter: Organism Value: A. thaliana
  misc_feature: MA Experiment 20001556 PARAMETER Experiment Name: At_Drought_Soil_Dry_P Parameter: Plant Line Value: WS
  misc_feature: MA Experiment 20001556 PARAMETER Experiment Name: At_Drought_Soil_Dry_P Parameter: Post Timepoint (hr) Value: None
  misc_feature: MA Experiment 20001556 PARAMETER Experiment Name: At_Drought_Soil_Dry_P Parameter: Post-Treatment Value: None
  misc_feature: MA Experiment 20001556 PARAMETER Experiment Name: At_Drought_Soil_Dry_P Parameter: Timepoint (day) Value: 12
  misc_feature: MA Experiment 20001556 PARAMETER Experiment Name: At_Drought_Soil_Dry_P Parameter: Treatment Value: Drought vs. No Drought
  misc_feature: MA Experiment ID: 20001557 Result: Down-regulated in Transcription
  misc_feature: MA Experiment 20001557 PARAMETER Experiment Name: At_Drought_Soil_Dry_P Parameter: Age (day) Value: 27
  misc_feature: MA Experiment 20001557 PARAMETER Experiment Name: At_Drought_Soil_Dry_P Parameter: Organism Value: A. thaliana
  misc_feature: MA Experiment 20001557 PARAMETER Experiment Name: At_Drought_Soil_Dry_P Parameter: Plant Line Value: WS
  misc_feature: MA Experiment 20001557 PARAMETER Experiment Name: At_Drought_Soil_Dry_P Parameter: Post Timepoint (hr) Value: 3
  misc_feature: MA Experiment 20001557 PARAMETER Experiment Name: At_Drought_Soil_Dry_P Parameter: Post-Treatment Value: Re-Water vs. No Drought
  misc_feature: MA Experiment 20001557 PARAMETER Experiment Name: At_Drought_Soil_Dry_P Parameter: Timepoint (day) Value: 13
  misc_feature: MA Experiment 20001557 PARAMETER Experiment Name: At_Drought_Soil_Dry_P Parameter: Treatment Value: Drought vs. No Drought
  misc_feature: MA Experiment ID: 20001560 Result: Down-regulated in Transcription
  misc_feature: MA Experiment 20001560 PARAMETER Experiment Name: At_Drought_Soil_Dry_P Parameter: Age (day) Value: 28
  misc_feature: MA Experiment 20001560 PARAMETER Experiment Name: At_Drought_Soil_Dry_P Parameter: Organism Value: A. thaliana
  misc_feature: MA Experiment 20001560 PARAMETER Experiment Name: At_Drought_Soil_Dry_P Parameter: Plant Line Value: WS
  misc_feature: MA Experiment 20001560 PARAMETER Experiment Name: At_Drought_Soil_Dry_P Parameter: Post Timepoint (hr) Value: None
  misc_feature: MA Experiment 20001560 PARAMETER Experiment Name: At_Drought_Soil_Dry_P Parameter: Post-Treatment Value: None
  misc_feature: MA Experiment 20001560 PARAMETER Experiment Name: At_Drought_Soil_Dry_P Parameter: Timepoint (day) Value: 14
  misc_feature: MA Experiment 20001560 PARAMETER Experiment Name: At_Drought_Soil_Dry_P Parameter: Treatment Value: Drought vs. No Drought
  misc_feature: MA Experiment ID: 20001904 Result: Down-regulated in Transcription
  misc_feature: MA Experiment 20001904 PARAMETER Experiment Name: At_Drought_Reproduction_P Parameter: Age (day) Value: 37
  misc_feature: MA Experiment 20001904 PARAMETER Experiment Name: At_Drought_Reproduction_P Parameter: Organism Value: A. thaliana
  misc_feature: MA Experiment 20001904 PARAMETER Experiment Name: At_Drought_Reproduction_P Parameter: Plant Line Value: WS
  misc_feature: MA Experiment 20001904 PARAMETER Experiment Name: At_Drought_Reproduction_P Parameter: Timepoint (day) Value: 7
  misc_feature: MA Experiment 20001904 PARAMETER Experiment Name: At_Drought_Reproduction_P Parameter: Tissue Value: Rosettes
  misc_feature: MA Experiment 20001904 PARAMETER Experiment Name: At_Drought_Reproduction_P Parameter: Treatment Value: Drought vs. No Drought
  misc_feature: MA Experiment ID: 20001905 Result: Down-regulated in Transcription
  misc_feature: MA Experiment 20001905 PARAMETER Experiment Name: At_Drought_Reproduction_P Parameter: Age (day) Value: 40
  misc_feature: MA Experiment 20001905 PARAMETER Experiment Name: At_Drought_Reproduction_P Parameter: Organism Value: A. thaliana
  misc_feature: MA Experiment 20001905 PARAMETER Experiment Name: At_Drought_Reproduction_P Parameter: Plant Line Value: WS
  misc_feature: MA Experiment 20001905 PARAMETER Experiment Name: At_Drought_Reproduction_P Parameter: Timepoint (day) Value: 10
  misc_feature: MA Experiment 20001905 PARAMETER Experiment Name: At_Drought_Reproduction_P Parameter: Tissue Value: Rosettes
  misc_feature: MA Experiment 20001905 PARAMETER Experiment Name: At_Drought_Reproduction_P Parameter: Treatment Value: Drought vs. No Drought
  misc_feature: MA Experiment ID: 20001906 Result: Down-regulated in Transcription
  misc_feature: MA Experiment 20001906 PARAMETER Experiment Name: At_Drought_Reproduction_P Parameter: Age (day) Value: 35
  misc_feature: MA Experiment 20001906 PARAMETER Experiment Name: At_Drought_Reproduction_P Parameter: Organism Value: A. thaliana
  misc_feature: MA Experiment 20001906 PARAMETER Experiment Name: At_Drought_Reproduction_P Parameter: Plant Line Value: WS
  misc_feature: MA Experiment 20001906 PARAMETER Experiment Name: At_Drought_Reproduction_P Parameter: Timepoint (day) Value: 5
  misc_feature: MA Experiment 20001906 PARAMETER Experiment Name: At_Drought_Reproduction_P Parameter: Tissue Value: Siliques
  misc_feature: MA Experiment 20001906 PARAMETER Experiment Name: At_Drought_Reproduction_P Parameter: Treatment Value: Drought vs. No Drought
  misc_feature: MA Experiment ID: 20001907 Result: Down-regulated in Transcription
  misc_feature: MA Experiment 20001907 PARAMETER Experiment Name: At_Drought_Reproduction_P Parameter: Age (day) Value: 37
  misc_feature: MA Experiment 20001907 PARAMETER Experiment Name: At_Drought_Reproduction_P Parameter: Organism Value: A. thaliana
  misc_feature: MA Experiment 20001907 PARAMETER Experiment Name: At_Drought_Reproduction_P Parameter: Plant Line Value: WS
  misc_feature: MA Experiment 20001907 PARAMETER Experiment Name: At_Drought_Reproduction_P Parameter: Timepoint (day) Value: 7
  misc_feature: MA Experiment 20001907 PARAMETER Experiment Name: At_Drought_Reproduction_P Parameter: Tissue Value: Siliques
  misc_feature: MA Experiment 20001907 PARAMETER Experiment Name: At_Drought_Reproduction_P Parameter: Treatment Value: Drought vs. No Drought
  misc_feature: MA Experiment ID: 20001911 Result: Down-regulated in Transcription
  misc_feature: MA Experiment 20001911 PARAMETER Experiment Name: At_Drought_Reproduction_P Parameter: Age (day) Value: 40
  misc_feature: MA Experiment 20001911 PARAMETER Experiment Name: At_Drought_Reproduction_P Parameter: Organism Value: A. thaliana
  misc_feature: MA Experiment 20001911 PARAMETER Experiment Name: At_Drought_Reproduction_P Parameter: Plant Line Value: WS
  misc_feature: MA Experiment 20001911 PARAMETER Experiment Name: At_Drought_Reproduction_P Parameter: Timepoint (day) Value: 10
  misc_feature: MA Experiment 20001911 PARAMETER Experiment Name: At_Drought_Reproduction_P Parameter: Tissue Value: Flowers
  misc_feature: MA Experiment 20001911 PARAMETER Experiment Name: At_Drought_Reproduction_P Parameter: Treatment Value: Drought vs. No Drought
aatcttttatttttcttttagaaaccaaacttttcagatttctctctctccatttggcgatagaagaagtcatgtaccaatcatcatcctccacgtcatcatcatcgcagagatcatcgcttcccggcggcggaggactgatccgttacggctcagctccgggatcgtttctaaactctgtggttgacgaagtcatcggaggaggctcatcaaacgctcgtgacttcaccggctatcaaccgtcgtcggataacttcatcggtaactttttcaccggagctgctgactcatcctcgctgagatccgattcgacgacttgtggagtcaacaactcatccgacggacagaaacagctaggcaataacaataataataatagtaataaagatatcttcctcgacagatcctacggtggattcaacgagatctcgcaacaacacaagagcaacgacatcggaggaggaaacagctcaggatcttactctctcgctagacaacgtagctctcccgccgatttcttcacctacctcgcctcagataaaaacaatttctcgttgaaccaaccaaccagtgattatagtccgcaaggagggtctaatgggggacgaggacattccagattgaagtctcagctaagcttcacgaatcacgactctctggctcggatcaacgaggtcaatgagaccccagtccacgacggttcaggccattcgttttctgcggctagctttggtgcagccactactgattcttgggatgacggttccggttcgatagggtttaccgtgactaggcccagtaaacgatccaaggacatggactctggtctcttttcgcagtatagtcttccttcagacacttcaatgaactacatggataacttcatgcagcttccagaagattctgtaccctgcaaaatccgggccaaacgcggctgcgccacccatcctagaagcatcgctgagcgggagaggagaacgagaataagtgggaagctaaagaagctacaagatcttgtccccaacatggataagcaaacaagctattcagacatgctggatttagctgtacaacacatcaaaggccttcagcatcaacttcagaatttgaaaaaagatcaagagaattgcacgtgtgggtgcagtgagaaaccaagctagctcaaacccaaaggtagggtcatcctaattttatttgcattgttccgattttatcatatgagagaattagagaagatgtaaataaaatagattatattaaatgtctaatcctcttataattaagctcctcattcgttatcattataagatagaacagtgacaattgtccattatgtttttgtttcaagtttatgttttgagtgtcgcctattttgt

SEQ ID NO: 35004 - protein, 385 aa, Arabidopsis thaliana
  peptide (1)..(385): Ceres Seq. ID no. 12371725
  misc_feature (315)..(363): Pfam Name: Helix-loop-helix DNA-binding domain Pfam Description: Helix-loop-helix DNA-binding domain
  misc_feature (152)..(378): Homolog of NCBI NO: 15233768 NR Description: putative protein; protein id: At4g09180.1
  misc_feature (275)..(383): Homolog of NCBI NO: 19401700 NR Description: transcription factor RAU1 [Oryza sativa]
  misc_feature (107)..(385): Homolog of NCBI NO: 15227914 NR Description: bHLH protein; protein id: At2g42280.1
  misc_feature (152)..(383): Homolog of NCBI NO: 15219606 NR Description: bHLH protein
  misc_feature (223)..(378): Homolog of NCBI NO: 34907702 NR Description: P0035F12.11 [Oryza sativa (japonica
  misc_feature (177)..(382): Homolog of NCBI NO: 38345229 NR Description: OSJNBa0084K20.3 [Oryza sativa (japonica
  misc_feature (149)..(367): Homolog of NCBI NO: 15224227 NR Description: bHLH protein; protein id: At2g43140.1
  misc_feature (24)..(344): Homolog of NCBI NO: 25406865 NR Description: hypothetical protein [imported] - Arabidopsis
  misc_feature (24)..(385): Homolog of NCBI NO: 21554238 NR Description: Contains similarity to bHLH transcription factor
  misc_feature (24)..(385): Homolog of NCBI NO: 18390573 NR Description: bHLH protein; protein id: At1g05805.1, supported
SFIFLLETKLFRFLSLHLAIEEVMYQSSSSTSSSSQRSSLPGGGGLIRYGSAPGSFLNSVVDEVIGGGSSNARDFTGYQPSSDNFIGNFFTGAADSSSLRSDSTTCGVNNSSDGQKQLGNNNNNNSNKDIFLDRSYGGFNEISQQHKSNDIGGGNSSGSYSLARQRSSPADFFTYLASDKNNFSLNQPTSDYSPQGGSNGGRGHSRLKSQLSFTNHDSLARINEVNETPVHDGSGHSFSAASFGAATTDSWDDGSGSIGFTVTRPSKRSKDMDSGLFSQYSLPSDTSMNYMDNFMQLPEDSVPCKIRAKRGCATHPRSIAERERRTRISGKLKKLQDLVPNMDKQTSYSDMLDLAVQHIKGLQHQLQNLKKDQENCTCGCSEKPS

SEQ ID NO: 35005 - protein, 362 aa, Arabidopsis thaliana
  peptide (1)..(362): Ceres Seq. ID no. 12371726
  misc_feature (292)..(340): Pfam Name: Helix-loop-helix DNA-binding domain Pfam Description: Helix-loop-helix DNA-binding domain
  misc_feature (129)..(355): Homolog of NCBI NO: 15233768 NR Description: putative protein; protein id: At4g09180.1
  misc_feature (252)..(360): Homolog of NCBI NO: 19401700 NR Description: transcription factor RAU1 [Oryza sativa]
  misc_feature (84)..(362): Homolog of NCBI NO: 15227914 NR Description: bHLH protein; protein id: At2g42280.1
  misc_feature (129)..(360): Homolog of NCBI NO: 15219606 NR Description: bHLH protein
  misc_feature (200)..(355): Homolog of NCBI NO: 34907702 NR Description: P0035F12.11 [Oryza sativa (japonica
  misc_feature (154)..(359): Homolog of NCBI NO: 38345229 NR Description: OSJNBa0084K20.3 [Oryza sativa (japonica
  misc_feature (126)..(344): Homolog of NCBI NO: 15224227 NR Description: bHLH protein; protein id: At2g43140.1
  misc_feature (1)..(321): Homolog of NCBI NO: 25406865 NR Description: hypothetical protein [imported] - Arabidopsis
  misc_feature (1)..(362): Homolog of NCBI NO: 21554238 NR Description: Contains similarity to bHLH transcription factor
  misc_feature (1)..(362): Homolog of NCBI NO: 18390573 NR Description: bHLH protein; protein id: At1g05805.1, supported
MYQSSSSTSSSSQRSSLPGGGGLIRYGSAPGSFLNSVVDEVIGGGSSNARDFTGYQPSSDNFIGNFFTGAADSSSLRSDSTTCGVNNSSDGQKQLGNNNNNNSNKDIFLDRSYGGFNEISQQHKSNDIGGGNSSGSYSLARQRSSPADFFTYLASDKNNFSLNQPTSDYSPQGGSNGGRGHSRLKSQLSFTNHDSLARINEVNETPVHDGSGHSFSAASFGAATTDSWDDGSGSIGFTVTRPSKRSKDMDSGLFSQYSLPSDTSMNYMDNFMQLPEDSVPCKIRAKRGCATHPRSIAERERRTRISGKLKKLQDLVPNMDKQTSYSDMLDLAVQHIKGLQHQLQNLKKDQENCTCGCSEKPS

SEQ ID NO: 35006 - DNA, 935 bp, Arabidopsis thaliana
  misc_feature (1)..(935): Ceres Seq. ID no. 12336020
  misc_feature: MA Experiment ID: 108434 Result: Down-regulated in Transcription
  misc_feature: MA Experiment 108434 PARAMETER Experiment Name: At_Root_Tips_cDNA_P Parameter: Tissue Value: Root Tips
  misc_feature: MA Experiment ID: 108577 Result: Down-regulated in Transcription
  misc_feature: MA Experiment 108577 PARAMETER Experiment Name: At_42deg_Heat_cDNA_P Parameter: Temperature (deg C) Value: 42 vs. 22
  misc_feature: MA Experiment 108577 PARAMETER Experiment Name: At_42deg_Heat_cDNA_P Parameter: Timepoint (hr) Value: 6
  misc_feature: MA Experiment 108577 PARAMETER Experiment Name: At_42deg_Heat_cDNA_P Parameter: Tissue Value: Aerial
  misc_feature: MA Experiment ID: 108579 Result: Down-regulated in Transcription
  misc_feature: MA Experiment 108579 PARAMETER Experiment Name: At_4deg_Cold_cDNA_P Parameter: Temperature (deg C) Value: 4 vs. 22
  misc_feature: MA Experiment 108579 PARAMETER Experiment Name: At_4deg_Cold_cDNA_P Parameter: Timepoint (hr) Value: 6
  misc_feature: MA Experiment 108579 PARAMETER Experiment Name: At_4deg_Cold_cDNA_P Parameter: Tissue Value: Aerial
  misc_feature: MA Experiment ID: 108605 Result: Up-regulated in Transcription
  misc_feature: MA Experiment 108605 PARAMETER Experiment Name: At_100uM_ABA_cDNA_P Parameter: Timepoint (hr) Value: 6
  misc_feature: MA Experiment 108605 PARAMETER Experiment Name: At_100uM_ABA_cDNA_P Parameter: Tissue Value: Aerial
  misc_feature: MA Experiment 108605 PARAMETER Experiment Name: At_100uM_ABA_cDNA_P Parameter: Treatment Value: 100uM ABA vs. No Treatment
  misc_feature: MA Experiment ID: 108607 Result: Up-regulated in Transcription
  misc_feature: MA Experiment 108607 PARAMETER Experiment Name: At_100uM_ABA_cDNA_P Parameter: Timepoint (hr) Value: 4
  misc_feature: MA Experiment 108607 PARAMETER Experiment Name: At_100uM_ABA_cDNA_P Parameter: Tissue Value: Aerial
  misc_feature: MA Experiment 108607 PARAMETER Experiment Name: At_100uM_ABA_cDNA_P Parameter: Treatment Value: 100uM ABA vs. No Treatment
  misc_feature: MA Experiment ID: 108609 Result: Up-regulated in Transcription
  misc_feature: MA Experiment 108609 PARAMETER Experiment Name: At_100uM_ABA_cDNA_P Parameter: Timepoint (hr) Value: 24
  misc_feature: MA Experiment 108609 PARAMETER Experiment Name: At_100uM_ABA_cDNA_P Parameter: Tissue Value: Aerial
  misc_feature: MA Experiment 108609 PARAMETER Experiment Name: At_100uM_ABA_cDNA_P Parameter: Treatment Value: 100uM ABA vs. No Treatment
  misc_feature: MA Experiment ID: 20000069 Result: Up-regulated in Transcription
  misc_feature: MA Experiment 20000069 PARAMETER Experiment Name: At_100uM_ABA_Mutants_cDNA_P Parameter: Plant Line Value: CS23
  misc_feature: MA Experiment 20000069 PARAMETER Experiment Name: At_100uM_ABA_Mutants_cDNA_P Parameter: Timepoint (hr) Value: 6
  misc_feature: MA Experiment 20000069 PARAMETER Experiment Name: At_100uM_ABA_Mutants_cDNA_P Parameter: Tissue Value: Aerial
  misc_feature: MA Experiment 20000069 PARAMETER Experiment Name: At_100uM_ABA_Mutants_cDNA_P Parameter: Treatment Value: 100uM ABA vs. No Treatment
  misc_feature: MA Experiment ID: 20000070 Result: Up-regulated in Transcription
  misc_feature: MA Experiment 20000070 PARAMETER Experiment Name: At_100uM_ABA_Mutants_cDNA_P Parameter: Plant Line Value: CS24
  misc_feature: MA Experiment 20000070 PARAMETER Experiment Name: At_100uM_ABA_Mutants_cDNA_P Parameter: Timepoint (hr) Value: 6
  misc_feature: MA Experiment 20000070 PARAMETER Experiment Name: At_100uM_ABA_Mutants_cDNA_P Parameter: Tissue Value: Aerial
  misc_feature: MA Experiment 20000070 PARAMETER Experiment Name: At_100uM_ABA_Mutants_cDNA_P Parameter: Treatment Value: 100uM ABA vs. No Treatment
  misc_feature: MA Experiment ID: 20000071 Result: Up-regulated in Transcription
  misc_feature: MA Experiment 20000071 PARAMETER Experiment Name: At_100uM_ABA_Mutants_cDNA_P Parameter: Plant Line Value: CS8104
  misc_feature: MA Experiment 20000071 PARAMETER Experiment Name: At_100uM_ABA_Mutants_cDNA_P Parameter: Timepoint (hr) Value: 6
  misc_feature: MA Experiment 20000071 PARAMETER Experiment Name: At_100uM_ABA_Mutants_cDNA_P Parameter: Tissue Value: Aerial
  misc_feature: MA Experiment 20000071 PARAMETER Experiment Name: At_100uM_ABA_Mutants_cDNA_P Parameter: Treatment Value: 100uM ABA vs. No Treatment
  misc_feature: MA Experiment ID: 20000087 Result: Up-regulated in Transcription
  misc_feature: MA Experiment 20000087 PARAMETER Experiment Name: At_100uM_ABA_Mutants_cDNA_P Parameter: Plant Line Value: WS
  misc_feature: MA Experiment 20000087 PARAMETER Experiment Name: At_100uM_ABA_Mutants_cDNA_P Parameter: Timepoint (hr) Value: 6
  misc_feature: MA Experiment 20000087 PARAMETER Experiment Name: At_100uM_ABA_Mutants_cDNA_P Parameter: Tissue Value: Aerial
  misc_feature: MA Experiment 20000087 PARAMETER Experiment Name: At_100uM_ABA_Mutants_cDNA_P Parameter: Treatment Value: 100uM ABA vs. No Treatment
  misc_feature: MA Experiment ID: 20000111 Result: Down-regulated in Transcription
  misc_feature: MA Experiment 20000111 PARAMETER Experiment Name: At_42deg_Heat_cDNA_P Parameter: Temperature (deg C) Value: 42 vs. 22
  misc_feature: MA Experiment 20000111 PARAMETER Experiment Name: At_42deg_Heat_cDNA_P Parameter: Timepoint (hr) Value: 6
  misc_feature: MA Experiment 20000111 PARAMETER Experiment Name: At_42deg_Heat_cDNA_P Parameter: Tissue Value: Aerial
  misc_feature: MA Experiment ID: 20000112 Result: Down-regulated in Transcription
  misc_feature: MA Experiment 20000112 PARAMETER Experiment Name: At_42deg_Heat_cDNA_P Parameter: Temperature (deg C) Value: 42 vs. 22
  misc_feature: MA Experiment 20000112 PARAMETER Experiment Name: At_42deg_Heat_cDNA_P Parameter: Timepoint (hr) Value: 2
  misc_feature: MA Experiment 20000112 PARAMETER Experiment Name: At_42deg_Heat_cDNA_P Parameter: Tissue Value: Aerial
  misc_feature: MA Experiment ID: 20000113 Result: Down-regulated in Transcription
  misc_feature: MA Experiment 20000113 PARAMETER Experiment Name: At_42deg_Heat_cDNA_P Parameter: Temperature (deg C) Value: 42 vs. 22
  misc_feature: MA Experiment 20000113 PARAMETER Experiment Name: At_42deg_Heat_cDNA_P Parameter: Timepoint (hr) Value: 8
  misc_feature: MA Experiment 20000113 PARAMETER Experiment Name: At_42deg_Heat_cDNA_P Parameter: Tissue Value: Aerial
  misc_feature: MA Experiment ID: 20000117 Result: Up-regulated in Transcription
  misc_feature: MA Experiment 20000117 PARAMETER Experiment Name: At_100uM_ABA_Mutants_cDNA_P Parameter: Plant Line Value: Columbia
  misc_feature: MA Experiment 20000117 PARAMETER Experiment Name: At_100uM_ABA_Mutants_cDNA_P Parameter: Timepoint (hr) Value: 6
  misc_feature: MA Experiment 20000117 PARAMETER Experiment Name: At_100uM_ABA_Mutants_cDNA_P Parameter: Tissue Value: Aerial
  misc_feature: MA Experiment 20000117 PARAMETER Experiment Name: At_100uM_ABA_Mutants_cDNA_P Parameter: Treatment Value: 100uM ABA vs. No Treatment
  misc_feature: MA Experiment ID: 20000169 Result: Up-regulated in Transcription
  misc_feature: MA Experiment 20000169 PARAMETER Experiment Name: At_100uM_ABA_P Parameter: Age (day) Value: 14
  misc_feature: MA Experiment 20000169 PARAMETER Experiment Name: At_100uM_ABA_P Parameter: Organism Value: A. thaliana
  misc_feature: MA Experiment 20000169 PARAMETER Experiment Name: At_100uM_ABA_P Parameter: Plant Line Value: WS
  misc_feature: MA Experiment 20000169 PARAMETER Experiment Name: At_100uM_ABA_P Parameter: Timepoint (hr) Value: 6
  misc_feature: MA Experiment 20000169 PARAMETER Experiment Name: At_100uM_ABA_P Parameter: Tissue Value: Aerial
  misc_feature: MA Experiment 20000169 PARAMETER Experiment Name: At_100uM_ABA_P Parameter: Treatment Value: 100uM ABA vs. No Treatment
  misc_feature: MA Experiment ID: 20000173 Result: Down-regulated in Transcription
  misc_feature: MA Experiment 20000173 PARAMETER Experiment Name: At_42deg_Heat_P Parameter: Age (day) Value: 14
  misc_feature: MA Experiment 20000173 PARAMETER Experiment Name: At_42deg_Heat_P Parameter: Organism Value: A. thaliana
  misc_feature: MA Experiment 20000173 PARAMETER Experiment Name: At_42deg_Heat_P Parameter: Plant Line Value: WS
  misc_feature: MA Experiment 20000173 PARAMETER Experiment Name: At_42deg_Heat_P Parameter: Temperature (deg C) Value: 42 vs. 22
  misc_feature: MA Experiment 20000173 PARAMETER Experiment Name: At_42deg_Heat_P Parameter: Timepoint (hr) Value: 6
  misc_feature: MA Experiment 20000173 PARAMETER Experiment Name: At_42deg_Heat_P Parameter: Tissue Value: Aerial
  misc_feature: MA Experiment ID: 20000179 Result: Up-regulated in Transcription
  misc_feature: MA Experiment 20000179 PARAMETER Experiment Name: At_Germinating_Seeds_P Parameter: Age (hr) Value: 6 vs. 0
  misc_feature: MA Experiment 20000179 PARAMETER Experiment Name: At_Germinating_Seeds_P Parameter: Tissue Value: Germinating Seeds
  misc_feature: MA Experiment ID: 20000180 Result: Up-regulated in Transcription
  misc_feature: MA Experiment 20000180 PARAMETER Experiment Name: At_Germinating_Seeds_P Parameter: Age (hr) Value: 24 vs. 0
  misc_feature: MA Experiment 20000180 PARAMETER Experiment Name: At_Germinating_Seeds_P Parameter: Tissue Value: Germinating Seeds
  misc_feature: MA Experiment ID: 20000184 Result: Down-regulated in Transcription
  misc_feature: MA Experiment 20000184 PARAMETER Experiment Name: At_Shoots__P Parameter: Age (day) Value: 7
  misc_feature: MA Experiment 20000184 PARAMETER Experiment Name: At_Shoots__P Parameter: Tissue Value: Shoots vs. Whole Plant
  misc_feature: MA Experiment ID: 20000185 Result: Up-regulated in Transcription
  misc_feature: MA Experiment 20000185 PARAMETER Experiment Name: At_Roots__P Parameter: Age (day) Value: 7 vs. 21
  misc_feature: MA Experiment 20000185 PARAMETER Experiment Name: At_Roots__P Parameter: Organism Value: A. thaliana
  misc_feature: MA Experiment 20000185 PARAMETER Experiment Name: At_Roots__P Parameter: Tissue Value: Roots vs. Whole Plant
  misc_feature: MA Experiment ID: 20000224 Result: Down-regulated in Transcription
  misc_feature: MA Experiment ID: 20000227 Result: Down-regulated in Transcription
  misc_feature: MA Experiment 20000227 PARAMETER Experiment Name: At_Root-Tips-vs-Tops_P Parameter: Tissue Value: Root Tips vs. Root Tops
  misc_feature: MA Experiment ID: 20000453 Result: Up-regulated in Transcription
  misc_feature: MA Experiment 20000453 PARAMETER Experiment Name: At_100uM_ABA_P Parameter: Age (day) Value: 15
  misc_feature: MA Experiment 20000453 PARAMETER Experiment Name: At_100uM_ABA_P Parameter: Organism Value: A. thaliana
  misc_feature: MA Experiment 20000453 PARAMETER Experiment Name: At_100uM_ABA_P Parameter: Plant Line Value: WS
  misc_feature: MA Experiment 20000453 PARAMETER Experiment Name: At_100uM_ABA_P Parameter: Timepoint (hr) Value: 24
  misc_feature: MA Experiment 20000453 PARAMETER Experiment Name: At_100uM_ABA_P Parameter: Tissue Value: Aerial
  misc_feature: MA Experiment 20000453 PARAMETER Experiment Name: At_100uM_ABA_P Parameter: Treatment Value: 100uM ABA vs. No Treatment
  misc_feature: MA Experiment ID: 20000794 Result: Up-regulated in Transcription
  misc_feature: MA Experiment 20000794 PARAMETER Experiment Name: At_Petals_P Parameter: Age (day) Value: 23-25 days
  misc_feature: MA Experiment 20000794 PARAMETER Experiment Name: At_Petals_P Parameter: Plant Line Value: WS
  misc_feature: MA Experiment 20000794 PARAMETER Experiment Name: At_Petals_P Parameter: Tissue Value: Petals vs. Whole plant
  misc_feature: MA Experiment ID: 20001451 Result: Up-regulated in Transcription
  misc_feature: MA Experiment 20001451 PARAMETER Experiment Name: At_Far-red-induction_P Parameter: Age (day) Value: 7
  misc_feature: MA Experiment 20001451 PARAMETER Experiment Name: At_Far-red-induction_P Parameter: Light Value: Far-red vs. White
  misc_feature: MA Experiment 20001451 PARAMETER Experiment Name: At_Far-red-induction_P Parameter: Organism Value: A. thaliana
  misc_feature: MA Experiment 20001451 PARAMETER Experiment Name: At_Far-red-induction_P Parameter: Plant Line Value: Columbia
  misc_feature: MA Experiment 20001451 PARAMETER Experiment Name: At_Far-red-induction_P Parameter: Timepoint (hr) Value: 24
  misc_feature: MA Experiment 20001451 PARAMETER Experiment Name: At_Far-red-induction_P Parameter: Tissue Value: Whole Plant
  misc_feature: MA Experiment ID: 20001557 Result: Down-regulated in Transcription
  misc_feature: MA Experiment 20001557 PARAMETER Experiment Name: At_Drought_Soil_Dry_P Parameter: Age (day) Value: 27
  misc_feature: MA Experiment 20001557 PARAMETER Experiment Name: At_Drought_Soil_Dry_P Parameter: Organism Value: A. thaliana
  misc_feature: MA Experiment 20001557 PARAMETER Experiment Name: At_Drought_Soil_Dry_P Parameter: Plant Line Value: WS
  misc_feature: MA Experiment 20001557 PARAMETER Experiment Name: At_Drought_Soil_Dry_P Parameter: Post Timepoint (hr) Value: 3
  misc_feature: MA Experiment 20001557 PARAMETER Experiment Name: At_Drought_Soil_Dry_P Parameter: Post-Treatment Value: Re-Water vs. No Drought
  misc_feature: MA Experiment 20001557 PARAMETER Experiment Name: At_Drought_Soil_Dry_P Parameter: Timepoint (day) Value: 13
  misc_feature: MA Experiment 20001557 PARAMETER Experiment Name: At_Drought_Soil_Dry_P Parameter: Treatment Value: Drought vs. No Drought
  misc_feature: MA Experiment ID: 20001905 Result: Down-regulated in Transcription
  misc_feature: MA Experiment 20001905 PARAMETER Experiment Name: At_Drought_Reproduction_P Parameter: Age (day) Value: 40
  misc_feature: MA Experiment 20001905 PARAMETER Experiment Name: At_Drought_Reproduction_P Parameter: Organism Value: A. thaliana
  misc_feature: MA Experiment 20001905 PARAMETER Experiment Name: At_Drought_Reproduction_P Parameter: Plant Line Value: WS
  misc_feature: MA Experiment 20001905 PARAMETER Experiment Name: At_Drought_Reproduction_P Parameter: Timepoint (day) Value: 10
  misc_feature: MA Experiment 20001905 PARAMETER Experiment Name: At_Drought_Reproduction_P Parameter: Tissue Value: Rosettes
  misc_feature: MA Experiment 20001905 PARAMETER Experiment Name: At_Drought_Reproduction_P Parameter: Treatment Value: Drought vs. No Drought
aaagttaggtttcaattgattggataaggacaaagactggttgttgtgtcacatttcctctctctctcagattttacaggcaaatcgatttcactcgaagactggttgttgtgtaattgtgttcgtcgtctcaggttttcaatatctgtctctttgagttgtattgatgggttctgaaggaccaacgggtgtgacgattcatatcacagggttcaagaagttccatggagtagctgagaatcctacagagaaaatggctaacaatttgaaagaatatttggctaagaattgtgtttcgaaagatgtgaatcttggaagttgtactgtgcttgagactgctggtcaaggagctcttgcttctctctatcagttgctacaatccgcggttaacacaaaagagtcagagtcgttgaccggaaaaaccatatgggttcactttggagttaatagtggcgctacaaaatttgcaattgagcaacaagctgtgaatgaagcgacttttcgttgtcctgatgaattgggttggaaacctcagaatttgccaattgttccctctgatggtccaatctcaactgtaagaaagactaatcttcctgttgaagagataacaaaggcgttggagaagaatggctttgaagtgataacatcagatgatgcaggtcgatttgtgtgtaactatgtctattaccattctctgagatttgcagagcagaataagaccagatcactctttgttcacgttcctcttttcgttgccgtggatgaagaaacccaaatgagattcactgtttctctgctggaggtactcgcttctatttgcaagtaatgttatcccaaatgtggctattcttattcatgaaatgtgcatcatggaccgattgtctccccacgggaaaaattcgcttatcaataaatggaatataagttcacttctc

SEQ ID NO: 35007 - protein, 219 aa, Arabidopsis thaliana; identical to SEQ ID NO: 22924
  peptide (1)..(219): Ceres Seq. ID no. 12336021
  misc_feature (11)..(201): Pfam Name: Pyroglutamyl peptidase Pfam Description: Pyroglutamyl peptidase
  misc_feature (13)..(193): Homolog of NCBI NO: 13787025 NR Description: Chain A, X-Ray Crystalline Structures Of Carboxyl Peptidase From A Hyperthermophile, Pyrococcus Furiosus,
  misc_feature (1)..(88): Homolog of NCBI NO: 15220751 NR Description: hypothetical protein; protein id: At1g23430.1
  misc_feature (1)..(88): Homolog of NCBI NO: 9295697 NR Description: F26F24.31 [Arabidopsis thaliana]
  misc_feature (87)..(218): Homolog of NCBI NO: 15220753 NR Description: hypothetical protein; protein id: At1g23440.1
  misc_feature (1)..(88): Homolog of NCBI NO: 8778575 NR Description: F28C11.8 [Arabidopsis thaliana]
  misc_feature (91)..(218): Homolog of NCBI NO: 8778575 NR Description: F28C11.8 [Arabidopsis thaliana]
  misc_feature (1)..(218): Homolog of NCBI NO: 13430708 NR Description: unknown protein [Arabidopsis thaliana]
  misc_feature (1)..(216): Homolog of NCBI NO: 12039349 NR Description: putative pyrrolidone carboxyl peptidase [Oryza
  misc_feature (1)..(215): Homolog of NCBI NO: 38175741 NR Description: pyrrolidone carboxyl peptidase-like protein
  misc_feature (1)..(219): Homolog of NCBI NO: 18405940 NR Description: expressed protein

SEQ ID NO: 35008 - protein, 190 aa, Arabidopsis thaliana; identical to SEQ ID NO: 22925
  peptide (1)..(190): Ceres Seq. ID no. 12336022
  misc_feature (1)..(172): Pfam Name: Pyroglutamyl peptidase Pfam Description: Pyroglutamyl peptidase
  misc_feature (1)..(164): Homolog of NCBI NO: 13787025 NR Description: Chain A, X-Ray Crystalline Structures Of Carboxyl Peptidase From A Hyperthermophile, Pyrococcus Furiosus,
  misc_feature (1)..(59): Homolog of NCBI NO: 15220751 NR Description: hypothetical protein; protein id: At1g23430.1
  misc_feature (1)..(59): Homolog of NCBI NO: 9295697 NR Description: F26F24.31 [Arabidopsis thaliana]
  misc_feature (58)..(189): Homolog of NCBI NO: 15220753 NR Description: hypothetical protein; protein id: At1g23440.1
  misc_feature (1)..(59): Homolog of NCBI NO: 8778575 NR Description: F28C11.8 [Arabidopsis thaliana]
  misc_feature (62)..(189): Homolog of NCBI NO: 8778575 NR Description: F28C11.8 [Arabidopsis thaliana]
  misc_feature (1)..(189): Homolog of NCBI NO: 13430708 NR Description: unknown protein [Arabidopsis thaliana]
  misc_feature (1)..(187): Homolog of NCBI NO: 12039349 NR Description: putative pyrrolidone carboxyl peptidase [Oryza
  misc_feature (1)..(186): Homolog of NCBI NO: 38175741 NR Description: pyrrolidone carboxyl peptidase-like protein
  misc_feature (1)..(190): Homolog of NCBI NO: 18405940 NR Description: expressed protein

SEQ ID NO: 35009 - DNA, 1991 bp, Arabidopsis thaliana
  misc_feature (1)..(1991): Ceres Seq. ID no. 13491836
  misc_feature: MA Experiment ID: 108434 Result: Down-regulated in Transcription
  misc_feature: MA Experiment 108434 PARAMETER Experiment Name: At_Root_Tips_cDNA_P Parameter: Tissue Value: Root Tips
  misc_feature: MA Experiment ID: 108573 Result: Up-regulated in Transcription
  misc_feature: MA Experiment 108573 PARAMETER Experiment Name: At_Drought_cDNA_P Parameter: Timepoint (hr) Value: 6
  misc_feature: MA Experiment 108573 PARAMETER Experiment Name: At_Drought_cDNA_P Parameter: Tissue Value: Aerial
  misc_feature: MA Experiment 108573 PARAMETER Experiment Name: At_Drought_cDNA_P Parameter: Treatment Value: Drought vs. No Drought
  misc_feature: MA Experiment ID: 108585 Result: Up-regulated in Transcription
  misc_feature: MA Experiment 108585 PARAMETER Experiment Name: At_5mM_NaNP_cDNA_P Parameter: Timepoint (hr) Value: 6
  misc_feature: MA Experiment 108585 PARAMETER Experiment Name: At_5mM_NaNP_cDNA_P Parameter: Tissue Value: Aerial
  misc_feature: MA Experiment 108585 PARAMETER Experiment Name: At_5mM_NaNP_cDNA_P Parameter: Treatment Value: null
  misc_feature: MA Experiment ID: 108668 Result: Up-regulated in Transcription
  misc_feature: MA Experiment 108668 PARAMETER Experiment Name: At_2mM_SA_cDNA_P Parameter: Plant Line Value: WS
  misc_feature: MA Experiment 108668 PARAMETER Experiment Name: At_2mM_SA_cDNA_P Parameter: Timepoint (hr) Value: 6
  misc_feature: MA Experiment 108668 PARAMETER Experiment Name: At_2mM_SA_cDNA_P Parameter: Treatment Value: 2mM SA vs. No Treatment
  misc_feature: MA Experiment ID: 20000069 Result: Up-regulated in Transcription
  misc_feature: MA Experiment 20000069 PARAMETER Experiment Name: At_100uM_ABA_Mutants_cDNA_P Parameter: Plant Line Value: CS23
  misc_feature: MA Experiment 20000069 PARAMETER Experiment Name: At_100uM_ABA_Mutants_cDNA_P Parameter: Timepoint (hr) Value: 6
  misc_feature: MA Experiment 20000069 PARAMETER Experiment Name: At_100uM_ABA_Mutants_cDNA_P Parameter: Tissue Value: Aerial
  misc_feature: MA Experiment 20000069 PARAMETER Experiment Name: At_100uM_ABA_Mutants_cDNA_P Parameter: Treatment Value: 100uM ABA vs. No Treatment
  misc_feature: MA Experiment ID: 20000070 Result: Up-regulated in Transcription
  misc_feature: MA Experiment 20000070 PARAMETER Experiment Name: At_100uM_ABA_Mutants_cDNA_P Parameter: Plant Line Value: CS24
  misc_feature: MA Experiment 20000070 PARAMETER Experiment Name: At_100uM_ABA_Mutants_cDNA_P Parameter: Timepoint (hr) Value: 6
  misc_feature: MA Experiment 20000070 PARAMETER Experiment Name: At_100uM_ABA_Mutants_cDNA_P Parameter: Tissue Value: Aerial
  misc_feature: MA Experiment 20000070 PARAMETER Experiment Name: At_100uM_ABA_Mutants_cDNA_P Parameter: Treatment Value: 100uM ABA vs. No Treatment
  misc_feature: MA Experiment ID: 20000071 Result: Up-regulated in Transcription
  misc_feature: MA Experiment 20000071 PARAMETER Experiment Name: At_100uM_ABA_Mutants_cDNA_P Parameter: Plant Line Value: CS8104
  misc_feature: MA Experiment 20000071 PARAMETER Experiment Name: At_100uM_ABA_Mutants_cDNA_P Parameter: Timepoint (hr) Value: 6
  misc_feature: MA Experiment 20000071 PARAMETER Experiment Name: At_100uM_ABA_Mutants_cDNA_P Parameter: Tissue Value: Aerial
  misc_feature: MA Experiment 20000071 PARAMETER Experiment Name: At_100uM_ABA_Mutants_cDNA_P Parameter: Treatment Value: 100uM ABA vs. No Treatment
  misc_feature: MA Experiment ID: 20000072 Result: Up-regulated in Transcription
  misc_feature: MA Experiment 20000072 PARAMETER Experiment Name: At_100uM_ABA_Mutants_cDNA_P Parameter: Plant Line Value: CS8105
  misc_feature: MA Experiment 20000072 PARAMETER Experiment Name: At_100uM_ABA_Mutants_cDNA_P Parameter: Timepoint (hr) Value: 6
  misc_feature: MA Experiment 20000072 PARAMETER Experiment Name: At_100uM_ABA_Mutants_cDNA_P Parameter: Tissue Value: Aerial
  misc_feature: MA Experiment 20000072 PARAMETER Experiment Name: At_100uM_ABA_Mutants_cDNA_P Parameter: Treatment Value: 100uM ABA vs. No Treatment
  misc_feature: MA Experiment ID: 20000086 Result: Up-regulated in Transcription
  misc_feature: MA Experiment 20000086 PARAMETER Experiment Name: At_100uM_ABA_Mutants_cDNA_P Parameter: Plant Line Value: CS22
  misc_feature: MA Experiment 20000086 PARAMETER Experiment Name: At_100uM_ABA_Mutants_cDNA_P Parameter: Timepoint (hr) Value: 6
  misc_feature: MA Experiment 20000086 PARAMETER Experiment Name: At_100uM_ABA_Mutants_cDNA_P Parameter: Tissue Value: Aerial
  misc_feature: MA Experiment 20000086 PARAMETER Experiment Name: At_100uM_ABA_Mutants_cDNA_P Parameter: Treatment Value: 100uM ABA vs. No Treatment
  misc_feature: MA Experiment ID: 20000087 Result: Up-regulated in Transcription
  misc_feature: MA Experiment 20000087 PARAMETER Experiment Name: At_100uM_ABA_Mutants_cDNA_P Parameter: Plant Line Value: WS
  misc_feature: MA Experiment 20000087 PARAMETER Experiment Name: At_100uM_ABA_Mutants_cDNA_P Parameter: Timepoint (hr) Value: 6
  misc_feature: MA Experiment 20000087 PARAMETER Experiment Name: At_100uM_ABA_Mutants_cDNA_P Parameter: Tissue Value: Aerial
  misc_feature: MA Experiment 20000087 PARAMETER Experiment Name: At_100uM_ABA_Mutants_cDNA_P Parameter: Treatment Value: 100uM ABA vs. No Treatment
  misc_feature: MA Experiment ID: 20000088 Result: Up-regulated in Transcription
  misc_feature: MA Experiment 20000088 PARAMETER Experiment Name: At_100uM_ABA_Mutants_cDNA_P Parameter: Plant Line Value: Landsberg
  misc_feature: MA Experiment 20000088 PARAMETER Experiment Name: At_100uM_ABA_Mutants_cDNA_P Parameter: Timepoint (hr) Value: 6
  misc_feature: MA Experiment 20000088 PARAMETER Experiment Name: At_100uM_ABA_Mutants_cDNA_P Parameter: Tissue Value: Aerial
  misc_feature: MA Experiment 20000088 PARAMETER Experiment Name: At_100uM_ABA_Mutants_cDNA_P Parameter: Treatment Value: 100uM ABA vs. No Treatment
  misc_feature: MA Experiment ID: 20000436 Result: Up-regulated in Transcription
  misc_feature: MA Experiment 20000436 PARAMETER Experiment Name: At_Drought_P Parameter: Age (day) Value: 7
  misc_feature: MA Experiment 20000436 PARAMETER Experiment Name: At_Drought_P Parameter: Organism Value: A. thaliana
  misc_feature: MA Experiment 20000436 PARAMETER Experiment Name: At_Drought_P Parameter: Plant Line Value: WS
  misc_feature: MA Experiment 20000436 PARAMETER Experiment Name: At_Drought_P Parameter: Timepoint (hr) Value: 12
  misc_feature: MA Experiment 20000436 PARAMETER Experiment Name: At_Drought_P Parameter: Tissue Value: Whole Plant
  misc_feature: MA Experiment 20000436 PARAMETER Experiment Name: At_Drought_P Parameter: Treatment Value: Drought vs. No Drought
  misc_feature: MA Experiment ID: 20000437 Result: Up-regulated in Transcription
  misc_feature: MA Experiment 20000437 PARAMETER Experiment Name: At_Drought_P Parameter: Age (day) Value: 8
  misc_feature: MA Experiment 20000437 PARAMETER Experiment Name: At_Drought_P Parameter: Organism Value: A. thaliana
  misc_feature: MA Experiment 20000437 PARAMETER Experiment Name: At_Drought_P Parameter: Plant Line Value: WS
  misc_feature: MA Experiment 20000437 PARAMETER Experiment Name: At_Drought_P Parameter: Timepoint (hr) Value: 24
  misc_feature: MA Experiment 20000437 PARAMETER Experiment Name: At_Drought_P Parameter: Tissue Value: Whole Plant
  misc_feature: MA Experiment 20000437 PARAMETER Experiment Name: At_Drought_P Parameter: Treatment Value: Drought vs. No Drought
  misc_feature: MA Experiment ID: 20000439 Result: Up-regulated in Transcription
  misc_feature: MA Experiment 20000439 PARAMETER Experiment Name: At_Roots__P Parameter: Age (day) Value: 14 vs. 21
  misc_feature: MA Experiment 20000439 PARAMETER Experiment Name: At_Roots__P Parameter: Organism Value: A. thaliana
  misc_feature: MA Experiment 20000439 PARAMETER Experiment Name: At_Roots__P Parameter: Tissue Value: Roots vs. Whole Plant
  misc_feature: MA Experiment ID: 20000453 Result: Up-regulated in Transcription
  misc_feature: MA Experiment 20000453 PARAMETER Experiment Name: At_100uM_ABA_P Parameter: Age (day) Value: 15
  misc_feature: MA Experiment 20000453 PARAMETER Experiment Name: At_100uM_ABA_P Parameter: Organism Value: A. thaliana
  misc_feature: MA Experiment 20000453 PARAMETER Experiment Name: At_100uM_ABA_P Parameter: Plant Line Value: WS
  misc_feature: MA Experiment 20000453 PARAMETER Experiment Name: At_100uM_ABA_P Parameter: Timepoint (hr) Value: 24
  misc_feature: MA Experiment 20000453 PARAMETER Experiment Name: At_100uM_ABA_P Parameter: Tissue Value: Aerial
  misc_feature: MA Experiment 20000453 PARAMETER Experiment Name: At_100uM_ABA_P Parameter: Treatment Value: 100uM ABA vs. No Treatment
  misc_feature: MA Experiment ID: 20001905 Result: Up-regulated in Transcription
  misc_feature: MA Experiment 20001905 PARAMETER Experiment Name: At_Drought_Reproduction_P Parameter: Age (day) Value: 40
  misc_feature: MA Experiment 20001905 PARAMETER Experiment Name: At_Drought_Reproduction_P Parameter: Organism Value: A. thaliana
  misc_feature: MA Experiment 20001905 PARAMETER Experiment Name: At_Drought_Reproduction_P Parameter: Plant Line Value: WS
  misc_feature: MA Experiment 20001905 PARAMETER Experiment Name: At_Drought_Reproduction_P Parameter: Timepoint (day) Value: 10
  misc_feature: MA Experiment 20001905 PARAMETER Experiment Name: At_Drought_Reproduction_P Parameter: Tissue Value: Rosettes
  misc_feature: MA Experiment 20001905 PARAMETER Experiment Name: At_Drought_Reproduction_P Parameter: Treatment Value: Drought vs. No Drought
acagactctttcttaatctctctctctttcaaccaaacccctaaacaaaaaaaaaatacattttctgatctctctaaaaatctttctccttcgttaatctcgtgatctctttctttttctatatatggacagaggatggtctggtctcactcttgattcatcttctcttgatcttttaaaccctaatcgtatttctcataagaatcaccgacgtttctcaaatcctttggcgatgtctagaattgacgaagaagatgatcagaagacgagaatatcaaccaacggtagtgaatttaggtttccggtgagtctctcaggtattcgtgatcgtgaagatgaagatttttcatctggcgttgctggagataatgaccgtgaagttcccggcgaagtggatttcttctccgacaagaaatctagggtttgtcgtgaagacgacgaaggatttcgtgtgaagaaggaagaacaagatgatcgaacggacgtaaataccggtttgaatcttcgaacaactggtaatacaaagagtgatgagtcaatgatcgatgatggagaatcttccgaaatggaagataagcgtgcgaaaaatgagttggtgaaattacaagatgagttgaagaaaatgacaatggataatcaaaagcttagagaattgcttacacaagttagcaacagttacacttcacttcagatgcatcttgtttcactaatgcagcaacagcaacaacagaacaataaggtaatagaagctgctgagaagcctgaggagacgatagtaccaaggcaatttattgatttaggccctacgagagcagtaggtgaggccgaggatgtgtcaaattcttcatccgaagatagaactcgttcggggggttcttctgcagccgagaggcgtagtaacgggaagagacttgggcgtgaagaaagccccgaaactgagtccaacaaaattcagaaggtgaattctactaccccgacgacatttgatcaaaccgctgaagctacgatgaggaaagcccgtgtctccgttcgtgcccgatcggaagctccgatgataagcgatggatgtcaatggagaaaatatggccagaagatggccaaagggaatccttgtccgcgggcatattaccgctgcacgatggccacgggctgtcccgttcgcaaacaagttcaacgttgcgcggaagacagatcaattctgattacaacctacgagggaaaccataaccatccgttgccgccagccgcggtagccatggcttctaccaccacggcggcggctaacatgttgctatccgggtcaatgtctagtcacgacgggatgatgaaccctacaaatttactagctagggctgttcttccttgctccacaagcatggcaacaatctcagcctccgcgccgtttccaaccgtcacattagacctcacccactcacctccgcctcctaatggttccaatccttcctcttccgcggctaccaacaacaaccacaactcactgatgcagcggccgcaacaacaacaacagcaaatgacgaacttacctccgggaatgctacctcatgtaataggccaggcattgtataaccaatccaagttctcggggctgcagttctctggtggctctccctcgacggcagcgttttctcagtcacacgcggtggctgatacaataacggcactcacagctgacccgaatttcacggcggctcttgcagccgttatttcttctatgatcaatggtacgaaccaccacgacggcgaaggaaacaacaaaaatcaatagaaaaatattacattttttttttgggtatctacattttttttccaactgggttataggaaacagagagtttatttcattgattcacatttgttctgtttcgtaccaaaatcccagtaaatatacaaaagcaaactatactcaagttcatattcgtaaacactataaaatagttacgtaacttaattagcattgcctttaaagcttt

SEQ ID NO: 35010 - protein, 553 aa, Arabidopsis thaliana
  peptide (1)..(553): Ceres Seq. ID no. 13491837
  misc_feature (311)..(371): Pfam Name: WRKY DNA -binding domain Pfam Description: WRKY DNA -binding domain
  misc_feature (44)..(552): Homolog of NCBI NO: 15233516 NR Description: WRKY family transcription factor [Arabidopsis
  misc_feature (252)..(552): Homolog of NCBI NO: 18415833 NR Description: WRKY family transcription factor [Arabidopsis
  misc_feature (90)..(552): Homolog of NCBI NO: 11357339 NR Description: hypothetical protein AT4g22070 - Arabidopsis
  misc_feature (156)..(552): Homolog of NCBI NO: 5042446 NR Description: putative WRKY DNA binding protein
  misc_feature (107)..(552): Homolog of NCBI NO: 34904618 NR Description: putative WRKY DNA binding protein
  misc_feature (316)..(553): Homolog of NCBI NO: 13506739 NR Description: WRKY DNA-binding protein 6 [Arabidopsis thaliana]
  misc_feature (37)..(124): Homolog of NCBI NO: 25404372 NR Description: hypothetical protein F19K23.22 [imported] -
  misc_feature (349)..(553): Homolog of NCBI NO: 25404372 NR Description: hypothetical protein F19K23.22 [imported] -
  misc_feature (121)..(333): Homolog of NCBI NO: 25404372 NR Description: hypothetical protein F19K23.22 [imported] -
  misc_feature (1)..(553): Homolog of NCBI NO: 18407554 NR Description: WRKY family transcription factor [Arabidopsis
MDRGWSGLTLDSSSLDLLNPNRISHKNHRRFSNPLAMSRIDEEDDQKTRISTNGSEFRFPVSLSGIRDREDEDFSSGVAGDNDREVPGEVDFFSDKKSRVCREDDEGFRVKKEEQDDRTDVNTGLNLRTTGNTKSDESMIDDGESSEMEDKRAKNELVKLQDELKKMTMDNQKLRELLTQVSNSYTSLQMHLVSLMQQQQQQNNKVIEAAEKPEETIVPRQFIDLGPTRAVGEAEDVSNSSSEDRTRSGGSSAAERRSNGKRLGREESPETESNKIQKVNSTTPTTFDQTAEATMRKARVSVRARSEAPMISDGCQWRKYGQKMAKGNPCPRAYYRCTMATGCPVRKQVQRCAEDRSILITTYEGNHNHPLPPAAVAMASTTTAAANMLLSGSMSSHDGMMNPTNLLARAVLPCSTSMATISASAPFPTVTLDLTHSPPPPNGSNPSSSAATNNNHNSLMQRPQQQQQQMTNLPPGMLPHVIGQALYNQSKFSGLQFSGGSPSTAAFSQSHAVADTITALTADPNFTAALAAVISSMINGTNHHDGEGNNKNQ

SEQ ID NO: 35011 - protein, 517 aa, Arabidopsis thaliana
  peptide (1)..(517): Ceres Seq. ID no. 13491838
  misc_feature (275)..(335): Pfam Name: WRKY DNA -binding domain Pfam Description: WRKY DNA -binding domain
  misc_feature (8)..(516): Homolog of NCBI NO: 15233516 NR Description: WRKY family transcription factor [Arabidopsis
  misc_feature (216)..(516): Homolog of NCBI NO: 18415833 NR Description: WRKY family transcription factor [Arabidopsis
  misc_feature (54)..(516): Homolog of NCBI NO: 11357339 NR Description: hypothetical protein AT4g22070 - Arabidopsis
  misc_feature (120)..(516): Homolog of NCBI NO: 5042446 NR Description: putative WRKY DNA binding protein
  misc_feature (71)..(516): Homolog of NCBI NO: 34904618 NR Description: putative WRKY DNA binding protein
  misc_feature (280)..(517): Homolog of NCBI NO: 13506739 NR Description: WRKY DNA-binding protein 6 [Arabidopsis thaliana]
  misc_feature (1)..(88): Homolog of NCBI NO: 25404372 NR Description: hypothetical protein F19K23.22 [imported] -
  misc_feature (313)..(517): Homolog of NCBI NO: 25404372 NR Description: hypothetical protein F19K23.22 [imported] -
  misc_feature (85)..(297): Homolog of NCBI NO: 25404372 NR Description: hypothetical protein F19K23.22 [imported] -
  misc_feature (1)..(517): Homolog of NCBI NO: 18407554 NR Description: WRKY family transcription factor [Arabidopsis
MSRIDEEDDQKTRISTNGSEFRFPVSLSGIRDREDEDFSSGVAGDNDREVPGEVDFFSDKKSRVCREDDEGFRVKKEEQDDRTDVNTGLNLRTTGNTKSDESMIDDGESSEMEDKRAKNELVKLQDELKKMTMDNQKLRELLTQVSNSYTSLQMHLVSLMQQQQQQNNKVIEAAEKPEETIVPRQFIDLGPTRAVGEAEDVSNSSSEDRTRSGGSSAAERRSNGKRLGREESPETESNKIQKVNSTTPTTFDQTAEATMRKARVSVRARSEAPMISDGCQWRKYGQKMAKGNPCPRAYYRCTMATGCPVRKQVQRCAEDRSILITTYEGNHNHPLPPAAVAMASTTTAAANMLLSGSMSSHDGMMNPTNLLARAVLPCSTSMATISASAPFPTVTLDLTHSPPPPNGSNPSSSAATNNNHNSLMQRPQQQQQQMTNLPPGMLPHVIGQALYNQSKFSGLQFSGGSPSTAAFSQSHAVADTITALTADPNFTAALAAVISSMINGTNHHDGEGNNKNQ

SEQ ID NO: 35012 - protein, 415 aa, Arabidopsis thaliana
  peptide (1)..(415): Ceres Seq. ID no. 13491839
  misc_feature (173)..(233): Pfam Name: WRKY DNA -binding domain Pfam Description: WRKY DNA -binding domain
  misc_feature (1)..(406): Homolog of NCBI NO: 34894308 NR Description: unnamed protein product [Oryza sativa (japonica
  misc_feature (1)..(414): Homolog of NCBI NO: 15233516 NR Description: WRKY family transcription factor [Arabidopsis
  misc_feature (114)..(414): Homolog of NCBI NO: 18415833 NR Description: WRKY family transcription factor [Arabidopsis
  misc_feature (1)..(414): Homolog of NCBI NO: 11357339 NR Description: hypothetical protein AT4g22070 - Arabidopsis
  misc_feature (18)..(414): Homolog of NCBI NO: 5042446 NR Description: putative WRKY DNA binding protein
  misc_feature (1)..(414): Homolog of NCBI NO: 34904618 NR Description: putative WRKY DNA binding protein
  misc_feature (178)..(415): Homolog of NCBI NO: 13506739 NR Description: WRKY DNA-binding protein 6 [Arabidopsis thaliana]
  misc_feature (211)..(415): Homolog of NCBI NO: 25404372 NR Description: hypothetical protein F19K23.22 [imported] -
  misc_feature (1)..(195): Homolog of NCBI NO: 25404372 NR Description: hypothetical protein F19K23.22 [imported] -
  misc_feature (1)..(415): Homolog of NCBI NO: 18407554 NR Description: WRKY family transcription factor [Arabidopsis
MIDDGESSEMEDKRAKNELVKLQDELKKMTMDNQKLRELLTQVSNSYTSLQMHLVSLMQQQQQQNNKVIEAAEKPEETIVPRQFIDLGPTRAVGEAEDVSNSSSEDRTRSGGSSAAERRSNGKRLGREESPETESNKIQKVNSTTPTTFDQTAEATMRKARVSVRARSEAPMISDGCQWRKYGQKMAKGNPCPRAYYRCTMATGCPVRKQVQRCAEDRSILITTYEGNHNHPLPPAAVAMASTTTAAANMLLSGSMSSHDGMMNPTNLLARAVLPCSTSMATISASAPFPTVTLDLTHSPPPPNGSNPSSSAATNNNHNSLMQRPQQQQQQMTNLPPGMLPHVIGQALYNQSKFSGLQFSGGSPSTAAFSQSHAVADTITALTADPNFTAALAAVISSMINGTNHHDGEGNNKNQ

SEQ ID NO: 35013 - DNA, 2167 bp, Arabidopsis thaliana
  misc_feature (1)..(2167): Ceres Seq. ID no. 13492886
  misc_feature: MA Experiment ID: 108434 Result: Down-regulated in Transcription
  misc_feature: MA Experiment 108434 PARAMETER Experiment Name: At_Root_Tips_cDNA_P Parameter: Tissue Value: Root Tips
  misc_feature: MA Experiment ID: 108435 Result: Down-regulated in Transcription
  misc_feature: MA Experiment 108435 PARAMETER Experiment Name: At_stm_Mutants_cDNA_P Parameter: Plant Line Value: wt Landsburg vs stm
  misc_feature: MA Experiment 108435 PARAMETER Experiment Name: At_stm_Mutants_cDNA_P Parameter: Tissue Value: Shoot Apical Meristem Region
  misc_feature: MA Experiment ID: 108462 Result: Up-regulated in Transcription
  misc_feature: MA Experiment 108462 PARAMETER Experiment Name: At_Germinating_Seeds_cDNA_P Parameter: Age (day) Value: 2 vs. 0
  misc_feature: MA Experiment 108462 PARAMETER Experiment Name: At_Germinating_Seeds_cDNA_P Parameter: Tissue Value: Germinating Seeds
  misc_feature: MA Experiment ID: 108463 Result: Up-regulated in Transcription
  misc_feature: MA Experiment 108463 PARAMETER Experiment Name: At_Germinating_Seeds_cDNA_P Parameter: Age (day) Value: 3 vs. 0
  misc_feature: MA Experiment 108463 PARAMETER Experiment Name: At_Germinating_Seeds_cDNA_P Parameter: Tissue Value: Germinating Seeds
  misc_feature: MA Experiment ID: 108464 Result: Up-regulated in Transcription
  misc_feature: MA Experiment 108464 PARAMETER Experiment Name: At_Germinating_Seeds_cDNA_P Parameter: Age (day) Value: 4 vs. 0
  misc_feature: MA Experiment 108464 PARAMETER Experiment Name: At_Germinating_Seeds_cDNA_P Parameter: Tissue Value: Germinating Seeds
  misc_feature: MA Experiment ID: 108489 Result: Up-regulated in Transcription
  misc_feature: MA Experiment ID: 108501 Result: Down-regulated in Transcription
  misc_feature: MA Experiment 108501 PARAMETER Experiment Name: At_ap2_floral_buds_cDNA_P Parameter: Plant Line Value: ap2 (Ler.)
  misc_feature: MA Experiment 108501 PARAMETER Experiment Name: At_ap2_floral_buds_cDNA_P Parameter: Tissue Value: Closed Flower
  misc_feature: MA Experiment ID: 108573 Result: Up-regulated in Transcription
  misc_feature: MA Experiment 108573 PARAMETER Experiment Name: At_Drought_cDNA_P Parameter: Timepoint (hr) Value: 6
  misc_feature: MA Experiment 108573 PARAMETER Experiment Name: At_Drought_cDNA_P Parameter: Tissue Value: Aerial
  misc_feature: MA Experiment 108573 PARAMETER Experiment Name: At_Drought_cDNA_P Parameter: Treatment Value: Drought vs. No Drought
  misc_feature: MA Experiment ID: 108574 Result: Down-regulated in Transcription
  misc_feature: MA Experiment 108574 PARAMETER Experiment Name: At_Wounding__cDNA_P Parameter: Timepoint (hr) Value: 1
  misc_feature: MA Experiment 108574 PARAMETER Experiment Name: At_Wounding__cDNA_P Parameter: Tissue Value: Aerial
  misc_feature: MA Experiment 108574 PARAMETER Experiment Name: At_Wounding__cDNA_P Parameter: Treatment Value: Wounding vs. No Wounding
  misc_feature: MA Experiment ID: 108579 Result: Down-regulated in Transcription
  misc_feature: MA Experiment 108579 PARAMETER Experiment Name: At_4deg_Cold_cDNA_P Parameter: Temperature (deg C) Value: 4 vs. 22
  misc_feature: MA Experiment 108579 PARAMETER Experiment Name: At_4deg_Cold_cDNA_P Parameter: Timepoint (hr) Value: 6
  misc_feature: MA Experiment 108579 PARAMETER Experiment Name: At_4deg_Cold_cDNA_P Parameter: Tissue Value: Aerial
  misc_feature: MA Experiment ID: 108585 Result: Up-regulated in Transcription
  misc_feature: MA Experiment 108585 PARAMETER Experiment Name: At_5mM_NaNP_cDNA_P Parameter: Timepoint (hr) Value: 6
  misc_feature: MA Experiment 108585 PARAMETER Experiment Name: At_5mM_NaNP_cDNA_P Parameter: Tissue Value: Aerial
  misc_feature: MA Experiment 108585 PARAMETER Experiment Name: At_5mM_NaNP_cDNA_P Parameter: Treatment Value: null
  misc_feature: MA Experiment ID: 108594 Result: Up-regulated in Transcription
  misc_feature: MA Experiment 108594 PARAMETER Experiment Name: At_Ler-rhl_Root_cDNA_P Parameter: Plant Line Value: null
  misc_feature: MA Experiment ID: 108607 Result: Up-regulated in Transcription
  misc_feature: MA Experiment 108607 PARAMETER Experiment Name: At_100uM_ABA_cDNA_P Parameter: Timepoint (hr) Value: 4
  misc_feature: MA Experiment 108607 PARAMETER Experiment Name: At_100uM_ABA_cDNA_P Parameter: Tissue Value: Aerial
  misc_feature: MA Experiment 108607 PARAMETER Experiment Name: At_100uM_ABA_cDNA_P Parameter: Treatment Value: 100uM ABA vs. No Treatment
  misc_feature: MA Experiment ID: 108668 Result: Up-regulated in Transcription
  misc_feature: MA Experiment 108668 PARAMETER Experiment Name: At_2mM_SA_cDNA_P Parameter: Plant Line Value: WS
  misc_feature: MA Experiment 108668 PARAMETER Experiment Name: At_2mM_SA_cDNA_P Parameter: Timepoint (hr) Value: 6
  misc_feature: MA Experiment 108668 PARAMETER Experiment Name: At_2mM_SA_cDNA_P Parameter: Treatment Value: 2mM SA vs. No Treatment
  misc_feature: MA Experiment ID: 20000070 Result: Up-regulated in Transcription
  misc_feature: MA Experiment 20000070 PARAMETER Experiment Name: At_100uM_ABA_Mutants_cDNA_P Parameter: Plant Line Value: CS24
  misc_feature: MA Experiment 20000070 PARAMETER Experiment Name: At_100uM_ABA_Mutants_cDNA_P Parameter: Timepoint (hr) Value: 6
  misc_feature: MA Experiment 20000070 PARAMETER Experiment Name: At_100uM_ABA_Mutants_cDNA_P Parameter: Tissue Value: Aerial
  misc_feature: MA Experiment 20000070 PARAMETER Experiment Name: At_100uM_ABA_Mutants_cDNA_P Parameter: Treatment Value: 100uM ABA vs. No Treatment
  misc_feature: MA Experiment ID: 20000072 Result: Up-regulated in Transcription
  misc_feature: MA Experiment 20000072 PARAMETER Experiment Name: At_100uM_ABA_Mutants_cDNA_P Parameter: Plant Line Value: CS8105
  misc_feature: MA Experiment 20000072 PARAMETER Experiment Name: At_100uM_ABA_Mutants_cDNA_P Parameter: Timepoint (hr) Value: 6
  misc_feature: MA Experiment 20000072 PARAMETER Experiment Name: At_100uM_ABA_Mutants_cDNA_P Parameter: Tissue Value: Aerial
  misc_feature: MA Experiment 20000072 PARAMETER Experiment Name: At_100uM_ABA_Mutants_cDNA_P Parameter: Treatment Value: 100uM ABA vs. No Treatment
  misc_feature: MA Experiment ID: 20000088 Result: Up-regulated in Transcription
  misc_feature: MA Experiment 20000088 PARAMETER Experiment Name: At_100uM_ABA_Mutants_cDNA_P Parameter: Plant Line Value: Landsberg
  misc_feature: MA Experiment 20000088 PARAMETER Experiment Name: At_100uM_ABA_Mutants_cDNA_P Parameter: Timepoint (hr) Value: 6
  misc_feature: MA Experiment 20000088 PARAMETER Experiment Name: At_100uM_ABA_Mutants_cDNA_P Parameter: Tissue Value: Aerial
  misc_feature: MA Experiment 20000088 PARAMETER Experiment Name: At_100uM_ABA_Mutants_cDNA_P Parameter: Treatment Value: 100uM ABA vs. No Treatment
  misc_feature: MA Experiment ID: 20000117 Result: Up-regulated in Transcription
  misc_feature: MA Experiment 20000117 PARAMETER Experiment Name: At_100uM_ABA_Mutants_cDNA_P Parameter: Plant Line Value: Columbia
  misc_feature: MA Experiment 20000117 PARAMETER Experiment Name: At_100uM_ABA_Mutants_cDNA_P Parameter: Timepoint (hr) Value: 6
  misc_feature: MA Experiment 20000117 PARAMETER Experiment Name: At_100uM_ABA_Mutants_cDNA_P Parameter: Tissue Value: Aerial
  misc_feature: MA Experiment 20000117 PARAMETER Experiment Name: At_100uM_ABA_Mutants_cDNA_P Parameter: Treatment Value: 100uM ABA vs. No Treatment
  misc_feature: MA Experiment ID: 20000169 Result: Up-regulated in Transcription
  misc_feature: MA Experiment 20000169 PARAMETER Experiment Name: At_100uM_ABA_P Parameter: Age (day) Value: 14
  misc_feature: MA Experiment 20000169 PARAMETER Experiment Name: At_100uM_ABA_P Parameter: Organism Value: A. thaliana
  misc_feature: MA Experiment 20000169 PARAMETER Experiment Name: At_100uM_ABA_P Parameter: Plant Line Value: WS
  misc_feature: MA Experiment 20000169 PARAMETER Experiment Name: At_100uM_ABA_P Parameter: Timepoint (hr) Value: 6
  misc_feature: MA Experiment 20000169 PARAMETER Experiment Name: At_100uM_ABA_P Parameter: Tissue Value: Aerial
  misc_feature: MA Experiment 20000169 PARAMETER Experiment Name: At_100uM_ABA_P Parameter: Treatment Value: 100uM ABA vs. No Treatment
  misc_feature: MA Experiment ID: 20000179 Result: Down-regulated in Transcription
  misc_feature: MA Experiment 20000179 PARAMETER Experiment Name: At_Germinating_Seeds_P Parameter: Age (hr) Value: 6 vs. 0
  misc_feature: MA Experiment 20000179 PARAMETER Experiment Name: At_Germinating_Seeds_P Parameter: Tissue Value: Germinating Seeds
  misc_feature: MA Experiment ID: 20000180 Result: Down-regulated in Transcription
  misc_feature: MA Experiment 20000180 PARAMETER Experiment Name: At_Germinating_Seeds_P Parameter: Age (hr) Value: 24 vs. 0
  misc_feature: MA Experiment 20000180 PARAMETER Experiment Name: At_Germinating_Seeds_P Parameter: Tissue Value: Germinating Seeds
  misc_feature: MA Experiment ID: 20000182 Result: Up-regulated in Transcription
  misc_feature: MA Experiment 20000182 PARAMETER Experiment Name: At_2mM_SA_P Parameter: Age (day) Value: 14
  misc_feature: MA Experiment 20000182 PARAMETER Experiment Name: At_2mM_SA_P Parameter: Organism Value: A. thaliana
  misc_feature: MA Experiment 20000182 PARAMETER Experiment Name: At_2mM_SA_P Parameter: Plant Line Value: WS
  misc_feature: MA Experiment 20000182 PARAMETER Experiment Name: At_2mM_SA_P Parameter: Timepoint (hr) Value: 6
  misc_feature: MA Experiment 20000182 PARAMETER Experiment Name: At_2mM_SA_P Parameter: Tissue Value: Aerial
  misc_feature: MA Experiment 20000182 PARAMETER Experiment Name: At_2mM_SA_P Parameter: Treatment Value: 2mM SA vs. No Treatment
  misc_feature: MA Experiment ID: 20000185 Result: Down-regulated in Transcription
  misc_feature: MA Experiment 20000185 PARAMETER Experiment Name: At_Roots__P Parameter: Age (day) Value: 7 vs. 21
  misc_feature: MA Experiment 20000185 PARAMETER Experiment Name: At_Roots__P Parameter: Organism Value: A. thaliana
  misc_feature: MA Experiment 20000185 PARAMETER Experiment Name: At_Roots__P Parameter: Tissue Value: Roots vs. Whole Plant
  misc_feature: MA Experiment ID: 20000213 Result: Down-regulated in Transcription
  misc_feature: MA Experiment 20000213 PARAMETER Experiment Name: At_4deg_Cold_P Parameter: Timepoint (hr) Value: 2
  misc_feature: MA Experiment ID: 20000224 Result: Down-regulated in Transcription
  misc_feature: MA Experiment ID: 20000234 Result: Down-regulated in Transcription
  misc_feature: MA Experiment 20000234 PARAMETER Experiment Name: At_Siliques_P Parameter: Age (day) Value: 21
  misc_feature: MA Experiment 20000234 PARAMETER Experiment Name: At_Siliques_P Parameter: Organism Value: A. thaliana
  misc_feature: MA Experiment 20000234 PARAMETER Experiment Name: At_Siliques_P Parameter: Plant Line Value: WS
  misc_feature: MA Experiment 20000234 PARAMETER Experiment Name: At_Siliques_P Parameter: Tissue Value: Less Than 5mm Siliques vs. Whole Plant
  misc_feature: MA Experiment ID: 20000235 Result: Down-regulated in Transcription
  misc_feature: MA Experiment 20000235 PARAMETER Experiment Name: At_Siliques_P Parameter: Age (day) Value: 21
  misc_feature: MA Experiment 20000235 PARAMETER Experiment Name: At_Siliques_P Parameter: Organism Value: A. thaliana
  misc_feature: MA Experiment 20000235 PARAMETER Experiment Name: At_Siliques_P Parameter: Plant Line Value: WS
  misc_feature: MA Experiment 20000235 PARAMETER Experiment Name: At_Siliques_P Parameter: Tissue Value: 5-10mm Siliques vs. Whole Plant
  misc_feature: MA Experiment ID: 20000264 Result: Down-regulated in Transcription
  misc_feature: MA Experiment 20000264 PARAMETER Experiment Name: At_Open_Flower_P Parameter: Age (day) Value: 21
  misc_feature: MA Experiment 20000264 PARAMETER Experiment Name: At_Open_Flower_P Parameter: Plant Line Value: WS
  misc_feature: MA Experiment 20000264 PARAMETER Experiment Name: At_Open_Flower_P Parameter: Tissue Value: Open Flower vs. Whole Plant
  misc_feature: MA Experiment ID: 20000265 Result: Down-regulated in Transcription
  misc_feature: MA Experiment 20000265 PARAMETER Experiment Name: At_Open_Flower_P Parameter: Age (day) Value: 21
  misc_feature: MA Experiment 20000265 PARAMETER Experiment Name: At_Open_Flower_P Parameter: Plant Line Value: WS
  misc_feature: MA Experiment 20000265 PARAMETER Experiment Name: At_Open_Flower_P Parameter: Tissue Value: Closed Flower vs. Whole Plant
  misc_feature: MA Experiment ID: 20000268 Result: Down-regulated in Transcription
  misc_feature: MA Experiment 20000268 PARAMETER Experiment Name: At_100mM_NaCl__P Parameter: Age (day) Value: 14
  misc_feature: MA Experiment 20000268 PARAMETER Experiment Name: At_100mM_NaCl__P Parameter: Organism Value: A. thaliana
  misc_feature: MA Experiment 20000268 PARAMETER Experiment Name: At_100mM_NaCl__P Parameter: Plant Line Value: WS
  misc_feature: MA Experiment 20000268 PARAMETER Experiment Name: At_100mM_NaCl__P Parameter: Timepoint (hr) Value: 6
  misc_feature: MA Experiment 20000268 PARAMETER Experiment Name: At_100mM_NaCl__P Parameter: Tissue Value: Whole Plant
  misc_feature: MA Experiment 20000268 PARAMETER Experiment Name: At_100mM_NaCl__P Parameter: Treatment Value: 100mM NaCl vs. No Treatment
  misc_feature: MA Experiment ID: 20000286 Result: Down-regulated in Transcription
  misc_feature: MA Experiment 20000286 PARAMETER Experiment Name: At_Open_Flower_P Parameter: Age (day) Value: 21
  misc_feature: MA Experiment 20000286 PARAMETER Experiment Name: At_Open_Flower_P Parameter: Plant Line Value: WS
  misc_feature: MA Experiment 20000286 PARAMETER Experiment Name: At_Open_Flower_P Parameter: Tissue Value: Half Open vs. Whole Plant
  misc_feature: MA Experiment ID: 20000436 Result: Up-regulated in Transcription
  misc_feature: MA Experiment 20000436 PARAMETER Experiment Name: At_Drought_P Parameter: Age (day) Value: 7
  misc_feature: MA Experiment 20000436 PARAMETER Experiment Name: At_Drought_P Parameter: Organism Value: A. thaliana
  misc_feature: MA Experiment 20000436 PARAMETER Experiment Name: At_Drought_P Parameter: Plant Line Value: WS
  misc_feature: MA Experiment 20000436 PARAMETER Experiment Name: At_Drought_P Parameter: Timepoint (hr) Value: 12
  misc_feature: MA Experiment 20000436 PARAMETER Experiment Name: At_Drought_P Parameter: Tissue Value: Whole Plant
  misc_feature: MA Experiment 20000436 PARAMETER Experiment Name: At_Drought_P Parameter: Treatment Value: Drought vs. No Drought
  misc_feature: MA Experiment ID: 20000437 Result: Up-regulated in Transcription
  misc_feature: MA Experiment 20000437 PARAMETER Experiment Name: At_Drought_P Parameter: Age (day) Value: 8
  misc_feature: MA Experiment 20000437 PARAMETER Experiment Name: At_Drought_P Parameter: Organism Value: A. thaliana
  misc_feature: MA Experiment 20000437 PARAMETER Experiment Name: At_Drought_P Parameter: Plant Line Value: WS
  misc_feature: MA Experiment 20000437 PARAMETER Experiment Name: At_Drought_P Parameter: Timepoint (hr) Value: 24
  misc_feature: MA Experiment 20000437 PARAMETER Experiment Name: At_Drought_P Parameter: Tissue Value: Whole Plant
  misc_feature: MA Experiment 20000437 PARAMETER Experiment Name: At_Drought_P Parameter: Treatment Value: Drought vs. No Drought
  misc_feature: MA Experiment ID: 20000439 Result: Down-regulated in Transcription
  misc_feature: MA Experiment 20000439 PARAMETER Experiment Name: At_Roots__P Parameter: Age (day) Value: 14 vs. 21
  misc_feature: MA Experiment 20000439 PARAMETER Experiment Name: At_Roots__P Parameter: Organism Value: A. thaliana
  misc_feature: MA Experiment 20000439 PARAMETER Experiment Name: At_Roots__P Parameter: Tissue Value: Roots vs. Whole Plant
  misc_feature: MA Experiment ID: 20000441 Result: Up-regulated in Transcription
  misc_feature: MA Experiment 20000441 PARAMETER Experiment Name: At_1uM_BR-BRZ__P Parameter: Tissue Value: Shoot Apices
  misc_feature: MA Experiment 20000441 PARAMETER Experiment Name: At_1uM_BR-BRZ__P Parameter: Treatment Value: 1uM BR vs. No Treatment
  misc_feature: MA Experiment ID: 20000443 Result: Up-regulated in Transcription
  misc_feature: MA Experiment 20000443 PARAMETER Experiment Name: At_1uM_BR-BRZ__P Parameter: Tissue Value: Shoot Apices
  misc_feature: MA Experiment 20000443 PARAMETER Experiment Name: At_1uM_BR-BRZ__P Parameter: Treatment Value: 1uM BRZ vs. No Treatment
  misc_feature: MA Experiment ID: 20000451 Result: Up-regulated in Transcription
  misc_feature: MA Experiment 20000451 PARAMETER Experiment Name: At_CS6879_Shoots-Roots_P Parameter: Age (day) Value: 14
  misc_feature: MA Experiment 20000451 PARAMETER Experiment Name: At_CS6879_Shoots-Roots_P Parameter: Organism Value: A. thaliana
  misc_feature: MA Experiment 20000451 PARAMETER Experiment Name: At_CS6879_Shoots-Roots_P Parameter: Plant Line Value: CS6879 vs. WS
  misc_feature: MA Experiment 20000451 PARAMETER Experiment Name: At_CS6879_Shoots-Roots_P Parameter: Tissue Value: Roots
  misc_feature: MA Experiment ID: 20000452 Result: Down-regulated in Transcription
  misc_feature: MA Experiment 20000452 PARAMETER Experiment Name: At_CS6879_Shoots-Roots_P Parameter: Age (day) Value: 14
  misc_feature: MA Experiment 20000452 PARAMETER Experiment Name: At_CS6879_Shoots-Roots_P Parameter: Organism Value: A. thaliana
  misc_feature: MA Experiment 20000452 PARAMETER Experiment Name: At_CS6879_Shoots-Roots_P Parameter: Plant Line Value: CS6879 vs. WS
  misc_feature: MA Experiment 20000452 PARAMETER Experiment Name: At_CS6879_Shoots-Roots_P Parameter: Tissue Value: Shoots
  misc_feature: MA Experiment ID: 20000453 Result: Up-regulated in Transcription
  misc_feature: MA Experiment 20000453 PARAMETER Experiment Name: At_100uM_ABA_P Parameter: Age (day) Value: 15
  misc_feature: MA Experiment 20000453 PARAMETER Experiment Name: At_100uM_ABA_P Parameter: Organism Value: A. thaliana
  misc_feature: MA Experiment 20000453 PARAMETER Experiment Name: At_100uM_ABA_P Parameter: Plant Line Value: WS
  misc_feature: MA Experiment 20000453 PARAMETER Experiment Name: At_100uM_ABA_P Parameter: Timepoint (hr) Value: 24
  misc_feature: MA Experiment 20000453 PARAMETER Experiment Name: At_100uM_ABA_P Parameter: Tissue Value: Aerial
  misc_feature: MA Experiment 20000453 PARAMETER Experiment Name: At_100uM_ABA_P Parameter: Treatment Value: 100uM ABA vs. No Treatment
  misc_feature: MA Experiment ID: 20000456 Result: Down-regulated in Transcription
  misc_feature: MA Experiment 20000456 PARAMETER Experiment Name: At_100uM_BA_P Parameter: Age (day) Value: 14
  misc_feature: MA Experiment 20000456 PARAMETER Experiment Name: At_100uM_BA_P Parameter: Organism Value: A. thaliana
  misc_feature: MA Experiment 20000456 PARAMETER Experiment Name: At_100uM_BA_P Parameter: Plant Line Value: WS
  misc_feature: MA Experiment 20000456 PARAMETER Experiment Name: At_100uM_BA_P Parameter: Timepoint (hr) Value: 6
  misc_feature: MA Experiment 20000456 PARAMETER Experiment Name: At_100uM_BA_P Parameter: Tissue Value: Aerial
  misc_feature: MA Experiment 20000456 PARAMETER Experiment Name: At_100uM_BA_P Parameter: Treatment Value: 100uM BA vs. No Treatment
  misc_feature: MA Experiment ID: 20000460 Result: Down-regulated in Transcription
  misc_feature: MA Experiment 20000460 PARAMETER Experiment Name: At_10percent_PEG_P Parameter: Age (day) Value: 12
  misc_feature: MA Experiment 20000460 PARAMETER Experiment Name: At_10percent_PEG_P Parameter: Organism Value: A. thaliana
  misc_feature: MA Experiment 20000460 PARAMETER Experiment Name: At_10percent_PEG_P Parameter: Plant Line Value: WS
  misc_feature: MA Experiment 20000460 PARAMETER Experiment Name: At_10percent_PEG_P Parameter: Timepoint (day) Value: 12
  misc_feature: MA Experiment 20000460 PARAMETER Experiment Name: At_10percent_PEG_P Parameter: Tissue Value: Whole Plant
  misc_feature: MA Experiment 20000460 PARAMETER Experiment Name: At_10percent_PEG_P Parameter: Treatment Value: 10percent PEG vs. No Treatment
  misc_feature: MA Experiment ID: 20000527 Result: Up-regulated in Transcription
  misc_feature: MA Experiment 20000527 PARAMETER Experiment Name: At_10percent_PEG_P Parameter: Age (day) Value: 20
  misc_feature: MA Experiment 20000527 PARAMETER Experiment Name: At_10percent_PEG_P Parameter: Organism Value: A. thaliana
  misc_feature: MA Experiment 20000527 PARAMETER Experiment Name: At_10percent_PEG_P Parameter: Plant Line Value: WS
  misc_feature: MA Experiment 20000527 PARAMETER Experiment Name: At_10percent_PEG_P Parameter: Timepoint (day) Value: 20
  misc_feature: MA Experiment 20000527 PARAMETER Experiment Name: At_10percent_PEG_P Parameter: Tissue Value: Whole Plant
  misc_feature: MA Experiment 20000527 PARAMETER Experiment Name: At_10percent_PEG_P Parameter: Treatment Value: 10percent PEG vs. No Treatment
  misc_feature: MA Experiment ID: 20000573 Result: Up-regulated in Transcription
  misc_feature: MA Experiment 20000573 PARAMETER Experiment Name: At_100uM_ABA_Mutants__P Parameter: Organism Value: A. thaliana
  misc_feature: MA Experiment 20000573 PARAMETER Experiment Name: At_100uM_ABA_Mutants__P Parameter: Plant Line Value: CS22 vs. Ler wt
  misc_feature: MA Experiment 20000573 PARAMETER Experiment Name: At_100uM_ABA_Mutants__P Parameter: Timepoint (hr) Value: N/A
  misc_feature: MA Experiment 20000573 PARAMETER Experiment Name: At_100uM_ABA_Mutants__P Parameter: Tissue Value: Whole Plant
  misc_feature: MA Experiment 20000573 PARAMETER Experiment Name: At_100uM_ABA_Mutants__P Parameter: Treatment Value: None
  misc_feature: MA Experiment ID: 20000574 Result: Up-regulated in Transcription
  misc_feature: MA Experiment 20000574 PARAMETER Experiment Name: At_100uM_ABA_Mutants__P Parameter: Organism Value: A. thaliana
  misc_feature: MA Experiment 20000574 PARAMETER Experiment Name: At_100uM_ABA_Mutants__P Parameter: Plant Line Value: CS23 vs. Ler wt
  misc_feature: MA Experiment 20000574 PARAMETER Experiment Name: At_100uM_ABA_Mutants__P Parameter: Timepoint (hr) Value: N/A
  misc_feature: MA Experiment 20000574 PARAMETER Experiment Name: At_100uM_ABA_Mutants__P Parameter: Tissue Value: Whole Plant
  misc_feature: MA Experiment 20000574 PARAMETER Experiment Name: At_100uM_ABA_Mutants__P Parameter: Treatment Value: None
  misc_feature: MA Experiment ID: 20000575 Result: Down-regulated in Transcription
  misc_feature: MA Experiment 20000575 PARAMETER Experiment Name: At_100uM_ABA_Mutants__P Parameter: Organism Value: A. thaliana
  misc_feature: MA Experiment 20000575 PARAMETER Experiment Name: At_100uM_ABA_Mutants__P Parameter: Plant Line Value: CS22
  misc_feature: MA Experiment 20000575 PARAMETER Experiment Name: At_100uM_ABA_Mutants__P Parameter: Timepoint (hr) Value: 6
  misc_feature: MA Experiment 20000575 PARAMETER Experiment Name: At_100uM_ABA_Mutants__P Parameter: Tissue Value: Whole Plant
  misc_feature: MA Experiment 20000575 PARAMETER Experiment Name: At_100uM_ABA_Mutants__P Parameter: Treatment Value: 1uM ABA vs. No Treatment
  misc_feature: MA Experiment ID: 20000576 Result: Down-regulated in Transcription
  misc_feature: MA Experiment 20000576 PARAMETER Experiment Name: At_100uM_ABA_Mutants__P Parameter: Organism Value: A. thaliana
  misc_feature: MA Experiment 20000576 PARAMETER Experiment Name: At_100uM_ABA_Mutants__P Parameter: Plant Line Value: CS23
  misc_feature: MA Experiment 20000576 PARAMETER Experiment Name: At_100uM_ABA_Mutants__P Parameter: Timepoint (hr) Value: 6
  misc_feature: MA Experiment 20000576 PARAMETER Experiment Name: At_100uM_ABA_Mutants__P Parameter: Tissue Value: Whole Plant
  misc_feature: MA Experiment 20000576 PARAMETER Experiment Name: At_100uM_ABA_Mutants__P Parameter: Treatment Value: 1uM ABA vs. No Treatment
  misc_feature: MA Experiment ID: 20000709 Result: Up-regulated in Transcription
  misc_feature: MA Experiment 20000709 PARAMETER Experiment Name: At_15mM_NH4NO3_L-to-H_P Parameter: Age (hr) Value: 14
  misc_feature: MA Experiment 20000709 PARAMETER Experiment Name: At_15mM_NH4NO3_L-to-H_P Parameter: Organism Value: A. thaliana
  misc_feature: MA Experiment 20000709 PARAMETER Experiment Name: At_15mM_NH4NO3_L-to-H_P Parameter: Plant Line Value: WS
  misc_feature: MA Experiment 20000709 PARAMETER Experiment Name: At_15mM_NH4NO3_L-to-H_P Parameter: Timepoint (hr) Value: 4
  misc_feature: MA Experiment 20000709 PARAMETER Experiment Name: At_15mM_NH4NO3_L-to-H_P Parameter: Tissue Value: Aerial
  misc_feature: MA Experiment 20000709 PARAMETER Experiment Name: At_15mM_NH4NO3_L-to-H_P Parameter: Treatment Value: 15mM NH4NO3 vs. 30mM Mannitol
  misc_feature: MA Experiment ID: 20000794 Result: Down-regulated in Transcription
  misc_feature: MA Experiment 20000794 PARAMETER Experiment Name: At_Petals_P Parameter: Age (day) Value: 23-25 days
  misc_feature: MA Experiment 20000794 PARAMETER Experiment Name: At_Petals_P Parameter: Plant Line Value: WS
  misc_feature: MA Experiment 20000794 PARAMETER Experiment Name: At_Petals_P Parameter: Tissue Value: Petals vs. Whole plant
  misc_feature: MA Experiment ID: 20001247 Result: Up-regulated in Transcription
  misc_feature: MA Experiment 20001247 PARAMETER Experiment Name: At_Far-red-induction_P Parameter: Age (day) Value: 7
  misc_feature: MA Experiment 20001247 PARAMETER Experiment Name: At_Far-red-induction_P Parameter: Light Value: Far-red vs. White
  misc_feature: MA Experiment 20001247 PARAMETER Experiment Name: At_Far-red-induction_P Parameter: Organism Value: A. thaliana
  misc_feature: MA Experiment 20001247 PARAMETER Experiment Name: At_Far-red-induction_P Parameter: Plant Line Value: Columbia
  misc_feature: MA Experiment 20001247 PARAMETER Experiment Name: At_Far-red-induction_P Parameter: Timepoint (hr) Value: 1
  misc_feature: MA Experiment 20001247 PARAMETER Experiment Name: At_Far-red-induction_P Parameter: Tissue Value: Whole Plant
  misc_feature: MA Experiment ID: 20001248 Result: Up-regulated in Transcription
  misc_feature: MA Experiment 20001248 PARAMETER Experiment Name: At_Far-red-induction_P Parameter: Age (day) Value: 7
  misc_feature: MA Experiment 20001248 PARAMETER Experiment Name: At_Far-red-induction_P Parameter: Light Value: Far-red vs. White
  misc_feature: MA Experiment 20001248 PARAMETER Experiment Name: At_Far-red-induction_P Parameter: Organism Value: A. thaliana
  misc_feature: MA Experiment 20001248 PARAMETER Experiment Name: At_Far-red-induction_P Parameter: Plant Line Value: Columbia
  misc_feature: MA Experiment 20001248 PARAMETER Experiment Name: At_Far-red-induction_P Parameter: Timepoint (hr) Value: 4
  misc_feature: MA Experiment 20001248 PARAMETER Experiment Name: At_Far-red-induction_P Parameter: Tissue Value: Whole Plant
  misc_feature: MA Experiment ID: 20001450 Result: Up-regulated in Transcription
  misc_feature: MA Experiment 20001450 PARAMETER Experiment Name: At_Far-red-induction_P Parameter: Age (day) Value: 7
  misc_feature: MA Experiment 20001450 PARAMETER Experiment Name: At_Far-red-induction_P Parameter: Light Value: Far-red vs. White
  misc_feature: MA Experiment 20001450 PARAMETER Experiment Name: At_Far-red-induction_P Parameter: Organism Value: A. thaliana
  misc_feature: MA Experiment 20001450 PARAMETER Experiment Name: At_Far-red-induction_P Parameter: Plant Line Value: Columbia
  misc_feature: MA Experiment 20001450 PARAMETER Experiment Name: At_Far-red-induction_P Parameter: Timepoint (hr) Value: 8
  misc_feature: MA Experiment 20001450 PARAMETER Experiment Name: At_Far-red-induction_P Parameter: Tissue Value: Whole Plant
  misc_feature: MA Experiment ID: 20001451 Result: Up-regulated in Transcription
  misc_feature: MA Experiment 20001451 PARAMETER Experiment Name: At_Far-red-induction_P Parameter: Age (day) Value: 7
  misc_feature: MA Experiment 20001451 PARAMETER Experiment Name: At_Far-red-induction_P Parameter: Light Value: Far-red vs. White
  misc_feature: MA Experiment 20001451 PARAMETER Experiment Name: At_Far-red-induction_P Parameter: Organism Value: A. thaliana
  misc_feature: MA Experiment 20001451 PARAMETER Experiment Name: At_Far-red-induction_P Parameter: Plant Line Value: Columbia
  misc_feature: MA Experiment 20001451 PARAMETER Experiment Name: At_Far-red-induction_P Parameter: Timepoint (hr) Value: 24
  misc_feature: MA Experiment 20001451 PARAMETER Experiment Name: At_Far-red-induction_P Parameter: Tissue Value: Whole Plant
  misc_feature: MA Experiment ID: 20001503 Result: Down-regulated in Transcription
  misc_feature: MA Experiment 20001503 PARAMETER Experiment Name: At_Far-red-enriched_P Parameter: Age (day) Value: 7
  misc_feature: MA Experiment 20001503 PARAMETER Experiment Name: At_Far-red-enriched_P Parameter: Light Value: Far-red enriched vs. White
  misc_feature: MA Experiment 20001503 PARAMETER Experiment Name: At_Far-red-enriched_P Parameter: Organism Value: A. thaliana
  misc_feature: MA Experiment 20001503 PARAMETER Experiment Name: At_Far-red-enriched_P Parameter: Plant Line Value: Columbia
  misc_feature: MA Experiment 20001503 PARAMETER Experiment Name: At_Far-red-enriched_P Parameter: Timepoint (day) Value: 3
  misc_feature: MA Experiment 20001503 PARAMETER Experiment Name: At_Far-red-enriched_P Parameter: Tissue Value: Whole Plant
  misc_feature: MA Experiment ID: 20001504 Result: Down-regulated in Transcription
  misc_feature: MA Experiment 20001504 PARAMETER Experiment Name: At_Far-red-enriched_P Parameter: Age (day) Value: 10
  misc_feature: MA Experiment 20001504 PARAMETER Experiment Name: At_Far-red-enriched_P Parameter: Light Value: Far-red enriched vs. White
  misc_feature: MA Experiment 20001504 PARAMETER Experiment Name: At_Far-red-enriched_P Parameter: Organism Value: A. thaliana
  misc_feature: MA Experiment 20001504 PARAMETER Experiment Name: At_Far-red-enriched_P Parameter: Plant Line Value: Columbia
  misc_feature: MA Experiment 20001504 PARAMETER Experiment Name: At_Far-red-enriched_P Parameter: Timepoint (day) Value: 6
  misc_feature: MA Experiment 20001504 PARAMETER Experiment Name: At_Far-red-enriched_P Parameter: Tissue Value: Whole Plant
  misc_feature: MA Experiment ID: 20001556 Result: Down-regulated in Transcription
  misc_feature: MA Experiment 20001556 PARAMETER Experiment Name: At_Drought_Soil_Dry_P Parameter: Age (day) Value: 26
  misc_feature: MA Experiment 20001556 PARAMETER Experiment Name: At_Drought_Soil_Dry_P Parameter: Organism Value: A. thaliana
  misc_feature: MA Experiment 20001556 PARAMETER Experiment Name: At_Drought_Soil_Dry_P Parameter: Plant Line Value: WS
  misc_feature: MA Experiment 20001556 PARAMETER Experiment Name: At_Drought_Soil_Dry_P Parameter: Post Timepoint (hr) Value: None
  misc_feature: MA Experiment 20001556 PARAMETER Experiment Name: At_Drought_Soil_Dry_P Parameter: Post-Treatment Value: None
  misc_feature: MA Experiment 20001556 PARAMETER Experiment Name: At_Drought_Soil_Dry_P Parameter: Timepoint (day) Value: 12
  misc_feature: MA Experiment 20001556 PARAMETER Experiment Name: At_Drought_Soil_Dry_P Parameter: Treatment Value: Drought vs. No Drought
  misc_feature: MA Experiment ID: 20001557 Result: Down-regulated in Transcription
  misc_feature: MA Experiment 20001557 PARAMETER Experiment Name: At_Drought_Soil_Dry_P Parameter: Age (day) Value: 27
  misc_feature: MA Experiment 20001557 PARAMETER Experiment Name: At_Drought_Soil_Dry_P Parameter: Organism Value: A. thaliana
  misc_feature: MA Experiment 20001557 PARAMETER Experiment Name: At_Drought_Soil_Dry_P Parameter: Plant Line Value: WS
  misc_feature: MA Experiment 20001557 PARAMETER Experiment Name: At_Drought_Soil_Dry_P Parameter: Post Timepoint (hr) Value: 3
  misc_feature: MA Experiment 20001557 PARAMETER Experiment Name: At_Drought_Soil_Dry_P Parameter: Post-Treatment Value: Re-Water vs. No Drought
  misc_feature: MA Experiment 20001557 PARAMETER Experiment Name: At_Drought_Soil_Dry_P Parameter: Timepoint (day) Value: 13
  misc_feature: MA Experiment 20001557 PARAMETER Experiment Name: At_Drought_Soil_Dry_P Parameter: Treatment Value: Drought vs. No Drought
  misc_feature: MA Experiment ID: 20001558 Result: Down-regulated in Transcription
  misc_feature: MA Experiment 20001558 PARAMETER Experiment Name: At_Drought_Soil_Dry_P Parameter: Age (day) Value: 27
  misc_feature: MA Experiment 20001558 PARAMETER Experiment Name: At_Drought_Soil_Dry_P Parameter: Organism Value: A. thaliana
  misc_feature: MA Experiment 20001558 PARAMETER Experiment Name: At_Drought_Soil_Dry_P Parameter: Plant Line Value: WS
  misc_feature: MA Experiment 20001558 PARAMETER Experiment Name: At_Drought_Soil_Dry_P Parameter: Post Timepoint (hr) Value: 6
  misc_feature: MA Experiment 20001558 PARAMETER Experiment Name: At_Drought_Soil_Dry_P Parameter: Post-Treatment Value: Re-Water vs. No Drought
  misc_feature: MA Experiment 20001558 PARAMETER Experiment Name: At_Drought_Soil_Dry_P Parameter: Timepoint (day) Value: 13
  misc_feature: MA Experiment 20001558 PARAMETER Experiment Name: At_Drought_Soil_Dry_P Parameter: Treatment Value: Drought vs. No Drought
  misc_feature: MA Experiment ID: 20001759 Result: Up-regulated in Transcription
  misc_feature: MA Experiment 20001759 PARAMETER Experiment Name: At_50mM_NH4NO3_L-to-H_P Parameter: Timepoint (hr) Value: 1
  misc_feature: MA Experiment 20001759 PARAMETER Experiment Name: At_50mM_NH4NO3_L-to-H_P Parameter: Tissue Value: Siliques
  misc_feature: MA Experiment 20001759 PARAMETER Experiment Name: At_50mM_NH4NO3_L-to-H_P Parameter: Treatment Value: 50mM NH4NO3 vs 100mM Mannitol
  misc_feature: MA Experiment ID: 20001761 Result: Up-regulated in Transcription
  misc_feature: MA Experiment 20001761 PARAMETER Experiment Name: At_50mM_NH4NO3_L-to-H_P Parameter: Timepoint (hr) Value: 4
  misc_feature: MA Experiment 20001761 PARAMETER Experiment Name: At_50mM_NH4NO3_L-to-H_P Parameter: Tissue Value: Siliques
  misc_feature: MA Experiment 20001761 PARAMETER Experiment Name: At_50mM_NH4NO3_L-to-H_P Parameter: Treatment Value: 50mM NH4NO3 vs 100mM Mannitol
  misc_feature: MA Experiment ID: 20001768 Result: Down-regulated in Transcription
  misc_feature: MA Experiment 20001768 PARAMETER Experiment Name: At_Far-red-enriched-adult_P Parameter: Age (day) Value: 28
  misc_feature: MA Experiment 20001768 PARAMETER Experiment Name: At_Far-red-enriched-adult_P Parameter: Light Value: Far-red enriched vs. White
  misc_feature: MA Experiment 20001768 PARAMETER Experiment Name: At_Far-red-enriched-adult_P Parameter: Organism Value: A. thaliana
  misc_feature: MA Experiment 20001768 PARAMETER Experiment Name: At_Far-red-enriched-adult_P Parameter: Plant Line Value: Columbia
  misc_feature: MA Experiment 20001768 PARAMETER Experiment Name: At_Far-red-enriched-adult_P Parameter: Timepoint (hr) Value: 1
  misc_feature: MA Experiment 20001768 PARAMETER Experiment Name: At_Far-red-enriched-adult_P Parameter: Tissue Value: Aerial
  misc_feature: MA Experiment ID: 20001770 Result: Down-regulated in Transcription
  misc_feature: MA Experiment 20001770 PARAMETER Experiment Name: At_Far-red-enriched-adult_P Parameter: Age (day) Value: 28
  misc_feature: MA Experiment 20001770 PARAMETER Experiment Name: At_Far-red-enriched-adult_P Parameter: Light Value: Far-red enriched vs. White
  misc_feature: MA Experiment 20001770 PARAMETER Experiment Name: At_Far-red-enriched-adult_P Parameter: Organism Value: A. thaliana
  misc_feature: MA Experiment 20001770 PARAMETER Experiment Name: At_Far-red-enriched-adult_P Parameter: Plant Line Value: Columbia
  misc_feature: MA Experiment 20001770 PARAMETER Experiment Name: At_Far-red-enriched-adult_P Parameter: Timepoint (hr) Value: 8
  misc_feature: MA Experiment 20001770 PARAMETER Experiment Name: At_Far-red-enriched-adult_P Parameter: Tissue Value: Aerial
tggacatcaaaaacacgaatatcgatagtacacttctacgtgcaattttctcctttctcttcctggacatctgtctgtttattacattttcttgtaatctctttttggggttttacaatatctatcccctaaagtttcggaaaattctgtttttctgttctcattcttcgtgatctttttcactttcttcaaaaaaaaaacatgtgtggaatacttgccgtgttaggatgttccgatgattctcaggccaagagagttcgtgttcttgagctttctcgcagattgaggcacagaggacctgactggagtggtttatatcagaacggagataattacttggcccatcaacgtcttgccgtcatcgatcctgcttccggtgatcaacctcttttcaacgaggacaagaccattgttgtcacggtgaacggagagatttataaccatgaggagctgagaaaacgtctgaagaatcacaagttccgtactggtagtgattgtgaagtcattgctcacttgtacgaggagtatggtgtggattttgttgatatgttggatggaatattctcctttgtgttgctcgacacacgagataactctttcatggtggctcgtgatgcgattggtgtcacttcgctctacattggttggggactagacggatctgtgtggatatcttcagagatgaaaggcctaaacgatgactgtgagcatttcgaaacgtttcctccaggtcatttttattcaagcaaattaggagggtttaagcaatggtataatcctccttggttcaatgaatctgttccttcaacgccttatgagcctcttgcgataagacgcgcctttgaaaacgctgtgattaagcggttgatgactgatgttccatttggagttttgctctctggtggtcttgattcttcccttgttgcctccatcactgcacgtcacttggccggtactaaggcggctaagcaatggggtcctcagctccattccttttgcgttggtcttgagggctcaccggacttgaaggcagggaaagaggtggcggaatatttggggacggtgcaccacgagttccacttctcggtgcaggacgggattgatgcgatagaggatgtgatttaccatgttgagacctatgatgtgacgactatcagagcgagcacaccgatgttcttgatgtcccggaaaatcaagtctctaggggtcaagatggttctctccggcgaaggtgcggacgagatctttggagggtacctctatttccacaaggcacctaacaagaaagagtttcaccaagaaacttgtcgcaagatcaaggctcttcacaagtatgactgtctaagagccaacaaatctacctctgcctttggactagaggcacgtgttcctttccttgacaaagacttcatcaacacagctatgtctctcgaccctgaatccaagatgatcaagccagaggaaggaaggatcgagaaatgggttctaaggagagcctttgacgacgaagaacgtccttatctaccaaaacacattctctacagacagaaagaacagttcagtgatggtgttggctacagttggatcgatggcctgaaagatcacgctgctcaaaatgtcaatgacaagatgatgtcgaacgcggggcatatcttccctcacaacactccaaacactaaagaagcttactactacagaatgatctttgaaaggttcttcccgcagaactctgcgagactaacggttcctggaggtgccaccgtggcttgttcgactgcaaaggcagtggagtgggatgcaagctggtccaacaatatggatccatcaggaagagccgctatcggagttcacctttcggcctacgatggcaagaacgtggcattgaccataccaccacttaaggcaattgacaacatgccgatgatgatgggtcaaggagttgtgattcagtcataacttcgaaggagaaatggatgaaatatgtgttatatcttcccaatgggtgaagtgttttgtatgattttaaaaataagaatgtgatcctttttttttcctatgaagatctgaatgtataatctatcttgtaaaaatttgtttctttgtaagatttgaatgtaccgcttttacgtagatcgatgtacatcaatcttataagtttcaattatgg

SEQ ID NO: 35014 - protein, 584 aa, Arabidopsis thaliana
  peptide (1)..(584): Ceres Seq. ID no. 13492887
  misc_feature (193)..(516): Pfam Name: Asparagine synthase Pfam Description: Asparagine synthase
  misc_feature (1)..(584): Homolog of NCBI NO: 2522320 NR Description: asparagine synthetase [Medicago sativa]
  misc_feature (1)..(584): Homolog of NCBI NO: 28394774 NR Description: asparagine synthetase [Securigera parviflora]
  misc_feature (1)..(576): Homolog of NCBI NO: 6049841 NR Description: asparagine synthetase [Helianthus annuus]
  misc_feature (1)..(584): Homolog of NCBI NO: 3821280 NR Description: asparagine synthetase type II [Phaseolus vulgaris]
  misc_feature (1)..(584): Homolog of NCBI NO: 3132675 NR Description: asparagine synthetase [Elaeagnus umbellata]
  misc_feature (1)..(508): Homolog of NCBI NO: 30692849 NR Description: glutamine-dependent asparagine synthetase
  misc_feature (1)..(584): Homolog of NCBI NO: 1351988 NR Description: Asparagine synthetase
  misc_feature (1)..(584): Homolog of NCBI NO: 11136554 NR Description: asparagine synthetase [Raphanus sativus]
MCGILAVLGCSDDSQAKRVRVLELSRRLRHRGPDWSGLYQNGDNYLAHQRLAVIDPASGDQPLFNEDKTIVVTVNGEIYNHEELRKRLKNHKFRTGSDCEVIAHLYEEYGVDFVDMLDGIFSFVLLDTRDNSFMVARDAIGVTSLYIGWGLDGSVWISSEMKGLNDDCEHFETFPPGHFYSSKLGGFKQWYNPPWFNESVPSTPYEPLAIRRAFENAVIKRLMTDVPFGVLLSGGLDSSLVASITARHLAGTKAAKQWGPQLHSFCVGLEGSPDLKAGKEVAEYLGTVHHEFHFSVQDGIDAIEDVIYHVETYDVTTIRASTPMFLMSRKIKSLGVKMVLSGEGADEIFGGYLYFHKAPNKKEFHQETCRKIKALHKYDCLRANKSTSAFGLEARVPFLDKDFINTAMSLDPESKMIKPEEGRIEKWVLRRAFDDEERPYLPKHILYRQKEQFSDGVGYSWIDGLKDHAAQNVNDKMMSNAGHIFPHNTPNTKEAYYYRMIFERFFPQNSARLTVPGGATVACSTAKAVEWDASWSNNMDPSGRAAIGVHLSAYDGKNVALTIPPLKAIDNMPMMMGQGVVIQS

SEQ ID NO: 35015 - protein, 469 aa, Arabidopsis thaliana
  peptide (1)..(469): Ceres Seq. ID no. 13492888
  misc_feature (78)..(401): Pfam Name: Asparagine synthase Pfam Description: Asparagine synthase
  misc_feature (1)..(469): Homolog of NCBI NO: 2522320 NR Description: asparagine synthetase [Medicago sativa]
  misc_feature (1)..(469): Homolog of NCBI NO: 28394774 NR Description: asparagine synthetase [Securigera parviflora]
  misc_feature (1)..(461): Homolog of NCBI NO: 6049841 NR Description: asparagine synthetase [Helianthus annuus]
  misc_feature (1)..(469): Homolog of NCBI NO: 3821280 NR Description: asparagine synthetase type II [Phaseolus vulgaris]
  misc_feature (1)..(469): Homolog of NCBI NO: 3132675 NR Description: asparagine synthetase [Elaeagnus umbellata]
  misc_feature (1)..(393): Homolog of NCBI NO: 30692849 NR Description: glutamine-dependent asparagine synthetase
  misc_feature (1)..(469): Homolog of NCBI NO: 1351988 NR Description: Asparagine synthetase
  misc_feature (1)..(469): Homolog of NCBI NO: 11136554 NR Description: asparagine synthetase [Raphanus sativus]
MLDGIFSFVLLDTRDNSFMVARDAIGVTSLYIGWGLDGSVWISSEMKGLNDDCEHFETFPPGHFYSSKLGGFKQWYNPPWFNESVPSTPYEPLAIRRAFENAVIKRLMTDVPFGVLLSGGLDSSLVASITARHLAGTKAAKQWGPQLHSFCVGLEGSPDLKAGKEVAEYLGTVHHEFHFSVQDGIDAIEDVIYHVETYDVTTIRASTPMFLMSRKIKSLGVKMVLSGEGADEIFGGYLYFHKAPNKKEFHQETCRKIKALHKYDCLRANKSTSAFGLEARVPFLDKDFINTAMSLDPESKMIKPEEGRIEKWVLRRAFDDEERPYLPKHILYRQKEQFSDGVGYSWIDGLKDHAAQNVNDKMMSNAGHIFPHNTPNTKEAYYYRMIFERFFPQNSARLTVPGGATVACSTAKAVEWDASWSNNMDPSGRAAIGVHLSAYDGKNVALTIPPLKAIDNMPMMMGQGVVIQS

SEQ ID NO: 35016 - protein, 451 aa, Arabidopsis thaliana
  peptide (1)..(451): Ceres Seq. ID no. 13492889
  misc_feature (60)..(383): Pfam Name: Asparagine synthase Pfam Description: Asparagine synthase
  misc_feature (1)..(451): Homolog of NCBI NO: 2522320 NR Description: asparagine synthetase [Medicago sativa]
  misc_feature (1)..(451): Homolog of NCBI NO: 28394774 NR Description: asparagine synthetase [Securigera parviflora]
  misc_feature (1)..(443): Homolog of NCBI NO: 6049841 NR Description: asparagine synthetase [Helianthus annuus]
  misc_feature (1)..(451): Homolog of NCBI NO: 3821280 NR Description: asparagine synthetase type II [Phaseolus vulgaris]
  misc_feature (1)..(451): Homolog of NCBI NO: 3132675 NR Description: asparagine synthetase [Elaeagnus umbellata]
  misc_feature (1)..(375): Homolog of NCBI NO: 30692849 NR Description: glutamine-dependent asparagine synthetase
  misc_feature (1)..(451): Homolog of NCBI NO: 1351988 NR Description: Asparagine synthetase
  misc_feature (1)..(451): Homolog of NCBI NO: 11136554 NR Description: asparagine synthetase [Raphanus sativus]
MVARDAIGVTSLYIGWGLDGSVWISSEMKGLNDDCEHFETFPPGHFYSSKLGGFKQWYNPPWFNESVPSTPYEPLAIRRAFENAVIKRLMTDVPFGVLLSGGLDSSLVASITARHLAGTKAAKQWGPQLHSFCVGLEGSPDLKAGKEVAEYLGTVHHEFHFSVQDGIDAIEDVIYHVETYDVTTIRASTPMFLMSRKIKSLGVKMVLSGEGADEIFGGYLYFHKAPNKKEFHQETCRKIKALHKYDCLRANKSTSAFGLEARVPFLDKDFINTAMSLDPESKMIKPEEGRIEKWVLRRAFDDEERPYLPKHILYRQKEQFSDGVGYSWIDGLKDHAAQNVNDKMMSNAGHIFPHNTPNTKEAYYYRMIFERFFPQNSARLTVPGGATVACSTAKAVEWDASWSNNMDPSGRAAIGVHLSAYDGKNVALTIPPLKAIDNMPMMMGQGVVIQS

SEQ ID NO: 35017 - DNA, 912 bp, Arabidopsis thaliana
  misc_feature (1)..(912): Ceres Seq. ID no. 13488171
  misc_feature: MA Experiment ID: 108577 Result: Down-regulated in Transcription
  misc_feature: MA Experiment 108577 PARAMETER Experiment Name: At_42deg_Heat_cDNA_P Parameter: Temperature (deg C) Value: 42 vs. 22
  misc_feature: MA Experiment 108577 PARAMETER Experiment Name: At_42deg_Heat_cDNA_P Parameter: Timepoint (hr) Value: 6
  misc_feature: MA Experiment 108577 PARAMETER Experiment Name: At_42deg_Heat_cDNA_P Parameter: Tissue Value: Aerial
  misc_feature: MA Experiment ID: 108579 Result: Up-regulated in Transcription
  misc_feature: MA Experiment 108579 PARAMETER Experiment Name: At_4deg_Cold_cDNA_P Parameter: Temperature (deg C) Value: 4 vs. 22
  misc_feature: MA Experiment 108579 PARAMETER Experiment Name: At_4deg_Cold_cDNA_P Parameter: Timepoint (hr) Value: 6
  misc_feature: MA Experiment 108579 PARAMETER Experiment Name: At_4deg_Cold_cDNA_P Parameter: Tissue Value: Aerial
  misc_feature: MA Experiment ID: 108595 Result: Down-regulated in Transcription
  misc_feature: MA Experiment 108595 PARAMETER Experiment Name: At_Ler-pi_Ovule_cDNA_P Parameter: Plant Line Value: null
  misc_feature: MA Experiment ID: 20000179 Result: Up-regulated in Transcription
  misc_feature: MA Experiment 20000179 PARAMETER Experiment Name: At_Germinating_Seeds_P Parameter: Age (hr) Value: 6 vs. 0
  misc_feature: MA Experiment 20000179 PARAMETER Experiment Name: At_Germinating_Seeds_P Parameter: Tissue Value: Germinating Seeds
  misc_feature: MA Experiment ID: 20000185 Result: Down-regulated in Transcription
  misc_feature: MA Experiment 20000185 PARAMETER Experiment Name: At_Roots__P Parameter: Age (day) Value: 7 vs. 21
  misc_feature: MA Experiment 20000185 PARAMETER Experiment Name: At_Roots__P Parameter: Organism Value: A. thaliana
  misc_feature: MA Experiment 20000185 PARAMETER Experiment Name: At_Roots__P Parameter: Tissue Value: Roots vs. Whole Plant
  misc_feature: MA Experiment ID: 20000437 Result: Down-regulated in Transcription
  misc_feature: MA Experiment 20000437 PARAMETER Experiment Name: At_Drought_P Parameter: Age (day) Value: 8
  misc_feature: MA Experiment 20000437 PARAMETER Experiment Name: At_Drought_P Parameter: Organism Value: A. thaliana
  misc_feature: MA Experiment 20000437 PARAMETER Experiment Name: At_Drought_P Parameter: Plant Line Value: WS
  misc_feature: MA Experiment 20000437 PARAMETER Experiment Name: At_Drought_P Parameter: Timepoint (hr) Value: 24
  misc_feature: MA Experiment 20000437 PARAMETER Experiment Name: At_Drought_P Parameter: Tissue Value: Whole Plant
  misc_feature: MA Experiment 20000437 PARAMETER Experiment Name: At_Drought_P Parameter: Treatment Value: Drought vs. No Drought
  misc_feature: MA Experiment ID: 20000439 Result: Down-regulated in Transcription
  misc_feature: MA Experiment 20000439 PARAMETER Experiment Name: At_Roots__P Parameter: Age (day) Value: 14 vs. 21
  misc_feature: MA Experiment 20000439 PARAMETER Experiment Name: At_Roots__P Parameter: Organism Value: A. thaliana
  misc_feature: MA Experiment 20000439 PARAMETER Experiment Name: At_Roots__P Parameter: Tissue Value: Roots vs. Whole Plant
  misc_feature: MA Experiment ID: 20000495 Result: Down-regulated in Transcription
  misc_feature: MA Experiment 20000495 PARAMETER Experiment Name: At_Guard_Cells_P Parameter: Harvest Date Value: 8/2/2002
  misc_feature: MA Experiment 20000495 PARAMETER Experiment Name: At_Guard_Cells_P Parameter: Organism Value: A. thaliana
  misc_feature: MA Experiment 20000495 PARAMETER Experiment Name: At_Guard_Cells_P Parameter: Tissue Value: Guard Cells vs. Leaves
  misc_feature: MA Experiment ID: 20001905 Result: Down-regulated in Transcription
  misc_feature: MA Experiment 20001905 PARAMETER Experiment Name: At_Drought_Reproduction_P Parameter: Age (day) Value: 40
  misc_feature: MA Experiment 20001905 PARAMETER Experiment Name: At_Drought_Reproduction_P Parameter: Organism Value: A. thaliana
  misc_feature: MA Experiment 20001905 PARAMETER Experiment Name: At_Drought_Reproduction_P Parameter: Plant Line Value: WS
  misc_feature: MA Experiment 20001905 PARAMETER Experiment Name: At_Drought_Reproduction_P Parameter: Timepoint (day) Value: 10
  misc_feature: MA Experiment 20001905 PARAMETER Experiment Name: At_Drought_Reproduction_P Parameter: Tissue Value: Rosettes
  misc_feature: MA Experiment 20001905 PARAMETER Experiment Name: At_Drought_Reproduction_P Parameter: Treatment Value: Drought vs. No Drought
  misc_feature: MA Experiment ID: 20001911 Result: Down-regulated in Transcription
  misc_feature: MA Experiment 20001911 PARAMETER Experiment Name: At_Drought_Reproduction_P Parameter: Age (day) Value: 40
  misc_feature: MA Experiment 20001911 PARAMETER Experiment Name: At_Drought_Reproduction_P Parameter: Organism Value: A. thaliana
  misc_feature: MA Experiment 20001911 PARAMETER Experiment Name: At_Drought_Reproduction_P Parameter: Plant Line Value: WS
  misc_feature: MA Experiment 20001911 PARAMETER Experiment Name: At_Drought_Reproduction_P Parameter: Timepoint (day) Value: 10
  misc_feature: MA Experiment 20001911 PARAMETER Experiment Name: At_Drought_Reproduction_P Parameter: Tissue Value: Flowers
  misc_feature: MA Experiment 20001911 PARAMETER Experiment Name: At_Drought_Reproduction_P Parameter: Treatment Value: Drought vs. No Drought
aatttttcatcttcttcgagtgattagtacagattagggttttattcgttattattgtctatattactccttgattgtggtcgatgacctcgctacttcttctcagaacgcttccgcttctccgcaacggatttctcaaccatcgtcatcaagttggtatcgtagctggtggaattctcagtcaccgtcggcgtttgttgtgttctcttgctgatagaccacagttttacgagaataatgattctgtttctccggtggagggatccggcgcggcggcgatgaacgtgacatcgcctgttgttgataatagctggcgttatgaagatcctgattatcggaaatggaagaatctagaggctgagattcttcgagatattgaacctatttctcttctcgctaaagaaattcttcattccgataggtatttggatggagaacgcttagattttgaggatgagaaaattgtcatggaaaagcttcttccttatcacccatattccaaagacaaaattggttgtggtcttgattttataatggttgatcggcatccacaattcaggcactcaagatgcctctttgttgtgagaacagatggtggatggatagatttctcgtaccaaaagtgtcttcgagcctatgttcgagataagtacccgtctcacgctgagaggtttattcgtgaacattttaagcgtgctagtagctaaaaatctgtataactgtcccactcatcatcacagcaaattctcataaatttttagctgaaataacacaatcagctatgaagctttgttgtacaaaatttataaattgctcaatctattggaagacttgaatgagttaggaaaatagtagttggttcagactgcagaacaatcaatttttgagaccgaaagtaattctagttatggc

SEQ ID NO: 35018 - protein, 207 aa, Arabidopsis thaliana
  peptide (1)..(207): Ceres Seq. ID no. 13488172
  misc_feature (90)..(203): Homolog of NCBI NO: 34905864 NR Description: similar to DNA-directed RNA polymerase subunit A'
  misc_feature (91)..(204): Homolog of NCBI NO: 15225617 NR Description: expressed protein [Arabidopsis thaliana]
  misc_feature (83)..(204): Homolog of NCBI NO: 6014934 NR Description: DCL PROTEIN, CHLOROPLAST PRECURSOR (DEFECTIVE
  misc_feature (80)..(204): Homolog of NCBI NO: 22330069 NR Description: defective chloroplasts and leaves (DCL) protein
  misc_feature (74)..(204): Homolog of NCBI NO: 18650724 NR Description: DCL protein [Coffea arabica]
  misc_feature (87)..(204): Homolog of NCBI NO: 34015211 NR Description: putative defective chloroplasts and leaves (DCL)
  misc_feature (1)..(207): Homolog of NCBI NO: 15232596 NR Description: expressed protein [Arabidopsis thaliana]
  misc_feature (90)..(203): Homolog of NCBI NO: 34905864 NR Description: similar to DNA-directed RNA polymerase subunit A'
  misc_feature (91)..(204): Homolog of NCBI NO: 15225617 NR Description: expressed protein [Arabidopsis thaliana]
  misc_feature (83)..(204): Homolog of NCBI NO: 6014934 NR Description: DCL PROTEIN, CHLOROPLAST PRECURSOR (DEFECTIVE
  misc_feature (80)..(204): Homolog of NCBI NO: 22330069 NR Description: defective chloroplasts and leaves (DCL) protein
  misc_feature (74)..(204): Homolog of NCBI NO: 18650724 NR Description: DCL protein [Coffea arabica]
  misc_feature (87)..(204): Homolog of NCBI NO: 34015211 NR Description: putative defective chloroplasts and leaves (DCL)
  misc_feature (1)..(207): Homolog of NCBI NO: 15232596 NR Description: expressed protein [Arabidopsis thaliana]
MTSLLLLRTLPLLRNGFLNHRHQVGIVAGGILSHRRRLLCSLADRPQFYENNDSVSPVEGSGAAAMNVTSPVVDNSWRYEDPDYRKWKNLEAEILRDIEPISLLAKEILHSDRYLDGERLDFEDEKIVMEKLLPYHPYSKDKIGCGLDFIMVDRHPQFRHSRCLFVVRTDGGWIDFSYQKCLRAYVRDKYPSHAERFIREHFKRASS

SEQ ID NO: 35019 - protein, 142 aa, Arabidopsis thaliana
  peptide (1)..(142): Ceres Seq. ID no. 13488173
  misc_feature (25)..(138): Homolog of NCBI NO: 34905864 NR Description: similar to DNA-directed RNA polymerase subunit A'
  misc_feature (26)..(139): Homolog of NCBI NO: 15225617 NR Description: expressed protein [Arabidopsis thaliana]
  misc_feature (18)..(139): Homolog of NCBI NO: 6014934 NR Description: DCL PROTEIN, CHLOROPLAST PRECURSOR (DEFECTIVE
  misc_feature (15)..(139): Homolog of NCBI NO: 22330069 NR Description: defective chloroplasts and leaves (DCL) protein
  misc_feature (9)..(139): Homolog of NCBI NO: 18650724 NR Description: DCL protein [Coffea arabica]
  misc_feature (22)..(139): Homolog of NCBI NO: 34015211 NR Description: putative defective chloroplasts and leaves (DCL)
  misc_feature (1)..(142): Homolog of NCBI NO: 15232596 NR Description: expressed protein [Arabidopsis thaliana]
  misc_feature (25)..(138): Homolog of NCBI NO: 34905864 NR Description: similar to DNA-directed RNA polymerase subunit A'
  misc_feature (26)..(139): Homolog of NCBI NO: 15225617 NR Description: expressed protein [Arabidopsis thaliana]
  misc_feature (18)..(139): Homolog of NCBI NO: 6014934 NR Description: DCL PROTEIN, CHLOROPLAST PRECURSOR (DEFECTIVE
  misc_feature (15)..(139): Homolog of NCBI NO: 22330069 NR Description: defective chloroplasts and leaves (DCL) protein
  misc_feature (9)..(139): Homolog of NCBI NO: 18650724 NR Description: DCL protein [Coffea arabica]
  misc_feature (22)..(139): Homolog of NCBI NO: 34015211 NR Description: putative defective chloroplasts and leaves (DCL)
  misc_feature (1)..(142): Homolog of NCBI NO: 15232596 NR Description: expressed protein [Arabidopsis thaliana]
MNVTSPVVDNSWRYEDPDYRKWKNLEAEILRDIEPISLLAKEILHSDRYLDGERLDFEDEKIVMEKLLPYHPYSKDKIGCGLDFIMVDRHPQFRHSRCLFVVRTDGGWIDFSYQKCLRAYVRDKYPSHAERFIREHFKRASS

SEQ ID NO: 35020 - DNA, 1158 bp, Arabidopsis thaliana
  misc_feature (1)..(1158): Ceres Seq. ID no. 12385478
  misc_feature: MA Experiment ID: 108488 Result: Down-regulated in Transcription
  misc_feature: MA Experiment ID: 108501 Result: Down-regulated in Transcription
  misc_feature: MA Experiment 108501 PARAMETER Experiment Name: At_ap2_floral_buds_cDNA_P Parameter: Plant Line Value: ap2 (Ler.)
  misc_feature: MA Experiment 108501 PARAMETER Experiment Name: At_ap2_floral_buds_cDNA_P Parameter: Tissue Value: Closed Flower
  misc_feature: MA Experiment ID: 108569 Result: Up-regulated in Transcription
  misc_feature: MA Experiment 108569 PARAMETER Experiment Name: At_0.001%_MeJA__cDNA_P Parameter: Timepoint (hr) Value: 6
  misc_feature: MA Experiment 108569 PARAMETER Experiment Name: At_0.001%_MeJA__cDNA_P Parameter: Tissue Value: Aerial
  misc_feature: MA Experiment 108569 PARAMETER Experiment Name: At_0.001%_MeJA__cDNA_P Parameter: Treatment Value: 0.001% MeJA vs. No Treatment
  misc_feature: MA Experiment ID: 108572 Result: Up-regulated in Transcription
  misc_feature: MA Experiment 108572 PARAMETER Experiment Name: At_Drought_cDNA_P Parameter: Timepoint (hr) Value: 1
  misc_feature: MA Experiment 108572 PARAMETER Experiment Name: At_Drought_cDNA_P Parameter: Tissue Value: Aerial
  misc_feature: MA Experiment 108572 PARAMETER Experiment Name: At_Drought_cDNA_P Parameter: Treatment Value: Drought vs. No Drought
  misc_feature: MA Experiment ID: 108573 Result: Up-regulated in Transcription
  misc_feature: MA Experiment 108573 PARAMETER Experiment Name: At_Drought_cDNA_P Parameter: Timepoint (hr) Value: 6
  misc_feature: MA Experiment 108573 PARAMETER Experiment Name: At_Drought_cDNA_P Parameter: Tissue Value: Aerial
  misc_feature: MA Experiment 108573 PARAMETER Experiment Name: At_Drought_cDNA_P Parameter: Treatment Value: Drought vs. No Drought
  misc_feature: MA Experiment ID: 20000069 Result: Up-regulated in Transcription
  misc_feature: MA Experiment 20000069 PARAMETER Experiment Name: At_100uM_ABA_Mutants_cDNA_P Parameter: Plant Line Value: CS23
  misc_feature: MA Experiment 20000069 PARAMETER Experiment Name: At_100uM_ABA_Mutants_cDNA_P Parameter: Timepoint (hr) Value: 6
  misc_feature: MA Experiment 20000069 PARAMETER Experiment Name: At_100uM_ABA_Mutants_cDNA_P Parameter: Tissue Value: Aerial
  misc_feature: MA Experiment 20000069 PARAMETER Experiment Name: At_100uM_ABA_Mutants_cDNA_P Parameter: Treatment Value: 100uM ABA vs. No Treatment
  misc_feature: MA Experiment ID: 20000071 Result: Up-regulated in Transcription
  misc_feature: MA Experiment 20000071 PARAMETER Experiment Name: At_100uM_ABA_Mutants_cDNA_P Parameter: Plant Line Value: CS8104
  misc_feature: MA Experiment 20000071 PARAMETER Experiment Name: At_100uM_ABA_Mutants_cDNA_P Parameter: Timepoint (hr) Value: 6
  misc_feature: MA Experiment 20000071 PARAMETER Experiment Name: At_100uM_ABA_Mutants_cDNA_P Parameter: Tissue Value: Aerial
  misc_feature: MA Experiment 20000071 PARAMETER Experiment Name: At_100uM_ABA_Mutants_cDNA_P Parameter: Treatment Value: 100uM ABA vs. No Treatment
  misc_feature: MA Experiment ID: 20000072 Result: Up-regulated in Transcription
  misc_feature: MA Experiment 20000072 PARAMETER Experiment Name: At_100uM_ABA_Mutants_cDNA_P Parameter: Plant Line Value: CS8105
  misc_feature: MA Experiment 20000072 PARAMETER Experiment Name: At_100uM_ABA_Mutants_cDNA_P Parameter: Timepoint (hr) Value: 6
  misc_feature: MA Experiment 20000072 PARAMETER Experiment Name: At_100uM_ABA_Mutants_cDNA_P Parameter: Tissue Value: Aerial
  misc_feature: MA Experiment 20000072 PARAMETER Experiment Name: At_100uM_ABA_Mutants_cDNA_P Parameter: Treatment Value: 100uM ABA vs. No Treatment
  misc_feature: MA Experiment ID: 20000086 Result: Up-regulated in Transcription
  misc_feature: MA Experiment 20000086 PARAMETER Experiment Name: At_100uM_ABA_Mutants_cDNA_P Parameter: Plant Line Value: CS22
  misc_feature: MA Experiment 20000086 PARAMETER Experiment Name: At_100uM_ABA_Mutants_cDNA_P Parameter: Timepoint (hr) Value: 6
  misc_feature: MA Experiment 20000086 PARAMETER Experiment Name: At_100uM_ABA_Mutants_cDNA_P Parameter: Tissue Value: Aerial
  misc_feature: MA Experiment 20000086 PARAMETER Experiment Name: At_100uM_ABA_Mutants_cDNA_P Parameter: Treatment Value: 100uM ABA vs. No Treatment
  misc_feature: MA Experiment ID: 20000087 Result: Up-regulated in Transcription
  misc_feature: MA Experiment 20000087 PARAMETER Experiment Name: At_100uM_ABA_Mutants_cDNA_P Parameter: Plant Line Value: WS
  misc_feature: MA Experiment 20000087 PARAMETER Experiment Name: At_100uM_ABA_Mutants_cDNA_P Parameter: Timepoint (hr) Value: 6
  misc_feature: MA Experiment 20000087 PARAMETER Experiment Name: At_100uM_ABA_Mutants_cDNA_P Parameter: Tissue Value: Aerial
  misc_feature: MA Experiment 20000087 PARAMETER Experiment Name: At_100uM_ABA_Mutants_cDNA_P Parameter: Treatment Value: 100uM ABA vs. No Treatment
  misc_feature: MA Experiment ID: 20000088 Result: Up-regulated in Transcription
  misc_feature: MA Experiment 20000088 PARAMETER Experiment Name: At_100uM_ABA_Mutants_cDNA_P Parameter: Plant Line Value: Landsberg
  misc_feature: MA Experiment 20000088 PARAMETER Experiment Name: At_100uM_ABA_Mutants_cDNA_P Parameter: Timepoint (hr) Value: 6
  misc_feature: MA Experiment 20000088 PARAMETER Experiment Name: At_100uM_ABA_Mutants_cDNA_P Parameter: Tissue Value: Aerial
  misc_feature: MA Experiment 20000088 PARAMETER Experiment Name: At_100uM_ABA_Mutants_cDNA_P Parameter: Treatment Value: 100uM ABA vs. No Treatment
  misc_feature: MA Experiment ID: 20000117 Result: Up-regulated in Transcription
  misc_feature: MA Experiment 20000117 PARAMETER Experiment Name: At_100uM_ABA_Mutants_cDNA_P Parameter: Plant Line Value: Columbia
  misc_feature: MA Experiment 20000117 PARAMETER Experiment Name: At_100uM_ABA_Mutants_cDNA_P Parameter: Timepoint (hr) Value: 6
  misc_feature: MA Experiment 20000117 PARAMETER Experiment Name: At_100uM_ABA_Mutants_cDNA_P Parameter: Tissue Value: Aerial
  misc_feature: MA Experiment 20000117 PARAMETER Experiment Name: At_100uM_ABA_Mutants_cDNA_P Parameter: Treatment Value: 100uM ABA vs. No Treatment
  misc_feature: MA Experiment ID: 20000224 Result: Down-regulated in Transcription
  misc_feature: MA Experiment ID: 20000235 Result: Up-regulated in Transcription
  misc_feature: MA Experiment 20000235 PARAMETER Experiment Name: At_Siliques_P Parameter: Age (day) Value: 21
  misc_feature: MA Experiment 20000235 PARAMETER Experiment Name: At_Siliques_P Parameter: Organism Value: A. thaliana
  misc_feature: MA Experiment 20000235 PARAMETER Experiment Name: At_Siliques_P Parameter: Plant Line Value: WS
  misc_feature: MA Experiment 20000235 PARAMETER Experiment Name: At_Siliques_P Parameter: Tissue Value: 5-10mm Siliques vs. Whole Plant
  misc_feature: MA Experiment ID: 20001905 Result: Up-regulated in Transcription
  misc_feature: MA Experiment 20001905 PARAMETER Experiment Name: At_Drought_Reproduction_P Parameter: Age (day) Value: 40
  misc_feature: MA Experiment 20001905 PARAMETER Experiment Name: At_Drought_Reproduction_P Parameter: Organism Value: A. thaliana
  misc_feature: MA Experiment 20001905 PARAMETER Experiment Name: At_Drought_Reproduction_P Parameter: Plant Line Value: WS
  misc_feature: MA Experiment 20001905 PARAMETER Experiment Name: At_Drought_Reproduction_P Parameter: Timepoint (day) Value: 10
  misc_feature: MA Experiment 20001905 PARAMETER Experiment Name: At_Drought_Reproduction_P Parameter: Tissue Value: Rosettes
  misc_feature: MA Experiment 20001905 PARAMETER Experiment Name: At_Drought_Reproduction_P Parameter: Treatment Value: Drought vs. No Drought
ataattttttaaaaagtcatggattatcatcttagggttttgttctctgtttctcttatctttgtgttcgtctctgtttcggtttgtggagacgaagatgtgttgatcaggcaagtggttgatgaaacagagccgaaagttttgtcatcggaggatcactttactctcttcaagaagaaattcggcaaggtttacggttccattgaggagcattattacagattctctgttttcaaagcaaatctcctgcgagcgatgcgtcaccagaagatggatccttctgctcgtcacggcgtaacgcagttttcggatctgactcgttctgagtttcggagaaagcatttaggggttaaaggtgggtttaagcttcctaaagacgctaatcaagccccgattctccctactcagaatcttccggaggagtttgattggagagatcgcggcgcggttactcccgtgaaaaaccagggatcttgtggttcttgctggagttttagcactacaggtgcccttgaaggtgctcacttcctcgctactggcaaactcgttagtctcagtgaacaacagctcgtcgattgtgatcacgagtgtgatccagaagaggaaggttcatgtgattctggttgtaacggtgggcttatgaacagtgcctttgaatacacgcttaaaaccggagggcttatgcgagagaaagattatccttacaccggtactgatggagggagctgcaagttagacaggtctaagatcgttgcctctgtctccaactttagtgttgtgtccatcaacgaagatcaaatagctgcaaaccttatcaaaaacggtcctctagctgtggcgatcaatgcagcttatatgcaaacctacattggaggagtctcgtgtccttacatatgctcgaggcggctcaaccacggtgtgttgttggtaggttatggctcggctgggttttctcaagcaaggttaaaggaaaaaccgtattggatcatcaagaactcgtggggtgagtcttggggtgagaatggtttctataagatatgtaaaggtcgtaacatttgcggtgttgacagtttggtctccaccgtcgctgctaccacttcttgagcttttcattattctgctgcaatgctatttaaagtctgtaaataaatgattaac

SEQ ID NO: 35021 - protein, 361 aa, Arabidopsis thaliana
  peptide (1)..(361): Ceres Seq. ID no. 12385479
  misc_feature (132)..(357): Pfam Name: Papain family cysteine protease Pfam Description: Papain family cysteine protease
  misc_feature (1)..(361): Homolog of NCBI NO: 7381221 NR Description: papain-like cysteine proteinase isoform II
  misc_feature (1)..(361): Homolog of NCBI NO: 7211743 NR Description: papain-like cysteine proteinase isoform II
  misc_feature (5)..(361): Homolog of NCBI NO: 7211745 NR Description: papain-like cysteine proteinase isoform III
  misc_feature (1)..(361): Homolog of NCBI NO: 7211741 NR Description: papain-like cysteine proteinase isoform I
  misc_feature (1)..(361): Homolog of NCBI NO: 7381219 NR Description: papain-like cysteine proteinase isoform I
  misc_feature (1)..(361): Homolog of NCBI NO: 21593213 NR Description: cysteine proteinase RD19A [Arabidopsis thaliana]
  misc_feature (1)..(361): Homolog of NCBI NO: 18420375 NR Description: cysteine proteinase RD19A
  misc_feature (1)..(361): Homolog of NCBI NO: 18141287 NR Description: senescence-associated cysteine protease [Brassica
  misc_feature (50)..(361): Homolog of NCBI NO: 516865 NR Description: putative thiol protease [Arabidopsis thaliana]
  misc_feature (1)..(361): Homolog of NCBI NO: 18399697 NR Description: cysteine proteinase
MDYHLRVLFSVSLIFVFVSVSVCGDEDVLIRQVVDETEPKVLSSEDHFTLFKKKFGKVYGSIEEHYYRFSVFKANLLRAMRHQKMDPSARHGVTQFSDLTRSEFRRKHLGVKGGFKLPKDANQAPILPTQNLPEEFDWRDRGAVTPVKNQGSCGSCWSFSTTGALEGAHFLATGKLVSLSEQQLVDCDHECDPEEEGSCDSGCNGGLMNSAFEYTLKTGGLMREKDYPYTGTDGGSCKLDRSKIVASVSNFSVVSINEDQIAANLIKNGPLAVAINAAYMQTYIGGVSCPYICSRRLNHGVLLVGYGSAGFSQARLKEKPYWIIKNSWGESWGENGFYKICKGRNICGVDSLVSTVAATTS

SEQ ID NO: 35022 - protein, 282 aa, Arabidopsis thaliana
  peptide (1)..(282): Ceres Seq. ID no. 12385480
  misc_feature (53)..(278): Pfam Name: Papain family cysteine protease Pfam Description: Papain family cysteine protease
  misc_feature (1)..(282): Homolog of NCBI NO: 7381221 NR Description: papain-like cysteine proteinase isoform II
  misc_feature (1)..(282): Homolog of NCBI NO: 7211743 NR Description: papain-like cysteine proteinase isoform II
  misc_feature (1)..(282): Homolog of NCBI NO: 7211745 NR Description: papain-like cysteine proteinase isoform III
  misc_feature (1)..(282): Homolog of NCBI NO: 7211741 NR Description: papain-like cysteine proteinase isoform I
  misc_feature (1)..(282): Homolog of NCBI NO: 7381219 NR Description: papain-like cysteine proteinase isoform I
  misc_feature (1)..(282): Homolog of NCBI NO: 21593213 NR Description: cysteine proteinase RD19A [Arabidopsis thaliana]
  misc_feature (1)..(282): Homolog of NCBI NO: 18420375 NR Description: cysteine proteinase RD19A
  misc_feature (1)..(282): Homolog of NCBI NO: 18141287 NR Description: senescence-associated cysteine protease [Brassica
  misc_feature (1)..(282): Homolog of NCBI NO: 516865 NR Description: putative thiol protease [Arabidopsis thaliana]
  misc_feature (1)..(282): Homolog of NCBI NO: 18399697 NR Description: cysteine proteinase
MRHQKMDPSARHGVTQFSDLTRSEFRRKHLGVKGGFKLPKDANQAPILPTQNLPEEFDWRDRGAVTPVKNQGSCGSCWSFSTTGALEGAHFLATGKLVSLSEQQLVDCDHECDPEEEGSCDSGCNGGLMNSAFEYTLKTGGLMREKDYPYTGTDGGSCKLDRSKIVASVSNFSVVSINEDQIAANLIKNGPLAVAINAAYMQTYIGGVSCPYICSRRLNHGVLLVGYGSAGFSQARLKEKPYWIIKNSWGESWGENGFYKICKGRNICGVDSLVSTVAATTS

SEQ ID NO: 35023 - protein, 277 aa, Arabidopsis thaliana
  peptide (1)..(277): Ceres Seq. ID no. 12385481
  misc_feature (48)..(273): Pfam Name: Papain family cysteine protease Pfam Description: Papain family cysteine protease
  misc_feature (1)..(277): Homolog of NCBI NO: 7381221 NR Description: papain-like cysteine proteinase isoform II
  misc_feature (1)..(277): Homolog of NCBI NO: 7211743 NR Description: papain-like cysteine proteinase isoform II
  misc_feature (1)..(277): Homolog of NCBI NO: 7211745 NR Description: papain-like cysteine proteinase isoform III
  misc_feature (1)..(277): Homolog of NCBI NO: 7211741 NR Description: papain-like cysteine proteinase isoform I
  misc_feature (1)..(277): Homolog of NCBI NO: 7381219 NR Description: papain-like cysteine proteinase isoform I
  misc_feature (1)..(277): Homolog of NCBI NO: 21593213 NR Description: cysteine proteinase RD19A [Arabidopsis thaliana]
  misc_feature (1)..(277): Homolog of NCBI NO: 18420375 NR Description: cysteine proteinase RD19A
  misc_feature (1)..(277): Homolog of NCBI NO: 18141287 NR Description: senescence-associated cysteine protease [Brassica
  misc_feature (1)..(277): Homolog of NCBI NO: 516865 NR Description: putative thiol protease [Arabidopsis thaliana]
  misc_feature (1)..(277): Homolog of NCBI NO: 18399697 NR Description: cysteine proteinase
MDPSARHGVTQFSDLTRSEFRRKHLGVKGGFKLPKDANQAPILPTQNLPEEFDWRDRGAVTPVKNQGSCGSCWSFSTTGALEGAHFLATGKLVSLSEQQLVDCDHECDPEEEGSCDSGCNGGLMNSAFEYTLKTGGLMREKDYPYTGTDGGSCKLDRSKIVASVSNFSVVSINEDQIAANLIKNGPLAVAINAAYMQTYIGGVSCPYICSRRLNHGVLLVGYGSAGFSQARLKEKPYWIIKNSWGESWGENGFYKICKGRNICGVDSLVSTVAATTS

SEQ ID NO: 35024 - DNA, 724 bp, Arabidopsis thaliana
  misc_feature (1)..(724): Ceres Seq. ID no. 12393307
  misc_feature: MA Experiment ID: 108434 Result: Down-regulated in Transcription
  misc_feature: MA Experiment 108434 PARAMETER Experiment Name: At_Root_Tips_cDNA_P Parameter: Tissue Value: Root Tips
  misc_feature: MA Experiment ID: 108461 Result: Down-regulated in Transcription
  misc_feature: MA Experiment 108461 PARAMETER Experiment Name: At_Germinating_Seeds_cDNA_P Parameter: Age (day) Value: 1 vs. 0
  misc_feature: MA Experiment 108461 PARAMETER Experiment Name: At_Germinating_Seeds_cDNA_P Parameter: Tissue Value: Germinating Seeds
  misc_feature: MA Experiment ID: 108576 Result: Up-regulated in Transcription
  misc_feature: MA Experiment 108576 PARAMETER Experiment Name: At_42deg_Heat_cDNA_P Parameter: Temperature (deg C) Value: 42 vs. 22
  misc_feature: MA Experiment 108576 PARAMETER Experiment Name: At_42deg_Heat_cDNA_P Parameter: Timepoint (hr) Value: 1
  misc_feature: MA Experiment 108576 PARAMETER Experiment Name: At_42deg_Heat_cDNA_P Parameter: Tissue Value: Aerial
  misc_feature: MA Experiment ID: 108577 Result: Up-regulated in Transcription
  misc_feature: MA Experiment 108577 PARAMETER Experiment Name: At_42deg_Heat_cDNA_P Parameter: Temperature (deg C) Value: 42 vs. 22
  misc_feature: MA Experiment 108577 PARAMETER Experiment Name: At_42deg_Heat_cDNA_P Parameter: Timepoint (hr) Value: 6
  misc_feature: MA Experiment 108577 PARAMETER Experiment Name: At_42deg_Heat_cDNA_P Parameter: Tissue Value: Aerial
  misc_feature: MA Experiment ID: 108585 Result: Up-regulated in Transcription
  misc_feature: MA Experiment 108585 PARAMETER Experiment Name: At_5mM_NaNP_cDNA_P Parameter: Timepoint (hr) Value: 6
  misc_feature: MA Experiment 108585 PARAMETER Experiment Name: At_5mM_NaNP_cDNA_P Parameter: Tissue Value: Aerial
  misc_feature: MA Experiment 108585 PARAMETER Experiment Name: At_5mM_NaNP_cDNA_P Parameter: Treatment Value: null
  misc_feature: MA Experiment ID: 108668 Result: Up-regulated in Transcription
  misc_feature: MA Experiment 108668 PARAMETER Experiment Name: At_2mM_SA_cDNA_P Parameter: Plant Line Value: WS
  misc_feature: MA Experiment 108668 PARAMETER Experiment Name: At_2mM_SA_cDNA_P Parameter: Timepoint (hr) Value: 6
  misc_feature: MA Experiment 108668 PARAMETER Experiment Name: At_2mM_SA_cDNA_P Parameter: Treatment Value: 2mM SA vs. No Treatment
  misc_feature: MA Experiment ID: 20000093 Result: Up-regulated in Transcription
  misc_feature: MA Experiment 20000093 PARAMETER Experiment Name: At_42deg_Heat_cDNA_P Parameter: Temperature (deg C) Value: 42 vs. 22
  misc_feature: MA Experiment 20000093 PARAMETER Experiment Name: At_42deg_Heat_cDNA_P Parameter: Timepoint (hr) Value: 0.5
  misc_feature: MA Experiment 20000093 PARAMETER Experiment Name: At_42deg_Heat_cDNA_P Parameter: Tissue Value: Aerial
  misc_feature: MA Experiment ID: 20000113 Result: Up-regulated in Transcription
  misc_feature: MA Experiment 20000113 PARAMETER Experiment Name: At_42deg_Heat_cDNA_P Parameter: Temperature (deg C) Value: 42 vs. 22
  misc_feature: MA Experiment 20000113 PARAMETER Experiment Name: At_42deg_Heat_cDNA_P Parameter: Timepoint (hr) Value: 8
  misc_feature: MA Experiment 20000113 PARAMETER Experiment Name: At_42deg_Heat_cDNA_P Parameter: Tissue Value: Aerial
  misc_feature: MA Experiment ID: 20000117 Result: Up-regulated in Transcription
  misc_feature: MA Experiment 20000117 PARAMETER Experiment Name: At_100uM_ABA_Mutants_cDNA_P Parameter: Plant Line Value: Columbia
  misc_feature: MA Experiment 20000117 PARAMETER Experiment Name: At_100uM_ABA_Mutants_cDNA_P Parameter: Timepoint (hr) Value: 6
  misc_feature: MA Experiment 20000117 PARAMETER Experiment Name: At_100uM_ABA_Mutants_cDNA_P Parameter: Tissue Value: Aerial
  misc_feature: MA Experiment 20000117 PARAMETER Experiment Name: At_100uM_ABA_Mutants_cDNA_P Parameter: Treatment Value: 100uM ABA vs. No Treatment
  misc_feature: MA Experiment ID: 20000144 Result: Up-regulated in Transcription
  misc_feature: MA Experiment 20000144 PARAMETER Experiment Name: At_42deg_Heat_cDNA_P Parameter: Temperature (deg C) Value: 42 vs. 22
  misc_feature: MA Experiment 20000144 PARAMETER Experiment Name: At_42deg_Heat_cDNA_P Parameter: Timepoint (hr) Value: 1
  misc_feature: MA Experiment 20000144 PARAMETER Experiment Name: At_42deg_Heat_cDNA_P Parameter: Tissue Value: Aerial
  misc_feature: MA Experiment ID: 20000171 Result: Up-regulated in Transcription
  misc_feature: MA Experiment 20000171 PARAMETER Experiment Name: At_42deg_Heat_P Parameter: Age (day) Value: 14
  misc_feature: MA Experiment 20000171 PARAMETER Experiment Name: At_42deg_Heat_P Parameter: Organism Value: A. thaliana
  misc_feature: MA Experiment 20000171 PARAMETER Experiment Name: At_42deg_Heat_P Parameter: Plant Line Value: WS
  misc_feature: MA Experiment 20000171 PARAMETER Experiment Name: At_42deg_Heat_P Parameter: Temperature (deg C) Value: 42 vs. 22
  misc_feature: MA Experiment 20000171 PARAMETER Experiment Name: At_42deg_Heat_P Parameter: Timepoint (hr) Value: 1
  misc_feature: MA Experiment 20000171 PARAMETER Experiment Name: At_42deg_Heat_P Parameter: Tissue Value: Aerial
  misc_feature: MA Experiment ID: 20000173 Result: Up-regulated in Transcription
  misc_feature: MA Experiment 20000173 PARAMETER Experiment Name: At_42deg_Heat_P Parameter: Age (day) Value: 14
  misc_feature: MA Experiment 20000173 PARAMETER Experiment Name: At_42deg_Heat_P Parameter: Organism Value: A. thaliana
  misc_feature: MA Experiment 20000173 PARAMETER Experiment Name: At_42deg_Heat_P Parameter: Plant Line Value: WS
  misc_feature: MA Experiment 20000173 PARAMETER Experiment Name: At_42deg_Heat_P Parameter: Temperature (deg C) Value: 42 vs. 22
  misc_feature: MA Experiment 20000173 PARAMETER Experiment Name: At_42deg_Heat_P Parameter: Timepoint (hr) Value: 6
  misc_feature: MA Experiment 20000173 PARAMETER Experiment Name: At_42deg_Heat_P Parameter: Tissue Value: Aerial
  misc_feature: MA Experiment ID: 20000179 Result: Down-regulated in Transcription
  misc_feature: MA Experiment 20000179 PARAMETER Experiment Name: At_Germinating_Seeds_P Parameter: Age (hr) Value: 6 vs. 0
  misc_feature: MA Experiment 20000179 PARAMETER Experiment Name: At_Germinating_Seeds_P Parameter: Tissue Value: Germinating Seeds
  misc_feature: MA Experiment ID: 20000180 Result: Down-regulated in Transcription
  misc_feature: MA Experiment 20000180 PARAMETER Experiment Name: At_Germinating_Seeds_P Parameter: Age (hr) Value: 24 vs. 0
  misc_feature: MA Experiment 20000180 PARAMETER Experiment Name: At_Germinating_Seeds_P Parameter: Tissue Value: Germinating Seeds
  misc_feature: MA Experiment ID: 20000182 Result: Up-regulated in Transcription
  misc_feature: MA Experiment 20000182 PARAMETER Experiment Name: At_2mM_SA_P Parameter: Age (day) Value: 14
  misc_feature: MA Experiment 20000182 PARAMETER Experiment Name: At_2mM_SA_P Parameter: Organism Value: A. thaliana
  misc_feature: MA Experiment 20000182 PARAMETER Experiment Name: At_2mM_SA_P Parameter: Plant Line Value: WS
  misc_feature: MA Experiment 20000182 PARAMETER Experiment Name: At_2mM_SA_P Parameter: Timepoint (hr) Value: 6
  misc_feature: MA Experiment 20000182 PARAMETER Experiment Name: At_2mM_SA_P Parameter: Tissue Value: Aerial
  misc_feature: MA Experiment 20000182 PARAMETER Experiment Name: At_2mM_SA_P Parameter: Treatment Value: 2mM SA vs. No Treatment
ctcctttgcactccatttttattctcgattctcttctctcccgataaagaagctctcgctttgtgttgtccgtccttcttccaggttttctcgtctctgacgcatggcttctaagaggatcttgaaggagctcaaggatctgcagaaggatcctccttcaaactgcagcgctggtccggtggctgaggacatgttccattggcaagccactatcatgggacctcctgaaagtccgtatgccggaggagtgtttttggtttctattcatttccctccggattatcctttcaagccaccaaaggtgtcttttaagactaaggtgtaccatccaaacatcaatagcaatggaagtatttgccttgatattttgaaagagcaatggagccctgctcttactatctctaaggttctgttgtcgatttgctcgctgttgactgacccaaacccagatgatcctcttgtgccggagatagctcacatgtacaagacagatagatccaagtacgagtcaactgcgagaagctggacacaaaagtacgcaatgggttgatgatataagacaaagcaaaggatatgttattgcgcatcggaataaaataataacttaaaaaaaatgcacttgtttggtttatcaaacgttagcaagtatcgaacaacttagctgctcttactcctcttctgttctgatcactataaactagtattaatttcgattgttgggtct

SEQ ID NO: 35025 - protein, 148 aa, Arabidopsis thaliana
  peptide (1)..(148): Ceres Seq. ID no. 12393308
  misc_feature (1)..(148): Homolog of NCBI NO: 40287554 NR Description: ubiquitin-conjugating enzyme 8 [Capsicum annuum]
  misc_feature (1)..(148): Homolog of NCBI NO: 20152205 NR Description: ubiquitin-conjugating enzyme OsUBC5b
  misc_feature (1)..(148): Homolog of NCBI NO: 21554343 NR Description: E2, ubiquitin-conjugating enzyme 10 (UBC10)
  misc_feature (1)..(148): Homolog of NCBI NO: 28569269 NR Description: ubiquitin-conjugating enzyme E2 [Gossypium
  misc_feature (1)..(148): Homolog of NCBI NO: 18408001 NR Description: E2, ubiquitin-conjugating enzyme, putative
  misc_feature (1)..(148): Homolog of NCBI NO: 18423494 NR Description: E2, ubiquitin-conjugating enzyme 10 (UBC10)
  misc_feature (1)..(148): Homolog of NCBI NO: 464981 NR Description: Ubiquitin-conjugating enzyme E2-17 kDa
  misc_feature (1)..(148): Homolog of NCBI NO: 34909292 NR Description: ubiquitin conjugating enzyme
  misc_feature (1)..(148): Homolog of NCBI NO: 2668744 NR Description: ubiquitin conjugating enzyme [Zea mays]
  misc_feature (1)..(148): Homolog of NCBI NO: 18398206 NR Description: E2, ubiquitin-conjugating enzyme 11 (UBC11)
MASKRILKELKDLQKDPPSNCSAGPVAEDMFHWQATIMGPPESPYAGGVFLVSIHFPPDYPFKPPKVSFKTKVYHPNINSNGSICLDILKEQWSPALTISKVLLSICSLLTDPNPDDPLVPEIAHMYKTDRSKYESTARSWTQKYAMG

SEQ ID NO: 35026 - protein, 119 aa, Arabidopsis thaliana
  peptide (1)..(119): Ceres Seq. ID no. 12393309
  misc_feature (1)..(119): Homolog of NCBI NO: 40287554 NR Description: ubiquitin-conjugating enzyme 8 [Capsicum annuum]
  misc_feature (1)..(119): Homolog of NCBI NO: 20152205 NR Description: ubiquitin-conjugating enzyme OsUBC5b
  misc_feature (1)..(119): Homolog of NCBI NO: 21554343 NR Description: E2, ubiquitin-conjugating enzyme 10 (UBC10)
  misc_feature (1)..(119): Homolog of NCBI NO: 28569269 NR Description: ubiquitin-conjugating enzyme E2 [Gossypium
  misc_feature (1)..(119): Homolog of NCBI NO: 18408001 NR Description: E2, ubiquitin-conjugating enzyme, putative
  misc_feature (1)..(119): Homolog of NCBI NO: 18423494 NR Description: E2, ubiquitin-conjugating enzyme 10 (UBC10)
  misc_feature (1)..(119): Homolog of NCBI NO: 464981 NR Description: Ubiquitin-conjugating enzyme E2-17 kDa
  misc_feature (1)..(119): Homolog of NCBI NO: 34909292 NR Description: ubiquitin conjugating enzyme
  misc_feature (1)..(119): Homolog of NCBI NO: 2668744 NR Description: ubiquitin conjugating enzyme [Zea mays]
  misc_feature (1)..(119): Homolog of NCBI NO: 18398206 NR Description: E2, ubiquitin-conjugating enzyme 11 (UBC11)
MFHWQATIMGPPESPYAGGVFLVSIHFPPDYPFKPPKVSFKTKVYHPNINSNGSICLDILKEQWSPALTISKVLLSICSLLTDPNPDDPLVPEIAHMYKTDRSKYESTARSWTQKYAMG

SEQ ID NO: 35027 - protein, 111 aa, Arabidopsis thaliana
  peptide (1)..(111): Ceres Seq. ID no. 12393310
  misc_feature (1)..(111): Homolog of NCBI NO: 40287554 NR Description: ubiquitin-conjugating enzyme 8 [Capsicum annuum]
  misc_feature (1)..(111): Homolog of NCBI NO: 20152205 NR Description: ubiquitin-conjugating enzyme OsUBC5b
  misc_feature (1)..(111): Homolog of NCBI NO: 28569269 NR Description: ubiquitin-conjugating enzyme E2 [Gossypium
  misc_feature (1)..(111): Homolog of NCBI NO: 21554343 NR Description: E2, ubiquitin-conjugating enzyme 10 (UBC10)
  misc_feature (1)..(111): Homolog of NCBI NO: 18408001 NR Description: E2, ubiquitin-conjugating enzyme, putative
  misc_feature (1)..(111): Homolog of NCBI NO: 18423494 NR Description: E2, ubiquitin-conjugating enzyme 10 (UBC10)
  misc_feature (1)..(111): Homolog of NCBI NO: 464981 NR Description: Ubiquitin-conjugating enzyme E2-17 kDa
  misc_feature (1)..(111): Homolog of NCBI NO: 34909292 NR Description: ubiquitin conjugating enzyme
  misc_feature (1)..(111): Homolog of NCBI NO: 2668744 NR Description: ubiquitin conjugating enzyme [Zea mays]
  misc_feature (1)..(111): Homolog of NCBI NO: 18398206 NR Description: E2, ubiquitin-conjugating enzyme 11 (UBC11)
MGPPESPYAGGVFLVSIHFPPDYPFKPPKVSFKTKVYHPNINSNGSICLDILKEQWSPALTISKVLLSICSLLTDPNPDDPLVPEIAHMYKTDRSKYESTARSWTQKYAMG

SEQ ID NO: 35028 - DNA, 855 bp, Arabidopsis thaliana
  misc_feature (1)..(855): Ceres Seq. ID no. 12332021
  misc_feature: MA Experiment ID: 108462 Result: Down-regulated in Transcription
  misc_feature: MA Experiment 108462 PARAMETER Experiment Name: At_Germinating_Seeds_cDNA_P Parameter: Age (day) Value: 2 vs. 0
  misc_feature: MA Experiment 108462 PARAMETER Experiment Name: At_Germinating_Seeds_cDNA_P Parameter: Tissue Value: Germinating Seeds
  misc_feature: MA Experiment ID: 108464 Result: Down-regulated in Transcription
  misc_feature: MA Experiment 108464 PARAMETER Experiment Name: At_Germinating_Seeds_cDNA_P Parameter: Age (day) Value: 4 vs. 0
  misc_feature: MA Experiment 108464 PARAMETER Experiment Name: At_Germinating_Seeds_cDNA_P Parameter: Tissue Value: Germinating Seeds
  misc_feature: MA Experiment ID: 108573 Result: Up-regulated in Transcription
  misc_feature: MA Experiment 108573 PARAMETER Experiment Name: At_Drought_cDNA_P Parameter: Timepoint (hr) Value: 6
  misc_feature: MA Experiment 108573 PARAMETER Experiment Name: At_Drought_cDNA_P Parameter: Tissue Value: Aerial
  misc_feature: MA Experiment 108573 PARAMETER Experiment Name: At_Drought_cDNA_P Parameter: Treatment Value: Drought vs. No Drought
  misc_feature: MA Experiment ID: 108576 Result: Down-regulated in Transcription
  misc_feature: MA Experiment 108576 PARAMETER Experiment Name: At_42deg_Heat_cDNA_P Parameter: Temperature (deg C) Value: 42 vs. 22
  misc_feature: MA Experiment 108576 PARAMETER Experiment Name: At_42deg_Heat_cDNA_P Parameter: Timepoint (hr) Value: 1
  misc_feature: MA Experiment 108576 PARAMETER Experiment Name: At_42deg_Heat_cDNA_P Parameter: Tissue Value: Aerial
  misc_feature: MA Experiment ID: 108577 Result: Down-regulated in Transcription
  misc_feature: MA Experiment 108577 PARAMETER Experiment Name: At_42deg_Heat_cDNA_P Parameter: Temperature (deg C) Value: 42 vs. 22
  misc_feature: MA Experiment 108577 PARAMETER Experiment Name: At_42deg_Heat_cDNA_P Parameter: Timepoint (hr) Value: 6
  misc_feature: MA Experiment 108577 PARAMETER Experiment Name: At_42deg_Heat_cDNA_P Parameter: Tissue Value: Aerial
  misc_feature: MA Experiment ID: 20001557 Result: Up-regulated in Transcription
  misc_feature: MA Experiment 20001557 PARAMETER Experiment Name: At_Drought_Soil_Dry_P Parameter: Age (day) Value: 27
  misc_feature: MA Experiment 20001557 PARAMETER Experiment Name: At_Drought_Soil_Dry_P Parameter: Organism Value: A. thaliana
  misc_feature: MA Experiment 20001557 PARAMETER Experiment Name: At_Drought_Soil_Dry_P Parameter: Plant Line Value: WS
  misc_feature: MA Experiment 20001557 PARAMETER Experiment Name: At_Drought_Soil_Dry_P Parameter: Post Timepoint (hr) Value: 3
  misc_feature: MA Experiment 20001557 PARAMETER Experiment Name: At_Drought_Soil_Dry_P Parameter: Post-Treatment Value: Re-Water vs. No Drought
  misc_feature: MA Experiment 20001557 PARAMETER Experiment Name: At_Drought_Soil_Dry_P Parameter: Timepoint (day) Value: 13
  misc_feature: MA Experiment 20001557 PARAMETER Experiment Name: At_Drought_Soil_Dry_P Parameter: Treatment Value: Drought vs. No Drought
taatcgaaaacatttggtattgctgcttacgtcgtcagatctgctcgttttttcgctccatttttgggttaccattactcagcttccgttttaaatatcacattagatggacgaaagcggaggtgatagtggttcagtggccacacctgttcaacagcgagcacatgaggcatggaggatttaccaacactatcttgacaagactacacctcatgcaaattacagatggattggaactcttgtcgtcgctcttatctactgtttgagggtttactatattcagggtttctacatcatcgcctatggtcttggaatctaccttctcaatctgcttatcgggttcttgtcccctcttgttgatcctgaagctggtggggtctctgatgggccttctctgcctactagaggttctgatgagttcaagcctttcattcgccgtctccccgagttcaaattctggtactccatgacaaaggctttctgcatagctttcctcatgacattcttctcggtgtttgacgttcctgtgttttggccaattctgctgtgctattggatcgttctctttgttctcaccatgagacgccagatcgcccacatgatcaagtacaaatacatccctttcagcttcggcaaacagaaatatggtggacggagcagcagcggctcacgtgcggattgatctgaccaatttgctgaccattagctactttttttgtctttgcaaaagagaaagaaaaaattgttaagaatatcattttggaccatttttacattgacaaaactatgcagagctataaggaagaattataggcaggataaaaaaggatggaaactaaacttgatttagctcgg

SEQ ID NO: 35029 - protein, 191 aa, Arabidopsis thaliana
  peptide (1)..(191): Ceres Seq. ID no. 12332022
  misc_feature (2)..(183): Pfam Name: Rer1 family Pfam Description: Rer1 family
  misc_feature (2)..(177): Homolog of NCBI NO: 18398679 NR Description: putative integral membrane protein; protein id:
  misc_feature (103)..(178): Homolog of NCBI NO: 35210534 NR Description: putative endoplasmatic reticulum retrieval
  misc_feature (2)..(119): Homolog of NCBI NO: 35210534 NR Description: putative endoplasmatic reticulum retrieval
  misc_feature (7)..(178): Homolog of NCBI NO: 7488292 NR Description: probable integral membrane protein At2g23310
  misc_feature (7)..(181): Homolog of NCBI NO: 30682033 NR Description: integral membrane protein -related [Arabidopsis
  misc_feature (7)..(181): Homolog of NCBI NO: 18400234 NR Description: putative integral membrane protein
  misc_feature (6)..(179): Homolog of NCBI NO: 34894094 NR Description: putative Rer1A protein (AtRer1A)
  misc_feature (1)..(191): Homolog of NCBI NO: 15226596 NR Description: AtRer1B
  misc_feature (1)..(191): Homolog of NCBI NO: 11281669 NR Description: endoplasmatic reticulum retrieval protein Rer1B
  misc_feature (1)..(191): Homolog of NCBI NO: 15234975 NR Description: AtRer1A
MDESGGDSGSVATPVQQRAHEAWRIYQHYLDKTTPHANYRWIGTLVVALIYCLRVYYIQGFYIIAYGLGIYLLNLLIGFLSPLVDPEAGGVSDGPSLPTRGSDEFKPFIRRLPEFKFWYSMTKAFCIAFLMTFFSVFDVPVFWPILLCYWIVLFVLTMRRQIAHMIKYKYIPFSFGKQKYGGRSSSGSRAD

SEQ ID NO: 35030 - DNA, 427 bp, Arabidopsis thaliana
  misc_feature (1)..(427): Ceres Seq. ID no. 12338550
  misc_feature: MA Experiment ID: 108434 Result: Up-regulated in Transcription
  misc_feature: MA Experiment 108434 PARAMETER Experiment Name: At_Root_Tips_cDNA_P Parameter: Tissue Value: Root Tips
  misc_feature: MA Experiment ID: 108462 Result: Down-regulated in Transcription
  misc_feature: MA Experiment 108462 PARAMETER Experiment Name: At_Germinating_Seeds_cDNA_P Parameter: Age (day) Value: 2 vs. 0
  misc_feature: MA Experiment 108462 PARAMETER Experiment Name: At_Germinating_Seeds_cDNA_P Parameter: Tissue Value: Germinating Seeds
  misc_feature: MA Experiment ID: 108463 Result: Down-regulated in Transcription
  misc_feature: MA Experiment 108463 PARAMETER Experiment Name: At_Germinating_Seeds_cDNA_P Parameter: Age (day) Value: 3 vs. 0
  misc_feature: MA Experiment 108463 PARAMETER Experiment Name: At_Germinating_Seeds_cDNA_P Parameter: Tissue Value: Germinating Seeds
  misc_feature: MA Experiment ID: 108573 Result: Down-regulated in Transcription
  misc_feature: MA Experiment 108573 PARAMETER Experiment Name: At_Drought_cDNA_P Parameter: Timepoint (hr) Value: 6
  misc_feature: MA Experiment 108573 PARAMETER Experiment Name: At_Drought_cDNA_P Parameter: Tissue Value: Aerial
  misc_feature: MA Experiment 108573 PARAMETER Experiment Name: At_Drought_cDNA_P Parameter: Treatment Value: Drought vs. No Drought
  misc_feature: MA Experiment ID: 20000071 Result: Down-regulated in Transcription
  misc_feature: MA Experiment 20000071 PARAMETER Experiment Name: At_100uM_ABA_Mutants_cDNA_P Parameter: Plant Line Value: CS8104
  misc_feature: MA Experiment 20000071 PARAMETER Experiment Name: At_100uM_ABA_Mutants_cDNA_P Parameter: Timepoint (hr) Value: 6
  misc_feature: MA Experiment 20000071 PARAMETER Experiment Name: At_100uM_ABA_Mutants_cDNA_P Parameter: Tissue Value: Aerial
  misc_feature: MA Experiment 20000071 PARAMETER Experiment Name: At_100uM_ABA_Mutants_cDNA_P Parameter: Treatment Value: 100uM ABA vs. No Treatment
  misc_feature: MA Experiment ID: 20000184 Result: Up-regulated in Transcription
  misc_feature: MA Experiment 20000184 PARAMETER Experiment Name: At_Shoots__P Parameter: Age (day) Value: 7
  misc_feature: MA Experiment 20000184 PARAMETER Experiment Name: At_Shoots__P Parameter: Tissue Value: Shoots vs. Whole Plant
  misc_feature: MA Experiment ID: 20000227 Result: Up-regulated in Transcription
  misc_feature: MA Experiment 20000227 PARAMETER Experiment Name: At_Root-Tips-vs-Tops_P Parameter: Tissue Value: Root Tips vs. Root Tops
  misc_feature: MA Experiment ID: 20000234 Result: Up-regulated in Transcription
  misc_feature: MA Experiment 20000234 PARAMETER Experiment Name: At_Siliques_P Parameter: Age (day) Value: 21
  misc_feature: MA Experiment 20000234 PARAMETER Experiment Name: At_Siliques_P Parameter: Organism Value: A. thaliana
  misc_feature: MA Experiment 20000234 PARAMETER Experiment Name: At_Siliques_P Parameter: Plant Line Value: WS
  misc_feature: MA Experiment 20000234 PARAMETER Experiment Name: At_Siliques_P Parameter: Tissue Value: Less Than 5mm Siliques vs. Whole Plant
  misc_feature: MA Experiment ID: 20000235 Result: Up-regulated in Transcription
  misc_feature: MA Experiment 20000235 PARAMETER Experiment Name: At_Siliques_P Parameter: Age (day) Value: 21
  misc_feature: MA Experiment 20000235 PARAMETER Experiment Name: At_Siliques_P Parameter: Organism Value: A. thaliana
  misc_feature: MA Experiment 20000235 PARAMETER Experiment Name: At_Siliques_P Parameter: Plant Line Value: WS
  misc_feature: MA Experiment 20000235 PARAMETER Experiment Name: At_Siliques_P Parameter: Tissue Value: 5-10mm Siliques vs. Whole Plant
  misc_feature: MA Experiment ID: 20000264 Result: Up-regulated in Transcription
  misc_feature: MA Experiment 20000264 PARAMETER Experiment Name: At_Open_Flower_P Parameter: Age (day) Value: 21
  misc_feature: MA Experiment 20000264 PARAMETER Experiment Name: At_Open_Flower_P Parameter: Plant Line Value: WS
  misc_feature: MA Experiment 20000264 PARAMETER Experiment Name: At_Open_Flower_P Parameter: Tissue Value: Open Flower vs. Whole Plant
  misc_feature: MA Experiment ID: 20000437 Result: Down-regulated in Transcription
  misc_feature: MA Experiment 20000437 PARAMETER Experiment Name: At_Drought_P Parameter: Age (day) Value: 8
  misc_feature: MA Experiment 20000437 PARAMETER Experiment Name: At_Drought_P Parameter: Organism Value: A. thaliana
  misc_feature: MA Experiment 20000437 PARAMETER Experiment Name: At_Drought_P Parameter: Plant Line Value: WS
  misc_feature: MA Experiment 20000437 PARAMETER Experiment Name: At_Drought_P Parameter: Timepoint (hr) Value: 24
  misc_feature: MA Experiment 20000437 PARAMETER Experiment Name: At_Drought_P Parameter: Tissue Value: Whole Plant
  misc_feature: MA Experiment 20000437 PARAMETER Experiment Name: At_Drought_P Parameter: Treatment Value: Drought vs. No Drought
  misc_feature: MA Experiment ID: 20000794 Result: Down-regulated in Transcription
  misc_feature: MA Experiment 20000794 PARAMETER Experiment Name: At_Petals_P Parameter: Age (day) Value: 23-25 days
  misc_feature: MA Experiment 20000794 PARAMETER Experiment Name: At_Petals_P Parameter: Plant Line Value: WS
  misc_feature: MA Experiment 20000794 PARAMETER Experiment Name: At_Petals_P Parameter: Tissue Value: Petals vs. Whole plant
  misc_feature: MA Experiment ID: 20001557 Result: Up-regulated in Transcription
  misc_feature: MA Experiment 20001557 PARAMETER Experiment Name: At_Drought_Soil_Dry_P Parameter: Age (day) Value: 27
  misc_feature: MA Experiment 20001557 PARAMETER Experiment Name: At_Drought_Soil_Dry_P Parameter: Organism Value: A. thaliana
  misc_feature: MA Experiment 20001557 PARAMETER Experiment Name: At_Drought_Soil_Dry_P Parameter: Plant Line Value: WS
  misc_feature: MA Experiment 20001557 PARAMETER Experiment Name: At_Drought_Soil_Dry_P Parameter: Post Timepoint (hr) Value: 3
  misc_feature: MA Experiment 20001557 PARAMETER Experiment Name: At_Drought_Soil_Dry_P Parameter: Post-Treatment Value: Re-Water vs. No Drought
  misc_feature: MA Experiment 20001557 PARAMETER Experiment Name: At_Drought_Soil_Dry_P Parameter: Timepoint (day) Value: 13
  misc_feature: MA Experiment 20001557 PARAMETER Experiment Name: At_Drought_Soil_Dry_P Parameter: Treatment Value: Drought vs. No Drought
  misc_feature: MA Experiment ID: 20001558 Result: Up-regulated in Transcription
  misc_feature: MA Experiment 20001558 PARAMETER Experiment Name: At_Drought_Soil_Dry_P Parameter: Age (day) Value: 27
  misc_feature: MA Experiment 20001558 PARAMETER Experiment Name: At_Drought_Soil_Dry_P Parameter: Organism Value: A. thaliana
  misc_feature: MA Experiment 20001558 PARAMETER Experiment Name: At_Drought_Soil_Dry_P Parameter: Plant Line Value: WS
  misc_feature: MA Experiment 20001558 PARAMETER Experiment Name: At_Drought_Soil_Dry_P Parameter: Post Timepoint (hr) Value: 6
  misc_feature: MA Experiment 20001558 PARAMETER Experiment Name: At_Drought_Soil_Dry_P Parameter: Post-Treatment Value: Re-Water vs. No Drought
  misc_feature: MA Experiment 20001558 PARAMETER Experiment Name: At_Drought_Soil_Dry_P Parameter: Timepoint (day) Value: 13
  misc_feature: MA Experiment 20001558 PARAMETER Experiment Name: At_Drought_Soil_Dry_P Parameter: Treatment Value: Drought vs. No Drought
  misc_feature: MA Experiment ID: 20001560 Result: Up-regulated in Transcription
  misc_feature: MA Experiment 20001560 PARAMETER Experiment Name: At_Drought_Soil_Dry_P Parameter: Age (day) Value: 28
  misc_feature: MA Experiment 20001560 PARAMETER Experiment Name: At_Drought_Soil_Dry_P Parameter: Organism Value: A. thaliana
  misc_feature: MA Experiment 20001560 PARAMETER Experiment Name: At_Drought_Soil_Dry_P Parameter: Plant Line Value: WS
  misc_feature: MA Experiment 20001560 PARAMETER Experiment Name: At_Drought_Soil_Dry_P Parameter: Post Timepoint (hr) Value: None
  misc_feature: MA Experiment 20001560 PARAMETER Experiment Name: At_Drought_Soil_Dry_P Parameter: Post-Treatment Value: None
  misc_feature: MA Experiment 20001560 PARAMETER Experiment Name: At_Drought_Soil_Dry_P Parameter: Timepoint (day) Value: 14
  misc_feature: MA Experiment 20001560 PARAMETER Experiment Name: At_Drought_Soil_Dry_P Parameter: Treatment Value: Drought vs. No Drought
  misc_feature: MA Experiment ID: 20001757 Result: Up-regulated in Transcription
  misc_feature: MA Experiment 20001757 PARAMETER Experiment Name: At_50mM_NH4NO3_L-to-H_P Parameter: Timepoint (hr) Value: 6
  misc_feature: MA Experiment 20001757 PARAMETER Experiment Name: At_50mM_NH4NO3_L-to-H_P Parameter: Tissue Value: Leaf
  misc_feature: MA Experiment 20001757 PARAMETER Experiment Name: At_50mM_NH4NO3_L-to-H_P Parameter: Treatment Value: 50mM NH4NO3 vs 100mM Mannitol
gctcattagggtttctcatctacgacggcgtggtgttcctccttcctgctctgaaaaatggcgaagagaacgaagaaggttggaatcgtcggcaaatacggaacacgttatggtgcgagtatcaggaagcagattaagaagatggaggtcagccagcacagcaagtacttctgtgagttgtatctggggttgcaaggattgtggcaaggtcaaggcaggtggtgcttacacaatgaacaccgccagtgcggtcactgttagaagcacgatcagaaggttgagggagcagatcgagggttaaaagtctgctggctttttatatttggtttccttgttttgacaatttaagttttgcaaactctatgcttgtgattttgaatcaagacttatacattgagcagtttaagcaggtttttattttttgttg

SEQ ID NO: 35031 - protein, 99 aa, Arabidopsis thaliana
  peptide (1)..(99): Ceres Seq. ID no. 12338552
  misc_feature (61)..(95): Homolog of NCBI NO: 34873256 NR Description: similar to 60S ribosomal protein L37a [Rattus
  misc_feature (61)..(95): Homolog of NCBI NO: 7530129 NR Description: 60S ribosomal protein L37a [Leishmania major]
  misc_feature (59)..(95): Homolog of NCBI NO: 15213794 NR Description: ribosomal protein L37A [Spodoptera frugiperda]
  misc_feature (61)..(95): Homolog of NCBI NO: 27667232 NR Description: similar to ribosomal protein L37a, cytosolic
  misc_feature (59)..(95): Homolog of NCBI NO: 31234315 NR Description: ENSANGP00000013363 [Anopheles gambiae]
  misc_feature (61)..(98): Homolog of NCBI NO: 17864394 NR Description: Ribosomal protein L37a CG5827-PA [Drosophila
  misc_feature (61)..(98): Homolog of NCBI NO: 15228411 NR Description: putative 60S ribosomal protein L37a; protein id:
  misc_feature (61)..(98): Homolog of NCBI NO: 6831602 NR Description: 60S RIBOSOMAL PROTEIN L37A
  misc_feature (61)..(99): Homolog of NCBI NO: 6831607 NR Description: 60S ribosomal protein L37a
  misc_feature (61)..(98): Homolog of NCBI NO: 34911166 NR Description: putative 60S ribosomal protein L37a
LIRVSHLRRRGVPPSCSEKWRRERRRLESSANTEHVMVRVSGSRLRRWRSASTASTSVSCIWGCKDCGKVKAGGAYTMNTASAVTVRSTIRRLREQIEG

SEQ ID NO: 35032 - protein, 67 aa, Arabidopsis thaliana
  peptide (1)..(67): Ceres Seq. ID no. 12338553
  misc_feature (1)..(39): Homolog of NCBI NO: 34873256 NR Description: similar to 60S ribosomal protein L37a [Rattus
  misc_feature (1)..(39): Homolog of NCBI NO: 7530129 NR Description: 60S ribosomal protein L37a [Leishmania major]
  misc_feature (1)..(39): Homolog of NCBI NO: 15213794 NR Description: ribosomal protein L37A [Spodoptera frugiperda]
  misc_feature (1)..(39): Homolog of NCBI NO: 27667232 NR Description: similar to ribosomal protein L37a, cytosolic
  misc_feature (2)..(39): Homolog of NCBI NO: 31234315 NR Description: ENSANGP00000013363 [Anopheles gambiae]
  misc_feature (1)..(39): Homolog of NCBI NO: 17864394 NR Description: Ribosomal protein L37a CG5827-PA [Drosophila
  misc_feature (1)..(40): Homolog of NCBI NO: 15228411 NR Description: putative 60S ribosomal protein L37a; protein id:
  misc_feature (1)..(40): Homolog of NCBI NO: 6831602 NR Description: 60S RIBOSOMAL PROTEIN L37A
  misc_feature (1)..(40): Homolog of NCBI NO: 6831607 NR Description: 60S ribosomal protein L37a
  misc_feature (3)..(40): Homolog of NCBI NO: 34911166 NR Description: putative 60S ribosomal protein L37a
MAKRTKKVGIVGKYGTRYGASIRKQIKKMEVSQHSKYFCELYLGLQGLWQGQGRWCLHNEHRQCGHC

SEQ ID NO: 35033 - protein, 63 aa, Arabidopsis thaliana
  peptide (1)..(63): Ceres Seq. ID no. 12338554
  misc_feature (25)..(59): Homolog of NCBI NO: 34873256 NR Description: similar to 60S ribosomal protein L37a [Rattus
  misc_feature (25)..(59): Homolog of NCBI NO: 7530129 NR Description: 60S ribosomal protein L37a [Leishmania major]
  misc_feature (23)..(59): Homolog of NCBI NO: 15213794 NR Description: ribosomal protein L37A [Spodoptera frugiperda]
  misc_feature (25)..(59): Homolog of NCBI NO: 27667232 NR Description: similar to ribosomal protein L37a, cytosolic
  misc_feature (23)..(59): Homolog of NCBI NO: 31234315 NR Description: ENSANGP00000013363 [Anopheles gambiae]
  misc_feature (25)..(62): Homolog of NCBI NO: 17864394 NR Description: Ribosomal protein L37a CG5827-PA [Drosophila
  misc_feature (25)..(62): Homolog of NCBI NO: 15228411 NR Description: putative 60S ribosomal protein L37a; protein id:
  misc_feature (25)..(62): Homolog of NCBI NO: 6831602 NR Description: 60S RIBOSOMAL PROTEIN L37A
  misc_feature (25)..(63): Homolog of NCBI NO: 6831607 NR Description: 60S ribosomal protein L37a
  misc_feature (25)..(62): Homolog of NCBI NO: 34911166 NR Description: putative 60S ribosomal protein L37a
MVRVSGSRLRRWRSASTASTSVSCIWGCKDCGKVKAGGAYTMNTASAVTVRSTIRRLREQIEG

SEQ ID NO: 35034 - DNA, 660 bp, Arabidopsis thaliana
  misc_feature (1)..(660): Ceres Seq. ID no. 12321298
  misc_feature: MA Experiment ID: 108434 Result: Up-regulated in Transcription
  misc_feature: MA Experiment 108434 PARAMETER Experiment Name: At_Root_Tips_cDNA_P Parameter: Tissue Value: Root Tips
  misc_feature: MA Experiment ID: 108462 Result: Down-regulated in Transcription
  misc_feature: MA Experiment 108462 PARAMETER Experiment Name: At_Germinating_Seeds_cDNA_P Parameter: Age (day) Value: 2 vs. 0
  misc_feature: MA Experiment 108462 PARAMETER Experiment Name: At_Germinating_Seeds_cDNA_P Parameter: Tissue Value: Germinating Seeds
  misc_feature: MA Experiment ID: 108463 Result: Down-regulated in Transcription
  misc_feature: MA Experiment 108463 PARAMETER Experiment Name: At_Germinating_Seeds_cDNA_P Parameter: Age (day) Value: 3 vs. 0
  misc_feature: MA Experiment 108463 PARAMETER Experiment Name: At_Germinating_Seeds_cDNA_P Parameter: Tissue Value: Germinating Seeds
  misc_feature: MA Experiment ID: 108464 Result: Down-regulated in Transcription
  misc_feature: MA Experiment 108464 PARAMETER Experiment Name: At_Germinating_Seeds_cDNA_P Parameter: Age (day) Value: 4 vs. 0
  misc_feature: MA Experiment 108464 PARAMETER Experiment Name: At_Germinating_Seeds_cDNA_P Parameter: Tissue Value: Germinating Seeds
  misc_feature: MA Experiment ID: 108569 Result: Up-regulated in Transcription
  misc_feature: MA Experiment 108569 PARAMETER Experiment Name: At_0.001%_MeJA__cDNA_P Parameter: Timepoint (hr) Value: 6
  misc_feature: MA Experiment 108569 PARAMETER Experiment Name: At_0.001%_MeJA__cDNA_P Parameter: Tissue Value: Aerial
  misc_feature: MA Experiment 108569 PARAMETER Experiment Name: At_0.001%_MeJA__cDNA_P Parameter: Treatment Value: 0.001% MeJA vs. No Treatment
  misc_feature: MA Experiment ID: 108573 Result: Up-regulated in Transcription
  misc_feature: MA Experiment 108573 PARAMETER Experiment Name: At_Drought_cDNA_P Parameter: Timepoint (hr) Value: 6
  misc_feature: MA Experiment 108573 PARAMETER Experiment Name: At_Drought_cDNA_P Parameter: Tissue Value: Aerial
  misc_feature: MA Experiment 108573 PARAMETER Experiment Name: At_Drought_cDNA_P Parameter: Treatment Value: Drought vs. No Drought
gttctttcgattctcagagaagacttttcagaacttcctccaactttctcagataagcaacaatggtgaaaggtcccggtctctacaccgaaatcggcaaaaaggccagagatcttctgtacaaagaccacaacagtgaccagaaattcagtatcaccactttctctcctgccggtgttgccatcacctcaaccggaactaagaaaggtgacttattgttgggagatgtcgcttttcagtcgaggcgaaagaacattactactgatttgaaagtttgcactgattctacttttctgatcaccgctaccgttgatgaggctgcacccggactgaggtcaatcttcagcttcaaggttcctgaccaaaattctggcaaggttgagctgcaatacttgcatgagtacgccggtatcagcacaagcatgggattgactcagaacacaactgtcaattgacaagagtgctaaagttggattggctctcgcactcaagccttgaaactgagatggaagaagaagttgcaatagtttttttaaactagtttctttctacgtactctgttttttctctgcttggttcatggtttgagtgggcaactactgatctttcccattttcctgccggatttgtagaagaataaaaaggttgaaaatgatcatc

SEQ ID NO: 35035 - protein, 130 aa, Arabidopsis thaliana
  peptide (1)..(130): Ceres Seq. ID no. 12321299
  misc_feature (4)..(130): Pfam Name: Eukaryotic porin Pfam Description: Eukaryotic porin
  misc_feature (1)..(130): Homolog of NCBI NO: 1172556 NR Description: 36 kDa outer mitochondrial membrane protein porin
  misc_feature (1)..(130): Homolog of NCBI NO: 7442952 NR Description: voltage-dependent anion channel protein - spinach
  misc_feature (1)..(130): Homolog of NCBI NO: 5031279 NR Description: porin [Prunus armeniaca]
  misc_feature (1)..(130): Homolog of NCBI NO: 1172558 NR Description: Outer plastidial membrane protein porin
  misc_feature (1)..(130): Homolog of NCBI NO: 1172555 NR Description: 34 kDa outer mitochondrial membrane protein porin
  misc_feature (1)..(130): Homolog of NCBI NO: 36957170 NR Description: VDAC1.1 [Lotus corniculatus var. japonicus]
  misc_feature (1)..(130): Homolog of NCBI NO: 36957183 NR Description: VDAC1.2 [Lotus corniculatus var. japonicus]
  misc_feature (1)..(130): Homolog of NCBI NO: 7442953 NR Description: porin - common ice plant
  misc_feature (1)..(130): Homolog of NCBI NO: 21593558 NR Description: putative porin [Arabidopsis thaliana]
  misc_feature (1)..(130): Homolog of NCBI NO: 15232074 NR Description: putative porin
MVKGPGLYTEIGKKARDLLYKDHNSDQKFSITTFSPAGVAITSTGTKKGDLLLGDVAFQSRRKNITTDLKVCTDSTFLITATVDEAAPGLRSIFSFKVPDQNSGKVELQYLHEYAGISTSMGLTQNTTVN

SEQ ID NO: 35036 - DNA, 1118 bp, Arabidopsis thaliana
  misc_feature (1)..(1118): Ceres Seq. ID no. 12396813
  misc_feature: MA Experiment ID: 108434 Result: Down-regulated in Transcription
  misc_feature: MA Experiment 108434 PARAMETER Experiment Name: At_Root_Tips_cDNA_P Parameter: Tissue Value: Root Tips
  misc_feature: MA Experiment ID: 108461 Result: Up-regulated in Transcription
  misc_feature: MA Experiment 108461 PARAMETER Experiment Name: At_Germinating_Seeds_cDNA_P Parameter: Age (day) Value: 1 vs. 0
  misc_feature: MA Experiment 108461 PARAMETER Experiment Name: At_Germinating_Seeds_cDNA_P Parameter: Tissue Value: Germinating Seeds
  misc_feature: MA Experiment ID: 108462 Result: Up-regulated in Transcription
  misc_feature: MA Experiment 108462 PARAMETER Experiment Name: At_Germinating_Seeds_cDNA_P Parameter: Age (day) Value: 2 vs. 0
  misc_feature: MA Experiment 108462 PARAMETER Experiment Name: At_Germinating_Seeds_cDNA_P Parameter: Tissue Value: Germinating Seeds
  misc_feature: MA Experiment ID: 108463 Result: Up-regulated in Transcription
  misc_feature: MA Experiment 108463 PARAMETER Experiment Name: At_Germinating_Seeds_cDNA_P Parameter: Age (day) Value: 3 vs. 0
  misc_feature: MA Experiment 108463 PARAMETER Experiment Name: At_Germinating_Seeds_cDNA_P Parameter: Tissue Value: Germinating Seeds
  misc_feature: MA Experiment ID: 108464 Result: Up-regulated in Transcription
  misc_feature: MA Experiment 108464 PARAMETER Experiment Name: At_Germinating_Seeds_cDNA_P Parameter: Age (day) Value: 4 vs. 0
  misc_feature: MA Experiment 108464 PARAMETER Experiment Name: At_Germinating_Seeds_cDNA_P Parameter: Tissue Value: Germinating Seeds
  misc_feature: MA Experiment ID: 20000227 Result: Down-regulated in Transcription
  misc_feature: MA Experiment 20000227 PARAMETER Experiment Name: At_Root-Tips-vs-Tops_P Parameter: Tissue Value: Root Tips vs. Root Tops
  misc_feature: MA Experiment ID: 20000451 Result: Down-regulated in Transcription
  misc_feature: MA Experiment 20000451 PARAMETER Experiment Name: At_CS6879_Shoots-Roots_P Parameter: Age (day) Value: 14
  misc_feature: MA Experiment 20000451 PARAMETER Experiment Name: At_CS6879_Shoots-Roots_P Parameter: Organism Value: A. thaliana
  misc_feature: MA Experiment 20000451 PARAMETER Experiment Name: At_CS6879_Shoots-Roots_P Parameter: Plant Line Value: CS6879 vs. WS
  misc_feature: MA Experiment 20000451 PARAMETER Experiment Name: At_CS6879_Shoots-Roots_P Parameter: Tissue Value: Roots
  misc_feature: MA Experiment ID: 20001450 Result: Down-regulated in Transcription
  misc_feature: MA Experiment 20001450 PARAMETER Experiment Name: At_Far-red-induction_P Parameter: Age (day) Value: 7
  misc_feature: MA Experiment 20001450 PARAMETER Experiment Name: At_Far-red-induction_P Parameter: Light Value: Far-red vs. White
  misc_feature: MA Experiment 20001450 PARAMETER Experiment Name: At_Far-red-induction_P Parameter: Organism Value: A. thaliana
  misc_feature: MA Experiment 20001450 PARAMETER Experiment Name: At_Far-red-induction_P Parameter: Plant Line Value: Columbia
  misc_feature: MA Experiment 20001450 PARAMETER Experiment Name: At_Far-red-induction_P Parameter: Timepoint (hr) Value: 8
  misc_feature: MA Experiment 20001450 PARAMETER Experiment Name: At_Far-red-induction_P Parameter: Tissue Value: Whole Plant
  misc_feature: MA Experiment ID: 20001761 Result: Down-regulated in Transcription
  misc_feature: MA Experiment 20001761 PARAMETER Experiment Name: At_50mM_NH4NO3_L-to-H_P Parameter: Timepoint (hr) Value: 4
  misc_feature: MA Experiment 20001761 PARAMETER Experiment Name: At_50mM_NH4NO3_L-to-H_P Parameter: Tissue Value: Siliques
  misc_feature: MA Experiment 20001761 PARAMETER Experiment Name: At_50mM_NH4NO3_L-to-H_P Parameter: Treatment Value: 50mM NH4NO3 vs 100mM Mannitol
  misc_feature: MA Experiment ID: 20001906 Result: Up-regulated in Transcription
  misc_feature: MA Experiment 20001906 PARAMETER Experiment Name: At_Drought_Reproduction_P Parameter: Age (day) Value: 35
  misc_feature: MA Experiment 20001906 PARAMETER Experiment Name: At_Drought_Reproduction_P Parameter: Organism Value: A. thaliana
  misc_feature: MA Experiment 20001906 PARAMETER Experiment Name: At_Drought_Reproduction_P Parameter: Plant Line Value: WS
  misc_feature: MA Experiment 20001906 PARAMETER Experiment Name: At_Drought_Reproduction_P Parameter: Timepoint (day) Value: 5
  misc_feature: MA Experiment 20001906 PARAMETER Experiment Name: At_Drought_Reproduction_P Parameter: Tissue Value: Siliques
  misc_feature: MA Experiment 20001906 PARAMETER Experiment Name: At_Drought_Reproduction_P Parameter: Treatment Value: Drought vs. No Drought
aggaacgagtgaaactgaaaaccatggagatggagaaaaaccaacacatttcttcgctggacatccccgttattgatctaagtaatcccgatgaagagcttgtggcaagtgcggtggtcaaagcgagccaagagtggggaatatttcaggtggttaaccacggaatcccgaccgagctgatactgcggttgctacaagtgggaatggagtttttcgagctaccggagacagagaaggaagccgtagcgaagccagaagactccttggacatagaaggatacagaaccaagtaccagaaatatctagaaggtagaaacgcatgggtggatcatctctttcaccgcatctggccaccgtctagagtcaatcacaaattctggcctaaaaatcctccagaatacattgaagtgaatgaagagtacgcaagtcacataaagaagctatcggagaaaatcatggaatggttatcagaaggactaggtttaaggcatgaggcgttgaaggaaggtctaggcggcgaaacgattgagtatctaatgaaaatcaattactatccgccgtgtccagatccggagttagtcgtgggagctcctgatcacactgatgtcaatggaatcacactcctagtcgctaatgaagctttagggcttcaagcattcaaagataaccaatggatcgacgcggagtataccacttccgggatcatcgtcatcatcggcgatcaattcttgagaatgagcaatgggaagtataagagtgtggagcatagggcgaagatggataaggagaagacgagaatctcgtggccggtttttgtggaatctagccttgatcaagtcttcggacctttgccggagctaattaccggtgatgagaacgttcccaagtttaagccttatgtctacaaagactacaaatttcgtaagcttaagaagcttcttctcgactgagaaaatctcataataacccataaacagaaaagagatcatgaataaaaaaaatatttgttttgtttgcttctgctttaattaataagttttatctatttatcaaattacagcattgtttgtatggtgcatgtacgtattttagtattaatctatttggattgtaacgtc

SEQ ID NO: 35037 - protein, 315 aa, Arabidopsis thaliana
  peptide (1)..(315): Ceres Seq. ID no. 12396814
  misc_feature (175)..(274): Pfam Name: 2OG-Fe(II) oxygenase superfamily Pfam Description: 2OG-Fe(II) oxygenase superfamily
  misc_feature (20)..(312): Homolog of NCBI NO: 29123532 NR Description: flavonol synthase [Allium cepa]
  misc_feature (19)..(312): Homolog of NCBI NO: 1706822 NR Description: Flavonol synthase (FLS)
  misc_feature (21)..(309): Homolog of NCBI NO: 6015164 NR Description: Flavonol synthase (FLS)
  misc_feature (19)..(312): Homolog of NCBI NO: 14916564 NR Description: Flavonol synthase (FLS)
  misc_feature (15)..(312): Homolog of NCBI NO: 14916566 NR Description: Flavonol synthase (FLS) (CitFLS)
  misc_feature (17)..(315): Homolog of NCBI NO: 15242828 NR Description: 1-aminocyclopropane-1-carboxylic acid
  misc_feature (8)..(315): Homolog of NCBI NO: 10177039 NR Description: flavonol synthase [Arabidopsis thaliana]
  misc_feature (21)..(315): Homolog of NCBI NO: 15242339 NR Description: flavonol synthase (FLS) (sp Q96330)
  misc_feature (8)..(315): Homolog of NCBI NO: 15242827 NR Description: flavonol synthase
  misc_feature (8)..(315): Homolog of NCBI NO: 21554244 NR Description: flavonol synthase [Arabidopsis thaliana]
ERVKLKTMEMEKNQHISSLDIPVIDLSNPDEELVASAVVKASQEWGIFQVVNHGIPTELILRLLQVGMEFFELPETEKEAVAKPEDSLDIEGYRTKYQKYLEGRNAWVDHLFHRIWPPSRVNHKFWPKNPPEYIEVNEEYASHIKKLSEKIMEWLSEGLGLRHEALKEGLGGETIEYLMKINYYPPCPDPELVVGAPDHTDVNGITLLVANEALGLQAFKDNQWIDAEYTTSGIIVIIGDQFLRMSNGKYKSVEHRAKMDKEKTRISWPVFVESSLDQVFGPLPELITGDENVPKFKPYVYKDYKFRKLKKLLLD

SEQ ID NO: 35038 - protein, 308 aa, Arabidopsis thaliana
  peptide (1)..(308): Ceres Seq. ID no. 12396815
  misc_feature (168)..(267): Pfam Name: 2OG-Fe(II) oxygenase superfamily Pfam Description: 2OG-Fe(II) oxygenase superfamily
  misc_feature (13)..(305): Homolog of NCBI NO: 29123532 NR Description: flavonol synthase [Allium cepa]
  misc_feature (12)..(305): Homolog of NCBI NO: 1706822 NR Description: Flavonol synthase (FLS)
  misc_feature (14)..(302): Homolog of NCBI NO: 6015164 NR Description: Flavonol synthase (FLS)
  misc_feature (12)..(305): Homolog of NCBI NO: 14916564 NR Description: Flavonol synthase (FLS)
  misc_feature (8)..(305): Homolog of NCBI NO: 14916566 NR Description: Flavonol synthase (FLS) (CitFLS)
  misc_feature (10)..(308): Homolog of NCBI NO: 15242828 NR Description: 1-aminocyclopropane-1-carboxylic acid
  misc_feature (1)..(308): Homolog of NCBI NO: 10177039 NR Description: flavonol synthase [Arabidopsis thaliana]
  misc_feature (14)..(308): Homolog of NCBI NO: 15242339 NR Description: flavonol synthase (FLS) (sp Q96330)
  misc_feature (1)..(308): Homolog of NCBI NO: 15242827 NR Description: flavonol synthase
  misc_feature (1)..(308): Homolog of NCBI NO: 21554244 NR Description: flavonol synthase [Arabidopsis thaliana]
MEMEKNQHISSLDIPVIDLSNPDEELVASAVVKASQEWGIFQVVNHGIPTELILRLLQVGMEFFELPETEKEAVAKPEDSLDIEGYRTKYQKYLEGRNAWVDHLFHRIWPPSRVNHKFWPKNPPEYIEVNEEYASHIKKLSEKIMEWLSEGLGLRHEALKEGLGGETIEYLMKINYYPPCPDPELVVGAPDHTDVNGITLLVANEALGLQAFKDNQWIDAEYTTSGIIVIIGDQFLRMSNGKYKSVEHRAKMDKEKTRISWPVFVESSLDQVFGPLPELITGDENVPKFKPYVYKDYKFRKLKKLLLD

SEQ ID NO: 35039 - protein, 306 aa, Arabidopsis thaliana
  peptide (1)..(306): Ceres Seq. ID no. 12396816
  misc_feature (166)..(265): Pfam Name: 2OG-Fe(II) oxygenase superfamily Pfam Description: 2OG-Fe(II) oxygenase superfamily
  misc_feature (11)..(303): Homolog of NCBI NO: 29123532 NR Description: flavonol synthase [Allium cepa]
  misc_feature (10)..(303): Homolog of NCBI NO: 1706822 NR Description: Flavonol synthase (FLS)
  misc_feature (12)..(300): Homolog of NCBI NO: 6015164 NR Description: Flavonol synthase (FLS)
  misc_feature (10)..(303): Homolog of NCBI NO: 14916564 NR Description: Flavonol synthase (FLS)
  misc_feature (6)..(303): Homolog of NCBI NO: 14916566 NR Description: Flavonol synthase (FLS) (CitFLS)
  misc_feature (8)..(306): Homolog of NCBI NO: 15242828 NR Description: 1-aminocyclopropane-1-carboxylic acid
  misc_feature (1)..(306): Homolog of NCBI NO: 10177039 NR Description: flavonol synthase [Arabidopsis thaliana]
  misc_feature (12)..(306): Homolog of NCBI NO: 15242339 NR Description: flavonol synthase (FLS) (sp Q96330)
  misc_feature (1)..(306): Homolog of NCBI NO: 15242827 NR Description: flavonol synthase
  misc_feature (1)..(306): Homolog of NCBI NO: 21554244 NR Description: flavonol synthase [Arabidopsis thaliana]
MEKNQHISSLDIPVIDLSNPDEELVASAVVKASQEWGIFQVVNHGIPTELILRLLQVGMEFFELPETEKEAVAKPEDSLDIEGYRTKYQKYLEGRNAWVDHLFHRIWPPSRVNHKFWPKNPPEYIEVNEEYASHIKKLSEKIMEWLSEGLGLRHEALKEGLGGETIEYLMKINYYPPCPDPELVVGAPDHTDVNGITLLVANEALGLQAFKDNQWIDAEYTTSGIIVIIGDQFLRMSNGKYKSVEHRAKMDKEKTRISWPVFVESSLDQVFGPLPELITGDENVPKFKPYVYKDYKFRKLKKLLLD

SEQ ID NO: 35040 - DNA, 854 bp, Arabidopsis thaliana
  misc_feature (1)..(854): Ceres Seq. ID no. 12330366
  misc_feature: MA Experiment ID: 108433 Result: Down-regulated in Transcription
  misc_feature: MA Experiment 108433 PARAMETER Experiment Name: At_rhl_Mutant2_cDNA_P Parameter: Age (day) Value: 7
  misc_feature: MA Experiment 108433 PARAMETER Experiment Name: At_rhl_Mutant2_cDNA_P Parameter: Organism Value: A. thaliana
  misc_feature: MA Experiment 108433 PARAMETER Experiment Name: At_rhl_Mutant2_cDNA_P Parameter: Plant Line Value: rhl Mutant vs. wt landsburg
  misc_feature: MA Experiment 108433 PARAMETER Experiment Name: At_rhl_Mutant2_cDNA_P Parameter: Tissue Value: Roots
  misc_feature: MA Experiment ID: 108434 Result: Down-regulated in Transcription
  misc_feature: MA Experiment 108434 PARAMETER Experiment Name: At_Root_Tips_cDNA_P Parameter: Tissue Value: Root Tips
  misc_feature: MA Experiment ID: 108461 Result: Up-regulated in Transcription
  misc_feature: MA Experiment 108461 PARAMETER Experiment Name: At_Germinating_Seeds_cDNA_P Parameter: Age (day) Value: 1 vs. 0
  misc_feature: MA Experiment 108461 PARAMETER Experiment Name: At_Germinating_Seeds_cDNA_P Parameter: Tissue Value: Germinating Seeds
  misc_feature: MA Experiment ID: 108462 Result: Up-regulated in Transcription
  misc_feature: MA Experiment 108462 PARAMETER Experiment Name: At_Germinating_Seeds_cDNA_P Parameter: Age (day) Value: 2 vs. 0
  misc_feature: MA Experiment 108462 PARAMETER Experiment Name: At_Germinating_Seeds_cDNA_P Parameter: Tissue Value: Germinating Seeds
  misc_feature: MA Experiment ID: 108594 Result: Down-regulated in Transcription
  misc_feature: MA Experiment 108594 PARAMETER Experiment Name: At_Ler-rhl_Root_cDNA_P Parameter: Plant Line Value: null
  misc_feature: MA Experiment ID: 108668 Result: Up-regulated in Transcription
  misc_feature: MA Experiment 108668 PARAMETER Experiment Name: At_2mM_SA_cDNA_P Parameter: Plant Line Value: WS
  misc_feature: MA Experiment 108668 PARAMETER Experiment Name: At_2mM_SA_cDNA_P Parameter: Timepoint (hr) Value: 6
  misc_feature: MA Experiment 108668 PARAMETER Experiment Name: At_2mM_SA_cDNA_P Parameter: Treatment Value: 2mM SA vs. No Treatment
  misc_feature: MA Experiment ID: 20000030 Result: Up-regulated in Transcription
  misc_feature: MA Experiment 20000030 PARAMETER Experiment Name: At_CS6630_Roots_cDNA_P Parameter: Plant Line Value: CS6630 vs. WS
  misc_feature: MA Experiment 20000030 PARAMETER Experiment Name: At_CS6630_Roots_cDNA_P Parameter: Tissue Value: Roots
  misc_feature: MA Experiment ID: 20000070 Result: Up-regulated in Transcription
  misc_feature: MA Experiment 20000070 PARAMETER Experiment Name: At_100uM_ABA_Mutants_cDNA_P Parameter: Plant Line Value: CS24
  misc_feature: MA Experiment 20000070 PARAMETER Experiment Name: At_100uM_ABA_Mutants_cDNA_P Parameter: Timepoint (hr) Value: 6
  misc_feature: MA Experiment 20000070 PARAMETER Experiment Name: At_100uM_ABA_Mutants_cDNA_P Parameter: Tissue Value: Aerial
  misc_feature: MA Experiment 20000070 PARAMETER Experiment Name: At_100uM_ABA_Mutants_cDNA_P Parameter: Treatment Value: 100uM ABA vs. No Treatment
  misc_feature: MA Experiment ID: 20000180 Result: Up-regulated in Transcription
  misc_feature: MA Experiment 20000180 PARAMETER Experiment Name: At_Germinating_Seeds_P Parameter: Age (hr) Value: 24 vs. 0
  misc_feature: MA Experiment 20000180 PARAMETER Experiment Name: At_Germinating_Seeds_P Parameter: Tissue Value: Germinating Seeds
  misc_feature: MA Experiment ID: 20000182 Result: Up-regulated in Transcription
  misc_feature: MA Experiment 20000182 PARAMETER Experiment Name: At_2mM_SA_P Parameter: Age (day) Value: 14
  misc_feature: MA Experiment 20000182 PARAMETER Experiment Name: At_2mM_SA_P Parameter: Organism Value: A. thaliana
  misc_feature: MA Experiment 20000182 PARAMETER Experiment Name: At_2mM_SA_P Parameter: Plant Line Value: WS
  misc_feature: MA Experiment 20000182 PARAMETER Experiment Name: At_2mM_SA_P Parameter: Timepoint (hr) Value: 6
  misc_feature: MA Experiment 20000182 PARAMETER Experiment Name: At_2mM_SA_P Parameter: Tissue Value: Aerial
  misc_feature: MA Experiment 20000182 PARAMETER Experiment Name: At_2mM_SA_P Parameter: Treatment Value: 2mM SA vs. No Treatment
  misc_feature: MA Experiment ID: 20000185 Result: Up-regulated in Transcription
  misc_feature: MA Experiment 20000185 PARAMETER Experiment Name: At_Roots__P Parameter: Age (day) Value: 7 vs. 21
  misc_feature: MA Experiment 20000185 PARAMETER Experiment Name: At_Roots__P Parameter: Organism Value: A. thaliana
  misc_feature: MA Experiment 20000185 PARAMETER Experiment Name: At_Roots__P Parameter: Tissue Value: Roots vs. Whole Plant
  misc_feature: MA Experiment ID: 20000224 Result: Up-regulated in Transcription
  misc_feature: MA Experiment ID: 20000227 Result: Down-regulated in Transcription
  misc_feature: MA Experiment 20000227 PARAMETER Experiment Name: At_Root-Tips-vs-Tops_P Parameter: Tissue Value: Root Tips vs. Root Tops
  misc_feature: MA Experiment ID: 20000234 Result: Down-regulated in Transcription
  misc_feature: MA Experiment 20000234 PARAMETER Experiment Name: At_Siliques_P Parameter: Age (day) Value: 21
  misc_feature: MA Experiment 20000234 PARAMETER Experiment Name: At_Siliques_P Parameter: Organism Value: A. thaliana
  misc_feature: MA Experiment 20000234 PARAMETER Experiment Name: At_Siliques_P Parameter: Plant Line Value: WS
  misc_feature: MA Experiment 20000234 PARAMETER Experiment Name: At_Siliques_P Parameter: Tissue Value: Less Than 5mm Siliques vs. Whole Plant
  misc_feature: MA Experiment ID: 20000235 Result: Down-regulated in Transcription
  misc_feature: MA Experiment 20000235 PARAMETER Experiment Name: At_Siliques_P Parameter: Age (day) Value: 21
  misc_feature: MA Experiment 20000235 PARAMETER Experiment Name: At_Siliques_P Parameter: Organism Value: A. thaliana
  misc_feature: MA Experiment 20000235 PARAMETER Experiment Name: At_Siliques_P Parameter: Plant Line Value: WS
  misc_feature: MA Experiment 20000235 PARAMETER Experiment Name: At_Siliques_P Parameter: Tissue Value: 5-10mm Siliques vs. Whole Plant
  misc_feature: MA Experiment ID: 20000264 Result: Down-regulated in Transcription
  misc_feature: MA Experiment 20000264 PARAMETER Experiment Name: At_Open_Flower_P Parameter: Age (day) Value: 21
  misc_feature: MA Experiment 20000264 PARAMETER Experiment Name: At_Open_Flower_P Parameter: Plant Line Value: WS
  misc_feature: MA Experiment 20000264 PARAMETER Experiment Name: At_Open_Flower_P Parameter: Tissue Value: Open Flower vs. Whole Plant
  misc_feature: MA Experiment ID: 20000265 Result: Down-regulated in Transcription
  misc_feature: MA Experiment 20000265 PARAMETER Experiment Name: At_Open_Flower_P Parameter: Age (day) Value: 21
  misc_feature: MA Experiment 20000265 PARAMETER Experiment Name: At_Open_Flower_P Parameter: Plant Line Value: WS
  misc_feature: MA Experiment 20000265 PARAMETER Experiment Name: At_Open_Flower_P Parameter: Tissue Value: Closed Flower vs. Whole Plant
  misc_feature: MA Experiment ID: 20000286 Result: Down-regulated in Transcription
  misc_feature: MA Experiment 20000286 PARAMETER Experiment Name: At_Open_Flower_P Parameter: Age (day) Value: 21
  misc_feature: MA Experiment 20000286 PARAMETER Experiment Name: At_Open_Flower_P Parameter: Plant Line Value: WS
  misc_feature: MA Experiment 20000286 PARAMETER Experiment Name: At_Open_Flower_P Parameter: Tissue Value: Half Open vs. Whole Plant
  misc_feature: MA Experiment ID: 20000437 Result: Down-regulated in Transcription
  misc_feature: MA Experiment 20000437 PARAMETER Experiment Name: At_Drought_P Parameter: Age (day) Value: 8
  misc_feature: MA Experiment 20000437 PARAMETER Experiment Name: At_Drought_P Parameter: Organism Value: A. thaliana
  misc_feature: MA Experiment 20000437 PARAMETER Experiment Name: At_Drought_P Parameter: Plant Line Value: WS
  misc_feature: MA Experiment 20000437 PARAMETER Experiment Name: At_Drought_P Parameter: Timepoint (hr) Value: 24
  misc_feature: MA Experiment 20000437 PARAMETER Experiment Name: At_Drought_P Parameter: Tissue Value: Whole Plant
  misc_feature: MA Experiment 20000437 PARAMETER Experiment Name: At_Drought_P Parameter: Treatment Value: Drought vs. No Drought
  misc_feature: MA Experiment ID: 20000439 Result: Up-regulated in Transcription
  misc_feature: MA Experiment 20000439 PARAMETER Experiment Name: At_Roots__P Parameter: Age (day) Value: 14 vs. 21
  misc_feature: MA Experiment 20000439 PARAMETER Experiment Name: At_Roots__P Parameter: Organism Value: A. thaliana
  misc_feature: MA Experiment 20000439 PARAMETER Experiment Name: At_Roots__P Parameter: Tissue Value: Roots vs. Whole Plant
  misc_feature: MA Experiment ID: 20000451 Result: Up-regulated in Transcription
  misc_feature: MA Experiment 20000451 PARAMETER Experiment Name: At_CS6879_Shoots-Roots_P Parameter: Age (day) Value: 14
  misc_feature: MA Experiment 20000451 PARAMETER Experiment Name: At_CS6879_Shoots-Roots_P Parameter: Organism Value: A. thaliana
  misc_feature: MA Experiment 20000451 PARAMETER Experiment Name: At_CS6879_Shoots-Roots_P Parameter: Plant Line Value: CS6879 vs. WS
  misc_feature: MA Experiment 20000451 PARAMETER Experiment Name: At_CS6879_Shoots-Roots_P Parameter: Tissue Value: Roots
  misc_feature: MA Experiment ID: 20000452 Result: Up-regulated in Transcription
  misc_feature: MA Experiment 20000452 PARAMETER Experiment Name: At_CS6879_Shoots-Roots_P Parameter: Age (day) Value: 14
  misc_feature: MA Experiment 20000452 PARAMETER Experiment Name: At_CS6879_Shoots-Roots_P Parameter: Organism Value: A. thaliana
  misc_feature: MA Experiment 20000452 PARAMETER Experiment Name: At_CS6879_Shoots-Roots_P Parameter: Plant Line Value: CS6879 vs. WS
  misc_feature: MA Experiment 20000452 PARAMETER Experiment Name: At_CS6879_Shoots-Roots_P Parameter: Tissue Value: Shoots
  misc_feature: MA Experiment ID: 20000453 Result: Up-regulated in Transcription
  misc_feature: MA Experiment 20000453 PARAMETER Experiment Name: At_100uM_ABA_P Parameter: Age (day) Value: 15
  misc_feature: MA Experiment 20000453 PARAMETER Experiment Name: At_100uM_ABA_P Parameter: Organism Value: A. thaliana
  misc_feature: MA Experiment 20000453 PARAMETER Experiment Name: At_100uM_ABA_P Parameter: Plant Line Value: WS
  misc_feature: MA Experiment 20000453 PARAMETER Experiment Name: At_100uM_ABA_P Parameter: Timepoint (hr) Value: 24
  misc_feature: MA Experiment 20000453 PARAMETER Experiment Name: At_100uM_ABA_P Parameter: Tissue Value: Aerial
  misc_feature: MA Experiment 20000453 PARAMETER Experiment Name: At_100uM_ABA_P Parameter: Treatment Value: 100uM ABA vs. No Treatment
  misc_feature: MA Experiment ID: 20000794 Result: Down-regulated in Transcription
  misc_feature: MA Experiment 20000794 PARAMETER Experiment Name: At_Petals_P Parameter: Age (day) Value: 23-25 days
  misc_feature: MA Experiment 20000794 PARAMETER Experiment Name: At_Petals_P Parameter: Plant Line Value: WS
  misc_feature: MA Experiment 20000794 PARAMETER Experiment Name: At_Petals_P Parameter: Tissue Value: Petals vs. Whole plant
  misc_feature: MA Experiment ID: 20001554 Result: Up-regulated in Transcription
  misc_feature: MA Experiment 20001554 PARAMETER Experiment Name: At_Drought_Soil_Dry_P Parameter: Age (day) Value: 21
  misc_feature: MA Experiment 20001554 PARAMETER Experiment Name: At_Drought_Soil_Dry_P Parameter: Organism Value: A. thaliana
  misc_feature: MA Experiment 20001554 PARAMETER Experiment Name: At_Drought_Soil_Dry_P Parameter: Plant Line Value: WS
  misc_feature: MA Experiment 20001554 PARAMETER Experiment Name: At_Drought_Soil_Dry_P Parameter: Post Timepoint (hr) Value: None
  misc_feature: MA Experiment 20001554 PARAMETER Experiment Name: At_Drought_Soil_Dry_P Parameter: Post-Treatment Value: None
  misc_feature: MA Experiment 20001554 PARAMETER Experiment Name: At_Drought_Soil_Dry_P Parameter: Timepoint (day) Value: 7
  misc_feature: MA Experiment 20001554 PARAMETER Experiment Name: At_Drought_Soil_Dry_P Parameter: Treatment Value: Drought vs. No Drought
  misc_feature: MA Experiment ID: 20001773 Result: Down-regulated in Transcription
  misc_feature: MA Experiment 20001773 PARAMETER Experiment Name: At_Far-red-enriched-adult_P Parameter: Age (day) Value: 30
  misc_feature: MA Experiment 20001773 PARAMETER Experiment Name: At_Far-red-enriched-adult_P Parameter: Light Value: Far-red enriched vs. White
  misc_feature: MA Experiment 20001773 PARAMETER Experiment Name: At_Far-red-enriched-adult_P Parameter: Organism Value: A. thaliana
  misc_feature: MA Experiment 20001773 PARAMETER Experiment Name: At_Far-red-enriched-adult_P Parameter: Plant Line Value: Columbia
  misc_feature: MA Experiment 20001773 PARAMETER Experiment Name: At_Far-red-enriched-adult_P Parameter: Timepoint (hr) Value: 48
  misc_feature: MA Experiment 20001773 PARAMETER Experiment Name: At_Far-red-enriched-adult_P Parameter: Tissue Value: Aerial
  misc_feature: MA Experiment ID: 20001904 Result: Up-regulated in Transcription
  misc_feature: MA Experiment 20001904 PARAMETER Experiment Name: At_Drought_Reproduction_P Parameter: Age (day) Value: 37
  misc_feature: MA Experiment 20001904 PARAMETER Experiment Name: At_Drought_Reproduction_P Parameter: Organism Value: A. thaliana
  misc_feature: MA Experiment 20001904 PARAMETER Experiment Name: At_Drought_Reproduction_P Parameter: Plant Line Value: WS
  misc_feature: MA Experiment 20001904 PARAMETER Experiment Name: At_Drought_Reproduction_P Parameter: Timepoint (day) Value: 7
  misc_feature: MA Experiment 20001904 PARAMETER Experiment Name: At_Drought_Reproduction_P Parameter: Tissue Value: Rosettes
  misc_feature: MA Experiment 20001904 PARAMETER Experiment Name: At_Drought_Reproduction_P Parameter: Treatment Value: Drought vs. No Drought
  misc_feature: MA Experiment ID: 20001905 Result: Up-regulated in Transcription
  misc_feature: MA Experiment 20001905 PARAMETER Experiment Name: At_Drought_Reproduction_P Parameter: Age (day) Value: 40
  misc_feature: MA Experiment 20001905 PARAMETER Experiment Name: At_Drought_Reproduction_P Parameter: Organism Value: A. thaliana
  misc_feature: MA Experiment 20001905 PARAMETER Experiment Name: At_Drought_Reproduction_P Parameter: Plant Line Value: WS
  misc_feature: MA Experiment 20001905 PARAMETER Experiment Name: At_Drought_Reproduction_P Parameter: Timepoint (day) Value: 10
  misc_feature: MA Experiment 20001905 PARAMETER Experiment Name: At_Drought_Reproduction_P Parameter: Tissue Value: Rosettes
  misc_feature: MA Experiment 20001905 PARAMETER Experiment Name: At_Drought_Reproduction_P Parameter: Treatment Value: Drought vs. No Drought
aaaacacacacacacaaagggaaagccaaaccggtatattttctttaaacaggatatatagatgaaccaagaagagcacgtaaagcttctgggcttatggggaagtccttttagcaaaagagtagagatggtcctaaaacttaagggcataccttatgagtacattgaagaagatgtttatggaaacaggagccctatgcttctcaagtacaaccctatacacaagaaggtccctgtcctcatccacaatggtagatcgatagccgaatcattggtgattgtcgaatacatcgaagatacgtggaagacaactcacacgatcttgcctcaagatccttatgaacgtgccatggcccggttttgggctaagtatgtggatgaaaaggtaatgttagcagtgaagaaagcttgttggggaccggagagtgaaagagaaaaagaagtgaaagaggcttatgagggtttgaaatgtttagaaaaggagcttggagataaactttttttcggaggagagacaattggatttgtcgatatagcagctgatttcataggatattggttagggattttccaagaagcttcaggcgtcacgatcatgaccgcggaggagtttccaaaacttcaacgttggtcggaagatttcgtgggaaataactttattaaggaagtcttgccccctaaggagaagctcgtggctgttttgaaggccatgtttggaagtgttacatctaattaaacgtaataagaccatcgtaattcattgtttggtaacagaaaaaaattgatatctatgtcatctttatttttatattttcgtcttctttggtaaatgttttcttctatatggttattct

SEQ ID NO: 35041 - protein, 224 aa, Arabidopsis thaliana
  peptide (1)..(224): Ceres Seq. ID no. 12330367
  misc_feature (1)..(224): Homolog of NCBI NO: 15232628 NR Description: glutathione transferase, putative
MNQEEHVKLLGLWGSPFSKRVEMVLKLKGIPYEYIEEDVYGNRSPMLLKYNPIHKKVPVLIHNGRSIAESLVIVEYIEDTWKTTHTILPQDPYERAMARFWAKYVDEKVMLAVKKACWGPESEREKEVKEAYEGLKCLEKELGDKLFFGGETIGFVDIAADFIGYWLGIFQEASGVTIMTAEEFPKLQRWSEDFVGNNFIKEVLPPKEKLVAVLKAMFGSVTSN

SEQ ID NO: 35042 - protein, 202 aa, Arabidopsis thaliana
  peptide (1)..(202): Ceres Seq. ID no. 12330368
  misc_feature (1)..(202): Homolog of NCBI NO: 15232628 NR Description: glutathione transferase, putative
MVLKLKGIPYEYIEEDVYGNRSPMLLKYNPIHKKVPVLIHNGRSIAESLVIVEYIEDTWKTTHTILPQDPYERAMARFWAKYVDEKVMLAVKKACWGPESEREKEVKEAYEGLKCLEKELGDKLFFGGETIGFVDIAADFIGYWLGIFQEASGVTIMTAEEFPKLQRWSEDFVGNNFIKEVLPPKEKLVAVLKAMFGSVTSN

SEQ ID NO: 35043 - protein, 179 aa, Arabidopsis thaliana
  peptide (1)..(179): Ceres Seq. ID no. 12330369
  misc_feature (1)..(179): Homolog of NCBI NO: 15232628 NR Description: glutathione transferase, putative
MLLKYNPIHKKVPVLIHNGRSIAESLVIVEYIEDTWKTTHTILPQDPYERAMARFWAKYVDEKVMLAVKKACWGPESEREKEVKEAYEGLKCLEKELGDKLFFGGETIGFVDIAADFIGYWLGIFQEASGVTIMTAEEFPKLQRWSEDFVGNNFIKEVLPPKEKLVAVLKAMFGSVTSN

SEQ ID NO: 35044 - DNA, 820 bp, Arabidopsis thaliana
  misc_feature (1)..(820): Ceres Seq. ID no. 12579859
  misc_feature: MA Experiment ID: 108461 Result: Up-regulated in Transcription
  misc_feature: MA Experiment 108461 PARAMETER Experiment Name: At_Germinating_Seeds_cDNA_P Parameter: Age (day) Value: 1 vs. 0
  misc_feature: MA Experiment 108461 PARAMETER Experiment Name: At_Germinating_Seeds_cDNA_P Parameter: Tissue Value: Germinating Seeds
  misc_feature: MA Experiment ID: 108573 Result: Down-regulated in Transcription
  misc_feature: MA Experiment 108573 PARAMETER Experiment Name: At_Drought_cDNA_P Parameter: Timepoint (hr) Value: 6
  misc_feature: MA Experiment 108573 PARAMETER Experiment Name: At_Drought_cDNA_P Parameter: Tissue Value: Aerial
  misc_feature: MA Experiment 108573 PARAMETER Experiment Name: At_Drought_cDNA_P Parameter: Treatment Value: Drought vs. No Drought
  misc_feature: MA Experiment ID: 20000111 Result: Down-regulated in Transcription
  misc_feature: MA Experiment 20000111 PARAMETER Experiment Name: At_42deg_Heat_cDNA_P Parameter: Temperature (deg C) Value: 42 vs. 22
  misc_feature: MA Experiment 20000111 PARAMETER Experiment Name: At_42deg_Heat_cDNA_P Parameter: Timepoint (hr) Value: 6
  misc_feature: MA Experiment 20000111 PARAMETER Experiment Name: At_42deg_Heat_cDNA_P Parameter: Tissue Value: Aerial
  misc_feature: MA Experiment ID: 20000113 Result: Down-regulated in Transcription
  misc_feature: MA Experiment 20000113 PARAMETER Experiment Name: At_42deg_Heat_cDNA_P Parameter: Temperature (deg C) Value: 42 vs. 22
  misc_feature: MA Experiment 20000113 PARAMETER Experiment Name: At_42deg_Heat_cDNA_P Parameter: Timepoint (hr) Value: 8
  misc_feature: MA Experiment 20000113 PARAMETER Experiment Name: At_42deg_Heat_cDNA_P Parameter: Tissue Value: Aerial
  misc_feature: MA Experiment ID: 20000179 Result: Up-regulated in Transcription
  misc_feature: MA Experiment 20000179 PARAMETER Experiment Name: At_Germinating_Seeds_P Parameter: Age (hr) Value: 6 vs. 0
  misc_feature: MA Experiment 20000179 PARAMETER Experiment Name: At_Germinating_Seeds_P Parameter: Tissue Value: Germinating Seeds
  misc_feature: MA Experiment ID: 20000180 Result: Up-regulated in Transcription
  misc_feature: MA Experiment 20000180 PARAMETER Experiment Name: At_Germinating_Seeds_P Parameter: Age (hr) Value: 24 vs. 0
  misc_feature: MA Experiment 20000180 PARAMETER Experiment Name: At_Germinating_Seeds_P Parameter: Tissue Value: Germinating Seeds
  misc_feature: MA Experiment ID: 20001905 Result: Down-regulated in Transcription
  misc_feature: MA Experiment 20001905 PARAMETER Experiment Name: At_Drought_Reproduction_P Parameter: Age (day) Value: 40
  misc_feature: MA Experiment 20001905 PARAMETER Experiment Name: At_Drought_Reproduction_P Parameter: Organism Value: A. thaliana
  misc_feature: MA Experiment 20001905 PARAMETER Experiment Name: At_Drought_Reproduction_P Parameter: Plant Line Value: WS
  misc_feature: MA Experiment 20001905 PARAMETER Experiment Name: At_Drought_Reproduction_P Parameter: Timepoint (day) Value: 10
  misc_feature: MA Experiment 20001905 PARAMETER Experiment Name: At_Drought_Reproduction_P Parameter: Tissue Value: Rosettes
  misc_feature: MA Experiment 20001905 PARAMETER Experiment Name: At_Drought_Reproduction_P Parameter: Treatment Value: Drought vs. No Drought
  misc_feature: MA Experiment ID: 20001911 Result: Down-regulated in Transcription
  misc_feature: MA Experiment 20001911 PARAMETER Experiment Name: At_Drought_Reproduction_P Parameter: Age (day) Value: 40
  misc_feature: MA Experiment 20001911 PARAMETER Experiment Name: At_Drought_Reproduction_P Parameter: Organism Value: A. thaliana
  misc_feature: MA Experiment 20001911 PARAMETER Experiment Name: At_Drought_Reproduction_P Parameter: Plant Line Value: WS
  misc_feature: MA Experiment 20001911 PARAMETER Experiment Name: At_Drought_Reproduction_P Parameter: Timepoint (day) Value: 10
  misc_feature: MA Experiment 20001911 PARAMETER Experiment Name: At_Drought_Reproduction_P Parameter: Tissue Value: Flowers
  misc_feature: MA Experiment 20001911 PARAMETER Experiment Name: At_Drought_Reproduction_P Parameter: Treatment Value: Drought vs. No Drought
  misc_feature: Phenotype: ROSETTE LEAVES Shape-Lanceolate
  misc_feature: Phenotype: ROSETTE LEAVES Shape-Lanceolate
  misc_feature: Phenotype: WHOLE PLANT Size-Small
  misc_feature: Phenotype: ROSETTE LEAVES Petiole Length-Short Petioles
  misc_feature: Phenotype: CAULINE LEAVES Size-Large
  misc_feature: Phenotype: FLOWERS Size-Large
  misc_feature: Phenotype: FLOWERS Other
  misc_feature: Phenotype: INFLORESCENCE Other
aatcaaatcaaatctgtgtttcattctcttctccactgaaacgcgtttgaaggagaagggtcaaagggatctgatcctatcactttcgctgggaaaaacacgaaatcgaaggaagaatcaatcatgggtttcatcggataaactgtagattccatcaaatctatcaagatccgtcaagttctcactcaggctatcactctcggtatgatcgttacatctgcattgataatttggaaggcattgatatgtgtcactggcagtgaatcaccagtggttgttgttctctctgaaagtatggaacctggctttcagagaggagatatattgttcttgcggatgactgatgagcctattcgagcaggcgagattgttgtgttcagtgttgatggtcgtgaaattcccattgttcatcgagcaatcaaagttcatgagagaggagatactaaagcagttgatgttctaacaaaaggtgacaacaatgacattgatgacattggtctctatgctgaaggacagctttggcttcacaggcatcatatcatgggcagagctgttggattcttgccttatgttggatgggttactattatcatgacagaaaagcctatcatcaagtatatactcattggtgcattgggtttgctcgttataacatcgaaagactaagactacataacaagctggtcgttggtaaggaggtagcttctgcaacgctcgggtcatcatctttgtagccatcatctttgaaactgtagaatcatataaacctcaacttataattatagacacttttatctttaaatcagctacgttttgtggc

SEQ ID NO: 35045 - protein, 153 aa, Arabidopsis thaliana
  peptide (1)..(153): Ceres Seq. ID no. 12579860
  misc_feature (1)..(130): Pfam Name: Signal peptidase I Pfam Description: Signal peptidase I
  misc_feature (1)..(153): Homolog of NCBI NO: 38511785 NR Description: Signal peptidase complex (18kD) [Silurana
  misc_feature (1)..(153): Homolog of NCBI NO: 32484220 NR Description: Unknown (protein for MGC:64284) [Xenopus laevis]
  misc_feature (1)..(153): Homolog of NCBI NO: 21313554 NR Description: RIKEN cDNA 1810029G24 [Mus musculus]
  misc_feature (1)..(153): Homolog of NCBI NO: 134792 NR Description: Microsomal signal peptidase 21 kDa subunit (SPase
  misc_feature (1)..(153): Homolog of NCBI NO: 24025634 NR Description: signal peptidase 21kDa subunit [Rattus
  misc_feature (1)..(153): Homolog of NCBI NO: 15150809 NR Description: similar to signal peptidase complex (18kD) [Homo
  misc_feature (1)..(153): Homolog of NCBI NO: 31207577 NR Description: ENSANGP00000020448 [Anopheles gambiae]
  misc_feature (1)..(153): Homolog of NCBI NO: 31195617 NR Description: ENSANGP00000013674 [Anopheles gambiae]
  misc_feature (1)..(153): Homolog of NCBI NO: 15219044 NR Description: signal peptidase subunit, putative
  misc_feature (1)..(153): Homolog of NCBI NO: 18400874 NR Description: putative signal peptidase 21kDa subunit
MIVTSALIIWKALICVTGSESPVVVVLSESMEPGFQRGDILFLRMTDEPIRAGEIVVFSVDGREIPIVHRAIKVHERGDTKAVDVLTKGDNNDIDDIGLYAEGQLWLHRHHIMGRAVGFLPYVGWVTIIMTEKPIIKYILIGALGLLVITSKD

SEQ ID NO: 35046 - protein, 123 aa, Arabidopsis thaliana
  peptide (1)..(123): Ceres Seq. ID no. 12579861
  misc_feature (1)..(100): Pfam Name: Signal peptidase I Pfam Description: Signal peptidase I
  misc_feature (1)..(123): Homolog of NCBI NO: 38511785 NR Description: Signal peptidase complex (18kD) [Silurana
  misc_feature (1)..(123): Homolog of NCBI NO: 32484220 NR Description: Unknown (protein for MGC:64284) [Xenopus laevis]
  misc_feature (1)..(123): Homolog of NCBI NO: 21313554 NR Description: RIKEN cDNA 1810029G24 [Mus musculus]
  misc_feature (1)..(123): Homolog of NCBI NO: 134792 NR Description: Microsomal signal peptidase 21 kDa subunit (SPase
  misc_feature (1)..(123): Homolog of NCBI NO: 24025634 NR Description: signal peptidase 21kDa subunit [Rattus
  misc_feature (1)..(123): Homolog of NCBI NO: 15150809 NR Description: similar to signal peptidase complex (18kD) [Homo
  misc_feature (1)..(123): Homolog of NCBI NO: 31207577 NR Description: ENSANGP00000020448 [Anopheles gambiae]
  misc_feature (1)..(123): Homolog of NCBI NO: 31195617 NR Description: ENSANGP00000013674 [Anopheles gambiae]
  misc_feature (1)..(123): Homolog of NCBI NO: 15219044 NR Description: signal peptidase subunit, putative
  misc_feature (1)..(123): Homolog of NCBI NO: 18400874 NR Description: putative signal peptidase 21kDa subunit
MEPGFQRGDILFLRMTDEPIRAGEIVVFSVDGREIPIVHRAIKVHERGDTKAVDVLTKGDNNDIDDIGLYAEGQLWLHRHHIMGRAVGFLPYVGWVTIIMTEKPIIKYILIGALGLLVITSKD

SEQ ID NO: 35047 - protein, 109 aa, Arabidopsis thaliana
  peptide (1)..(109): Ceres Seq. ID no. 12579862
  misc_feature (1)..(86): Pfam Name: Signal peptidase I Pfam Description: Signal peptidase I
  misc_feature (1)..(109): Homolog of NCBI NO: 38511785 NR Description: Signal peptidase complex (18kD) [Silurana
  misc_feature (1)..(109): Homolog of NCBI NO: 32484220 NR Description: Unknown (protein for MGC:64284) [Xenopus laevis]
  misc_feature (1)..(109): Homolog of NCBI NO: 21313554 NR Description: RIKEN cDNA 1810029G24 [Mus musculus]
  misc_feature (1)..(109): Homolog of NCBI NO: 134792 NR Description: Microsomal signal peptidase 21 kDa subunit (SPase
  misc_feature (1)..(109): Homolog of NCBI NO: 24025634 NR Description: signal peptidase 21kDa subunit [Rattus
  misc_feature (1)..(109): Homolog of NCBI NO: 15150809 NR Description: similar to signal peptidase complex (18kD) [Homo
  misc_feature (1)..(109): Homolog of NCBI NO: 31207577 NR Description: ENSANGP00000020448 [Anopheles gambiae]
  misc_feature (1)..(109): Homolog of NCBI NO: 31195617 NR Description: ENSANGP00000013674 [Anopheles gambiae]
  misc_feature (1)..(109): Homolog of NCBI NO: 15219044 NR Description: signal peptidase subunit, putative
  misc_feature (1)..(109): Homolog of NCBI NO: 18400874 NR Description: putative signal peptidase 21kDa subunit
MTDEPIRAGEIVVFSVDGREIPIVHRAIKVHERGDTKAVDVLTKGDNNDIDDIGLYAEGQLWLHRHHIMGRAVGFLPYVGWVTIIMTEKPIIKYILIGALGLLVITSKD

SEQ ID NO: 35048 - DNA, 721 bp, Arabidopsis thaliana
  misc_feature (1)..(721): Ceres Seq. ID no. 12370040
  misc_feature: MA Experiment ID: 108433 Result: Up-regulated in Transcription
  misc_feature: MA Experiment 108433 PARAMETER Experiment Name: At_rhl_Mutant2_cDNA_P Parameter: Age (day) Value: 7
  misc_feature: MA Experiment 108433 PARAMETER Experiment Name: At_rhl_Mutant2_cDNA_P Parameter: Organism Value: A. thaliana
  misc_feature: MA Experiment 108433 PARAMETER Experiment Name: At_rhl_Mutant2_cDNA_P Parameter: Plant Line Value: rhl Mutant vs. wt landsburg
  misc_feature: MA Experiment 108433 PARAMETER Experiment Name: At_rhl_Mutant2_cDNA_P Parameter: Tissue Value: Roots
  misc_feature: MA Experiment ID: 108434 Result: Down-regulated in Transcription
  misc_feature: MA Experiment 108434 PARAMETER Experiment Name: At_Root_Tips_cDNA_P Parameter: Tissue Value: Root Tips
  misc_feature: MA Experiment ID: 108462 Result: Up-regulated in Transcription
  misc_feature: MA Experiment 108462 PARAMETER Experiment Name: At_Germinating_Seeds_cDNA_P Parameter: Age (day) Value: 2 vs. 0
  misc_feature: MA Experiment 108462 PARAMETER Experiment Name: At_Germinating_Seeds_cDNA_P Parameter: Tissue Value: Germinating Seeds
  misc_feature: MA Experiment ID: 108464 Result: Up-regulated in Transcription
  misc_feature: MA Experiment 108464 PARAMETER Experiment Name: At_Germinating_Seeds_cDNA_P Parameter: Age (day) Value: 4 vs. 0
  misc_feature: MA Experiment 108464 PARAMETER Experiment Name: At_Germinating_Seeds_cDNA_P Parameter: Tissue Value: Germinating Seeds
  misc_feature: MA Experiment ID: 108585 Result: Up-regulated in Transcription
  misc_feature: MA Experiment 108585 PARAMETER Experiment Name: At_5mM_NaNP_cDNA_P Parameter: Timepoint (hr) Value: 6
  misc_feature: MA Experiment 108585 PARAMETER Experiment Name: At_5mM_NaNP_cDNA_P Parameter: Tissue Value: Aerial
  misc_feature: MA Experiment 108585 PARAMETER Experiment Name: At_5mM_NaNP_cDNA_P Parameter: Treatment Value: null
  misc_feature: MA Experiment ID: 20000071 Result: Up-regulated in Transcription
  misc_feature: MA Experiment 20000071 PARAMETER Experiment Name: At_100uM_ABA_Mutants_cDNA_P Parameter: Plant Line Value: CS8104
  misc_feature: MA Experiment 20000071 PARAMETER Experiment Name: At_100uM_ABA_Mutants_cDNA_P Parameter: Timepoint (hr) Value: 6
  misc_feature: MA Experiment 20000071 PARAMETER Experiment Name: At_100uM_ABA_Mutants_cDNA_P Parameter: Tissue Value: Aerial
  misc_feature: MA Experiment 20000071 PARAMETER Experiment Name: At_100uM_ABA_Mutants_cDNA_P Parameter: Treatment Value: 100uM ABA vs. No Treatment
  misc_feature: MA Experiment ID: 20000090 Result: Up-regulated in Transcription
  misc_feature: MA Experiment ID: 20000111 Result: Down-regulated in Transcription
  misc_feature: MA Experiment 20000111 PARAMETER Experiment Name: At_42deg_Heat_cDNA_P Parameter: Temperature (deg C) Value: 42 vs. 22
  misc_feature: MA Experiment 20000111 PARAMETER Experiment Name: At_42deg_Heat_cDNA_P Parameter: Timepoint (hr) Value: 6
  misc_feature: MA Experiment 20000111 PARAMETER Experiment Name: At_42deg_Heat_cDNA_P Parameter: Tissue Value: Aerial
aaacacaattataaatctcaccattttttattatacacactttattcttgtctctatagttccacatctcaatctagctctcttctctatctttctctaaatcatgggtcttcctgaagatttcatcaccgagcttcagattccaggttacatattaaagatactttacgtcatcggtttctttagagacatggtcgatgctctttgtccttacattggtctacctagttttctagaccacaacgagacctctggacccgatccgacccgacacgctctctctacgtcagcgagtcttgctaacgagttgatcccggtggttcggttctcggatcttccgaccgatccggaagattgttgtacggtttgtttgtcagattttgagtccgacgataaggttaggcagctacccaagtgtggacacgtgtttcatcatcattgtttagaccgttggatcgttgactacaacaagatgaaatgtccggtttgtcggcaccggttcttaccgaaagaaaagtacacgcaatgtgattggggttctggttcagattggtttagtgatgaagtggaaagtaccaactaattggtagttttaatctatgtcggcagaatgtttgttgtattaattccagtataactctatgtatattagcatagatcatctttttgtgatggaacaacactatatatctttatacaaaaaaaaaacactatatatatt

SEQ ID NO: 35049 - protein, 159 aa, Arabidopsis thaliana
  peptide (1)..(159): Ceres Seq. ID no. 12370041
  misc_feature (86)..(129): Pfam Name: Zinc finger, C3HC4 type (RING finger) Pfam Description: Zinc finger, C3HC4 type (RING finger)
  misc_feature (54)..(136): Homolog of NCBI NO: 15234955 NR Description: putative protein; protein id: At4g10150.1
  misc_feature (44)..(159): Homolog of NCBI NO: 15234956 NR Description: putative protein; protein id: At4g10160.1
  misc_feature (3)..(137): Homolog of NCBI NO: 21554155 NR Description: RING zinc finger protein-like [Arabidopsis
  misc_feature (62)..(137): Homolog of NCBI NO: 15238072 NR Description: RING zinc finger protein-like
  misc_feature (1)..(146): Homolog of NCBI NO: 15233117 NR Description: RING finger protein
  misc_feature (1)..(148): Homolog of NCBI NO: 15222553 NR Description: putative RING zinc finger protein
  misc_feature (1)..(159): Homolog of NCBI NO: 15233350 NR Description: RING-H2 finger protein RHA1b
  misc_feature (1)..(159): Homolog of NCBI NO: 11358777 NR Description: RING-H2 finger protein RHA1b [imported] -
  misc_feature (1)..(159): Homolog of NCBI NO: 15233352 NR Description: RING-H2 finger protein RHA1a -like protein
  misc_feature (1)..(159): Homolog of NCBI NO: 11358776 NR Description: RING-H2 finger protein RHA1a [imported] -
MGLPEDFITELQIPGYILKILYVIGFFRDMVDALCPYIGLPSFLDHNETSGPDPTRHALSTSASLANELIPVVRFSDLPTDPEDCCTVCLSDFESDDKVRQLPKCGHVFHHHCLDRWIVDYNKMKCPVCRHRFLPKEKYTQCDWGSGSDWFSDEVESTN

SEQ ID NO: 35050 - protein, 130 aa, Arabidopsis thaliana
  peptide (1)..(130): Ceres Seq. ID no. 12370042
  misc_feature (57)..(100): Pfam Name: Zinc finger, C3HC4 type (RING finger) Pfam Description: Zinc finger, C3HC4 type (RING finger)
  misc_feature (25)..(107): Homolog of NCBI NO: 15234955 NR Description: putative protein; protein id: At4g10150.1
  misc_feature (15)..(130): Homolog of NCBI NO: 15234956 NR Description: putative protein; protein id: At4g10160.1
  misc_feature (1)..(108): Homolog of NCBI NO: 21554155 NR Description: RING zinc finger protein-like [Arabidopsis
  misc_feature (33)..(108): Homolog of NCBI NO: 15238072 NR Description: RING zinc finger protein-like
  misc_feature (1)..(117): Homolog of NCBI NO: 15233117 NR Description: RING finger protein
  misc_feature (1)..(119): Homolog of NCBI NO: 15222553 NR Description: putative RING zinc finger protein
  misc_feature (1)..(130): Homolog of NCBI NO: 15233350 NR Description: RING-H2 finger protein RHA1b
  misc_feature (1)..(130): Homolog of NCBI NO: 11358777 NR Description: RING-H2 finger protein RHA1b [imported] -
  misc_feature (1)..(130): Homolog of NCBI NO: 15233352 NR Description: RING-H2 finger protein RHA1a -like protein
  misc_feature (1)..(130): Homolog of NCBI NO: 11358776 NR Description: RING-H2 finger protein RHA1a [imported] -
MVDALCPYIGLPSFLDHNETSGPDPTRHALSTSASLANELIPVVRFSDLPTDPEDCCTVCLSDFESDDKVRQLPKCGHVFHHHCLDRWIVDYNKMKCPVCRHRFLPKEKYTQCDWGSGSDWFSDEVESTN

SEQ ID NO: 35051 - DNA, 825 bp, Arabidopsis thaliana
  misc_feature (1)..(825): Ceres Seq. ID no. 12332027
  misc_feature: MA Experiment ID: 108464 Result: Down-regulated in Transcription
  misc_feature: MA Experiment 108464 PARAMETER Experiment Name: At_Germinating_Seeds_cDNA_P Parameter: Age (day) Value: 4 vs. 0
  misc_feature: MA Experiment 108464 PARAMETER Experiment Name: At_Germinating_Seeds_cDNA_P Parameter: Tissue Value: Germinating Seeds
  misc_feature: MA Experiment ID: 20000113 Result: Up-regulated in Transcription
  misc_feature: MA Experiment 20000113 PARAMETER Experiment Name: At_42deg_Heat_cDNA_P Parameter: Temperature (deg C) Value: 42 vs. 22
  misc_feature: MA Experiment 20000113 PARAMETER Experiment Name: At_42deg_Heat_cDNA_P Parameter: Timepoint (hr) Value: 8
  misc_feature: MA Experiment 20000113 PARAMETER Experiment Name: At_42deg_Heat_cDNA_P Parameter: Tissue Value: Aerial
  misc_feature: MA Experiment ID: 20000184 Result: Down-regulated in Transcription
  misc_feature: MA Experiment 20000184 PARAMETER Experiment Name: At_Shoots__P Parameter: Age (day) Value: 7
  misc_feature: MA Experiment 20000184 PARAMETER Experiment Name: At_Shoots__P Parameter: Tissue Value: Shoots vs. Whole Plant
  misc_feature: MA Experiment ID: 20000224 Result: Up-regulated in Transcription
  misc_feature: MA Experiment ID: 20001451 Result: Up-regulated in Transcription
  misc_feature: MA Experiment 20001451 PARAMETER Experiment Name: At_Far-red-induction_P Parameter: Age (day) Value: 7
  misc_feature: MA Experiment 20001451 PARAMETER Experiment Name: At_Far-red-induction_P Parameter: Light Value: Far-red vs. White
  misc_feature: MA Experiment 20001451 PARAMETER Experiment Name: At_Far-red-induction_P Parameter: Organism Value: A. thaliana
  misc_feature: MA Experiment 20001451 PARAMETER Experiment Name: At_Far-red-induction_P Parameter: Plant Line Value: Columbia
  misc_feature: MA Experiment 20001451 PARAMETER Experiment Name: At_Far-red-induction_P Parameter: Timepoint (hr) Value: 24
  misc_feature: MA Experiment 20001451 PARAMETER Experiment Name: At_Far-red-induction_P Parameter: Tissue Value: Whole Plant
agtcgcagtttcgcagctgtaacaagatttcttctggcgaagaagagagaatcgccgttcaccgattcgtttctttgttcatctcctcccaggtaattatgggagatttctcgattcagatcagttctaagctgatcaatcagctagctgaaggtaacgatcaaccaaagaggagggcaaagaaaaccaaacctaaagtctcaccacagagcaaacagaaaacaaaccaagatgaagagaagaaacctaatccagtggctgaattaccgatgcagccaccgtttttcttcccaataccaccacaaggagcagcaagcacagagctggaatcgataaaatccgttgtgaaagagagtgagaaggttcttgagaagctggagttacaagagaagaacattgttcgtgaagttacggagagagccaaggatctgagggagaaagagtttaagatcccggaacctaaaccaatgccttgttcgtcagatcacgaagcctggatgaaatgctacaaggagaacatcggtagtccgttgaaatgtagcggtttcgttaagagtttccaggattgtgcacgccggtccagacagcaagtgaatcctgaagaaaagtagagataataagattcaaaaggacttttttgagacacgaagggaatagtttttgctttctgagatcatatgaatgacacagaagaattgtgcttgtttccttttgatttcatgaaagcaaaaaagaaagaaaaaaaataagcagaatctgtgattatgttcatgagataaaactttcaaaactatgttcttgattaactattttggcttatcttct

SEQ ID NO: 35052 - protein, 202 aa, Arabidopsis thaliana
  peptide (1)..(202): Ceres Seq. ID no. 12332028
  misc_feature (33)..(202): Homolog of NCBI NO: 18413789 NR Description: expressed protein
SQFRSCNKISSGEEERIAVHRFVSLFISSQVIMGDFSIQISSKLINQLAEGNDQPKRRAKKTKPKVSPQSKQKTNQDEEKKPNPVAELPMQPPFFFPIPPQGAASTELESIKSVVKESEKVLEKLELQEKNIVREVTERAKDLREKEFKIPEPKPMPCSSDHEAWMKCYKENIGSPLKCSGFVKSFQDCARRSRQQVNPEEK

SEQ ID NO: 35053 - protein, 170 aa, Arabidopsis thaliana
  peptide (1)..(170): Ceres Seq. ID no. 12332029
  misc_feature (1)..(170): Homolog of NCBI NO: 18413789 NR Description: expressed protein
MGDFSIQISSKLINQLAEGNDQPKRRAKKTKPKVSPQSKQKTNQDEEKKPNPVAELPMQPPFFFPIPPQGAASTELESIKSVVKESEKVLEKLELQEKNIVREVTERAKDLREKEFKIPEPKPMPCSSDHEAWMKCYKENIGSPLKCSGFVKSFQDCARRSRQQVNPEEK

SEQ ID NO: 35054 - protein, 113 aa, Arabidopsis thaliana
  peptide (1)..(113): Ceres Seq. ID no. 12332030
  misc_feature (1)..(113): Homolog of NCBI NO: 18413789 NR Description: expressed protein
MQPPFFFPIPPQGAASTELESIKSVVKESEKVLEKLELQEKNIVREVTERAKDLREKEFKIPEPKPMPCSSDHEAWMKCYKENIGSPLKCSGFVKSFQDCARRSRQQVNPEEK

SEQ ID NO: 35055 - DNA, 985 bp, Arabidopsis thaliana
  misc_feature (1)..(985): Ceres Seq. ID no. 13496830
  misc_feature: MA Experiment ID: 108463 Result: Up-regulated in Transcription
  misc_feature: MA Experiment 108463 PARAMETER Experiment Name: At_Germinating_Seeds_cDNA_P Parameter: Age (day) Value: 3 vs. 0
  misc_feature: MA Experiment 108463 PARAMETER Experiment Name: At_Germinating_Seeds_cDNA_P Parameter: Tissue Value: Germinating Seeds
  misc_feature: MA Experiment ID: 108464 Result: Up-regulated in Transcription
  misc_feature: MA Experiment 108464 PARAMETER Experiment Name: At_Germinating_Seeds_cDNA_P Parameter: Age (day) Value: 4 vs. 0
  misc_feature: MA Experiment 108464 PARAMETER Experiment Name: At_Germinating_Seeds_cDNA_P Parameter: Tissue Value: Germinating Seeds
  misc_feature: MA Experiment ID: 108573 Result: Up-regulated in Transcription
  misc_feature: MA Experiment 108573 PARAMETER Experiment Name: At_Drought_cDNA_P Parameter: Timepoint (hr) Value: 6
  misc_feature: MA Experiment 108573 PARAMETER Experiment Name: At_Drought_cDNA_P Parameter: Tissue Value: Aerial
  misc_feature: MA Experiment 108573 PARAMETER Experiment Name: At_Drought_cDNA_P Parameter: Treatment Value: Drought vs. No Drought
  misc_feature: MA Experiment ID: 108595 Result: Down-regulated in Transcription
  misc_feature: MA Experiment 108595 PARAMETER Experiment Name: At_Ler-pi_Ovule_cDNA_P Parameter: Plant Line Value: null
  misc_feature: MA Experiment ID: 20000179 Result: Up-regulated in Transcription
  misc_feature: MA Experiment 20000179 PARAMETER Experiment Name: At_Germinating_Seeds_P Parameter: Age (hr) Value: 6 vs. 0
  misc_feature: MA Experiment 20000179 PARAMETER Experiment Name: At_Germinating_Seeds_P Parameter: Tissue Value: Germinating Seeds
  misc_feature: MA Experiment ID: 20000180 Result: Up-regulated in Transcription
  misc_feature: MA Experiment 20000180 PARAMETER Experiment Name: At_Germinating_Seeds_P Parameter: Age (hr) Value: 24 vs. 0
  misc_feature: MA Experiment 20000180 PARAMETER Experiment Name: At_Germinating_Seeds_P Parameter: Tissue Value: Germinating Seeds
  misc_feature: MA Experiment ID: 20000185 Result: Down-regulated in Transcription
  misc_feature: MA Experiment 20000185 PARAMETER Experiment Name: At_Roots__P Parameter: Age (day) Value: 7 vs. 21
  misc_feature: MA Experiment 20000185 PARAMETER Experiment Name: At_Roots__P Parameter: Organism Value: A. thaliana
  misc_feature: MA Experiment 20000185 PARAMETER Experiment Name: At_Roots__P Parameter: Tissue Value: Roots vs. Whole Plant
  misc_feature: MA Experiment ID: 20000439 Result: Down-regulated in Transcription
  misc_feature: MA Experiment 20000439 PARAMETER Experiment Name: At_Roots__P Parameter: Age (day) Value: 14 vs. 21
  misc_feature: MA Experiment 20000439 PARAMETER Experiment Name: At_Roots__P Parameter: Organism Value: A. thaliana
  misc_feature: MA Experiment 20000439 PARAMETER Experiment Name: At_Roots__P Parameter: Tissue Value: Roots vs. Whole Plant
  misc_feature: MA Experiment ID: 20001559 Result: Down-regulated in Transcription
  misc_feature: MA Experiment 20001559 PARAMETER Experiment Name: At_Drought_Soil_Dry_P Parameter: Age (day) Value: 28
  misc_feature: MA Experiment 20001559 PARAMETER Experiment Name: At_Drought_Soil_Dry_P Parameter: Organism Value: A. thaliana
  misc_feature: MA Experiment 20001559 PARAMETER Experiment Name: At_Drought_Soil_Dry_P Parameter: Plant Line Value: WS
  misc_feature: MA Experiment 20001559 PARAMETER Experiment Name: At_Drought_Soil_Dry_P Parameter: Post Timepoint (hr) Value: 29
  misc_feature: MA Experiment 20001559 PARAMETER Experiment Name: At_Drought_Soil_Dry_P Parameter: Post-Treatment Value: Re-Water vs. No Drought
  misc_feature: MA Experiment 20001559 PARAMETER Experiment Name: At_Drought_Soil_Dry_P Parameter: Timepoint (day) Value: 14
  misc_feature: MA Experiment 20001559 PARAMETER Experiment Name: At_Drought_Soil_Dry_P Parameter: Treatment Value: Drought vs. No Drought
gtcacgacctttttgatccaaaaatcaaaatccaaaaccgaccaatggataccaacaaccagcaaccacctccctccgccgccggaatccctcctccaccacctggaaccaccatctccgccgcaggaggaggagcttcttaccaccaccttctccaacaacaacaacaacagctccaactattctggacctaccaacgccaagagatcgaacaagttaacgatttcaaaaaccatcagcttccactagctaggataaaaaagatcatgaaagccgatgaagatgttcgtatgatctccgcagaagcaccgattctcttcgcgaaagcttgtgagcttttcattctcgagctcacgatcagatcttggcttcacgctgaggagaataaacgtcgtacgcttcagaaaaacgatatcgctgctgcgattactaggactgatatcttcgatttccttgttgatattgttcctagagatgagattaaggacgaagccgcagtcctcggtggtggaatggtggtggctcctaccgcgagcggcgtgccttactattatccgccgatgggacaaccagctggtcctggagggatgatgattgggagaccagctatggatccgaatggtgtttatgtccagcctccgtctcaggcgtggcagagtgtttggcagacttcgacggggacgggagatgatgtctcttatggtagtggtggaagttccggtcaagggaatctcgacggccaaggttaagctcagagtattccagatgatgcttgacctgcttgaagatagcagatattagtcgacctcgccttgaattttggatgtgtttgatagattatgcctaaattcaatgaaaaggcttcgttaaagaagagtaaaaaaaactcttgtttctctctgttaacgtatatgttattgtagcaaaaccatcattgctgcgacttagcctaactatatataatctaatgtgcagtttctattgg

SEQ ID NO: 35056 - protein, 248 aa, Arabidopsis thaliana
  peptide (1)..(248): Ceres Seq. ID no. 13496831
  misc_feature (23)..(191): Homolog of NCBI NO: 5257260 NR Description: Similar to sequence of BAC F7G19 from Arabidopsis
  misc_feature (23)..(184): Homolog of NCBI NO: 21554704 NR Description: transcription factor, putative [Arabidopsis
  misc_feature (23)..(184): Homolog of NCBI NO: 15223482 NR Description: transcription factor Hap5a, putative [Arabidopsis
  misc_feature (33)..(218): Homolog of NCBI NO: 6289057 NR Description: heme activated protein [Arabidopsis thaliana]
  misc_feature (36)..(218): Homolog of NCBI NO: 25372763 NR Description: hypothetical protein [imported] - Arabidopsis
  misc_feature (33)..(218): Homolog of NCBI NO: 15223986 NR Description: transcription factor Hap5a, putative [Arabidopsis
  misc_feature (15)..(218): Homolog of NCBI NO: 15221912 NR Description: transcription factor Hap5a, putative [Arabidopsis
  misc_feature (94)..(248): Homolog of NCBI NO: 2398531 NR Description: Transcription factor [Arabidopsis thaliana]
  misc_feature (16)..(248): Homolog of NCBI NO: 15242784 NR Description: transcription factor Hap5a, putative [Arabidopsis
  misc_feature (15)..(248): Homolog of NCBI NO: 15228405 NR Description: transcription factor Hap5a, putative [Arabidopsis
HDLFDPKIKIQNRPMDTNNQQPPPSAAGIPPPPPGTTISAAGGGASYHHLLQQQQQQLQLFWTYQRQEIEQVNDFKNHQLPLARIKKIMKADEDVRMISAEAPILFAKACELFILELTIRSWLHAEENKRRTLQKNDIAAAITRTDIFDFLVDIVPRDEIKDEAAVLGGGMVVAPTASGVPYYYPPMGQPAGPGGMMIGRPAMDPNGVYVQPPSQAWQSVWQTSTGTGDDVSYGSGGSSGQGNLDGQG

SEQ ID NO: 35057 - protein, 234 aa, Arabidopsis thaliana
  peptide (1)..(234): Ceres Seq. ID no. 13496832
  misc_feature (9)..(177): Homolog of NCBI NO: 5257260 NR Description: Similar to sequence of BAC F7G19 from Arabidopsis
  misc_feature (9)..(170): Homolog of NCBI NO: 21554704 NR Description: transcription factor, putative [Arabidopsis
  misc_feature (9)..(170): Homolog of NCBI NO: 15223482 NR Description: transcription factor Hap5a, putative [Arabidopsis
  misc_feature (19)..(204): Homolog of NCBI NO: 6289057 NR Description: heme activated protein [Arabidopsis thaliana]
  misc_feature (22)..(204): Homolog of NCBI NO: 25372763 NR Description: hypothetical protein [imported] - Arabidopsis
  misc_feature (19)..(204): Homolog of NCBI NO: 15223986 NR Description: transcription factor Hap5a, putative [Arabidopsis
  misc_feature (1)..(204): Homolog of NCBI NO: 15221912 NR Description: transcription factor Hap5a, putative [Arabidopsis
  misc_feature (80)..(234): Homolog of NCBI NO: 2398531 NR Description: Transcription factor [Arabidopsis thaliana]
  misc_feature (2)..(234): Homolog of NCBI NO: 15242784 NR Description: transcription factor Hap5a, putative [Arabidopsis
  misc_feature (1)..(234): Homolog of NCBI NO: 15228405 NR Description: transcription factor Hap5a, putative [Arabidopsis
MDTNNQQPPPSAAGIPPPPPGTTISAAGGGASYHHLLQQQQQQLQLFWTYQRQEIEQVNDFKNHQLPLARIKKIMKADEDVRMISAEAPILFAKACELFILELTIRSWLHAEENKRRTLQKNDIAAAITRTDIFDFLVDIVPRDEIKDEAAVLGGGMVVAPTASGVPYYYPPMGQPAGPGGMMIGRPAMDPNGVYVQPPSQAWQSVWQTSTGTGDDVSYGSGGSSGQGNLDGQG

SEQ ID NO: 35058 - protein, 160 aa, Arabidopsis thaliana
  peptide (1)..(160): Ceres Seq. ID no. 13496833
  misc_feature (1)..(103): Homolog of NCBI NO: 5257260 NR Description: Similar to sequence of BAC F7G19 from Arabidopsis
  misc_feature (1)..(96): Homolog of NCBI NO: 21554704 NR Description: transcription factor, putative [Arabidopsis
  misc_feature (1)..(96): Homolog of NCBI NO: 15223482 NR Description: transcription factor Hap5a, putative [Arabidopsis
  misc_feature (1)..(130): Homolog of NCBI NO: 6289057 NR Description: heme activated protein [Arabidopsis thaliana]
  misc_feature (1)..(130): Homolog of NCBI NO: 25372763 NR Description: hypothetical protein [imported] - Arabidopsis
  misc_feature (1)..(130): Homolog of NCBI NO: 15223986 NR Description: transcription factor Hap5a, putative [Arabidopsis
  misc_feature (1)..(130): Homolog of NCBI NO: 15221912 NR Description: transcription factor Hap5a, putative [Arabidopsis
  misc_feature (6)..(160): Homolog of NCBI NO: 2398531 NR Description: Transcription factor [Arabidopsis thaliana]
  misc_feature (1)..(160): Homolog of NCBI NO: 15242784 NR Description: transcription factor Hap5a, putative [Arabidopsis
  misc_feature (1)..(160): Homolog of NCBI NO: 15228405 NR Description: transcription factor Hap5a, putative [Arabidopsis
MKADEDVRMISAEAPILFAKACELFILELTIRSWLHAEENKRRTLQKNDIAAAITRTDIFDFLVDIVPRDEIKDEAAVLGGGMVVAPTASGVPYYYPPMGQPAGPGGMMIGRPAMDPNGVYVQPPSQAWQSVWQTSTGTGDDVSYGSGGSSGQGNLDGQG

SEQ ID NO: 35059 - DNA, 1178 bp, Arabidopsis thaliana
  misc_feature (1)..(1178): Ceres Seq. ID no. 13495663
  misc_feature: MA Experiment ID: 108576 Result: Up-regulated in Transcription
  misc_feature: MA Experiment 108576 PARAMETER Experiment Name: At_42deg_Heat_cDNA_P Parameter: Temperature (deg C) Value: 42 vs. 22
  misc_feature: MA Experiment 108576 PARAMETER Experiment Name: At_42deg_Heat_cDNA_P Parameter: Timepoint (hr) Value: 1
  misc_feature: MA Experiment 108576 PARAMETER Experiment Name: At_42deg_Heat_cDNA_P Parameter: Tissue Value: Aerial
  misc_feature: MA Experiment ID: 20000180 Result: Down-regulated in Transcription
  misc_feature: MA Experiment 20000180 PARAMETER Experiment Name: At_Germinating_Seeds_P Parameter: Age (hr) Value: 24 vs. 0
  misc_feature: MA Experiment 20000180 PARAMETER Experiment Name: At_Germinating_Seeds_P Parameter: Tissue Value: Germinating Seeds
tggtgcatcatccgtctatcaataccctgacaaggaaaaccctaattttttttggcccaaagggttttatactttaatctcatactccgattcattgtcgaaaaacgatgatgcataattcaaccgaagaatcggaatgggaggtgagacctggtggtatgctcgtccaacgaagagacgacgccgcttcctccgaccacaaacctctccaggatcccgactctgcttccgccgcttttgctcaaaccatcagaatcactgtttctcatggctcatcgcaccacgatcttcatatttctgctcacgccactttcggggatgtgaagaaagctcttgttcagaaaactggattggaagctagtgaattgaagatcttgttcagaggagttgagagagatgatgctgaacaattgcaagctgctggtgttaaggatgcgtctaagcttgttgttgttgttgaggatacgaataagagagtggaacaacagcctcctgtggtaactaaagagatggaaaaagctattgctgctgttaacgcggttacaggagaggtcgataagctctcggatagagttgttgctttagaagttgctgtgaatggagggacgcaagttgcggtgcgggagtttgacatggctgcagagcttcttatgaggcagctgctcaaattggatggcattgaggctgaaggggacgctaaagtacagcgtaaggctgaggtacgtagaatccaaaacttgcaggaggctgtggataagttgaaggcaagatgttcaaatccgtttgtggatcagagcaaagctgcagctgtaagcactgagtgggaatcgttcggaaacggtgtcggaagcttgaaccctcctccgccagcttcgccttcggccaatgtaactcaagattgggagaaatttgactgacattttagtactgctacgttgccttggaaaaaaatgcttattgaaactgtttatctttttgattattgttaaatattggaaaacgaccatcgtctttatcttctaatgtatagatatattatatatagtatcggaaatctacatctctgtacgaaatgttggaataatccctgggaatagtctttgatgtctctcagtctctgtcgtgcctaattggcttatgtcgtagtactaaagattatggctacgagttttggaggc

SEQ ID NO: 35060 - protein, 269 aa, Arabidopsis thaliana; identical to SEQ ID NO: 24560
  peptide (1)..(269): Ceres Seq. ID no. 13495664
  misc_feature (138)..(219): Pfam Name: BAG domain Pfam Description: BAG domain
  misc_feature (12)..(223): Homolog of NCBI NO: 15242267 NR Description: BAG domain containing protein [Arabidopsis
  misc_feature (7)..(242): Homolog of NCBI NO: 6624711 NR Description: hypothetical protein [Oryza sativa (indica
  misc_feature (1)..(232): Homolog of NCBI NO: 15240726 NR Description: BAG domain containing protein [Arabidopsis
  misc_feature (1)..(232): Homolog of NCBI NO: 21537107 NR Description: unknown [Arabidopsis thaliana]
  misc_feature (8)..(221): Homolog of NCBI NO: 34898024 NR Description: ESTs AU082174(S13676),AU032395(R3986) correspond a region of the predicted gene.~Similar to Arabidopsis thaliana
  misc_feature (8)..(221): Homolog of NCBI NO: 25553557 NR Description: OSJNBa0038F22.4 [Oryza sativa (japonica
  misc_feature (8)..(269): Homolog of NCBI NO: 34907972 NR Description: P0446G04.18 [Oryza sativa (japonica
  misc_feature (2)..(269): Homolog of NCBI NO: 21554254 NR Description: unknown [Arabidopsis thaliana]
  misc_feature (1)..(269): Homolog of NCBI NO: 15231035 NR Description: expressed protein [Arabidopsis thaliana]
  misc_feature (1)..(269): Homolog of NCBI NO: 19699283 NR Description: At3g51780/ORF3 [Arabidopsis thaliana]

SEQ ID NO: 35061 - protein, 268 aa, Arabidopsis thaliana; identical to SEQ ID NO: 24561
  peptide (1)..(268): Ceres Seq. ID no. 13495665
  misc_feature (137)..(218): Pfam Name: BAG domain Pfam Description: BAG domain
  misc_feature (11)..(222): Homolog of NCBI NO: 15242267 NR Description: BAG domain containing protein [Arabidopsis
  misc_feature (6)..(241): Homolog of NCBI NO: 6624711 NR Description: hypothetical protein [Oryza sativa (indica
  misc_feature (1)..(231): Homolog of NCBI NO: 15240726 NR Description: BAG domain containing protein [Arabidopsis
  misc_feature (1)..(231): Homolog of NCBI NO: 21537107 NR Description: unknown [Arabidopsis thaliana]
  misc_feature (7)..(220): Homolog of NCBI NO: 34898024 NR Description: ESTs AU082174(S13676),AU032395(R3986) correspond a region of the predicted gene.~Similar to Arabidopsis thaliana
  misc_feature (7)..(220): Homolog of NCBI NO: 25553557 NR Description: OSJNBa0038F22.4 [Oryza sativa (japonica
  misc_feature (7)..(268): Homolog of NCBI NO: 34907972 NR Description: P0446G04.18 [Oryza sativa (japonica
  misc_feature (1)..(268): Homolog of NCBI NO: 21554254 NR Description: unknown [Arabidopsis thaliana]
  misc_feature (1)..(268): Homolog of NCBI NO: 15231035 NR Description: expressed protein [Arabidopsis thaliana]
  misc_feature (1)..(268): Homolog of NCBI NO: 19699283 NR Description: At3g51780/ORF3 [Arabidopsis thaliana]

SEQ ID NO: 35062 - protein, 252 aa, Arabidopsis thaliana; identical to SEQ ID NO: 24562
  peptide (1)..(252): Ceres Seq. ID no. 13495666
  misc_feature (121)..(202): Pfam Name: BAG domain Pfam Description: BAG domain
  misc_feature (1)..(206): Homolog of NCBI NO: 15242267 NR Description: BAG domain containing protein [Arabidopsis
  misc_feature (1)..(225): Homolog of NCBI NO: 6624711 NR Description: hypothetical protein [Oryza sativa (indica
  misc_feature (1)..(215): Homolog of NCBI NO: 15240726 NR Description: BAG domain containing protein [Arabidopsis
  misc_feature (1)..(215): Homolog of NCBI NO: 21537107 NR Description: unknown [Arabidopsis thaliana]
  misc_feature (1)..(204): Homolog of NCBI NO: 34898024 NR Description: ESTs AU082174(S13676),AU032395(R3986) correspond a region of the predicted gene.~Similar to Arabidopsis thaliana
  misc_feature (1)..(204): Homolog of NCBI NO: 25553557 NR Description: OSJNBa0038F22.4 [Oryza sativa (japonica
  misc_feature (1)..(252): Homolog of NCBI NO: 34907972 NR Description: P0446G04.18 [Oryza sativa (japonica
  misc_feature (1)..(252): Homolog of NCBI NO: 21554254 NR Description: unknown [Arabidopsis thaliana]
  misc_feature (1)..(252): Homolog of NCBI NO: 15231035 NR Description: expressed protein [Arabidopsis thaliana]
  misc_feature (1)..(252): Homolog of NCBI NO: 19699283 NR Description: At3g51780/ORF3 [Arabidopsis thaliana]

SEQ ID NO: 35063 - DNA, 1093 bp, Arabidopsis thaliana
  misc_feature (1)..(1093): Ceres Seq. ID no. 12389089
  misc_feature: MA Experiment ID: 108461 Result: Down-regulated in Transcription
  misc_feature: MA Experiment 108461 PARAMETER Experiment Name: At_Germinating_Seeds_cDNA_P Parameter: Age (day) Value: 1 vs. 0
  misc_feature: MA Experiment 108461 PARAMETER Experiment Name: At_Germinating_Seeds_cDNA_P Parameter: Tissue Value: Germinating Seeds
  misc_feature: MA Experiment ID: 108463 Result: Up-regulated in Transcription
  misc_feature: MA Experiment 108463 PARAMETER Experiment Name: At_Germinating_Seeds_cDNA_P Parameter: Age (day) Value: 3 vs. 0
  misc_feature: MA Experiment 108463 PARAMETER Experiment Name: At_Germinating_Seeds_cDNA_P Parameter: Tissue Value: Germinating Seeds
  misc_feature: MA Experiment ID: 108464 Result: Up-regulated in Transcription
  misc_feature: MA Experiment 108464 PARAMETER Experiment Name: At_Germinating_Seeds_cDNA_P Parameter: Age (day) Value: 4 vs. 0
  misc_feature: MA Experiment 108464 PARAMETER Experiment Name: At_Germinating_Seeds_cDNA_P Parameter: Tissue Value: Germinating Seeds
  misc_feature: MA Experiment ID: 108488 Result: Down-regulated in Transcription
  misc_feature: MA Experiment ID: 108501 Result: Down-regulated in Transcription
  misc_feature: MA Experiment 108501 PARAMETER Experiment Name: At_ap2_floral_buds_cDNA_P Parameter: Plant Line Value: ap2 (Ler.)
  misc_feature: MA Experiment 108501 PARAMETER Experiment Name: At_ap2_floral_buds_cDNA_P Parameter: Tissue Value: Closed Flower
  misc_feature: MA Experiment ID: 108561 Result: Up-regulated in Transcription
  misc_feature: MA Experiment 108561 PARAMETER Experiment Name: At_100uM_ABA_cDNA_P Parameter: Timepoint (hr) Value: 6
  misc_feature: MA Experiment 108561 PARAMETER Experiment Name: At_100uM_ABA_cDNA_P Parameter: Tissue Value: Aerial
  misc_feature: MA Experiment 108561 PARAMETER Experiment Name: At_100uM_ABA_cDNA_P Parameter: Treatment Value: 100uM ABA vs. No Treatment
  misc_feature: MA Experiment ID: 108572 Result: Up-regulated in Transcription
  misc_feature: MA Experiment 108572 PARAMETER Experiment Name: At_Drought_cDNA_P Parameter: Timepoint (hr) Value: 1
  misc_feature: MA Experiment 108572 PARAMETER Experiment Name: At_Drought_cDNA_P Parameter: Tissue Value: Aerial
  misc_feature: MA Experiment 108572 PARAMETER Experiment Name: At_Drought_cDNA_P Parameter: Treatment Value: Drought vs. No Drought
  misc_feature: MA Experiment ID: 108573 Result: Up-regulated in Transcription
  misc_feature: MA Experiment 108573 PARAMETER Experiment Name: At_Drought_cDNA_P Parameter: Timepoint (hr) Value: 6
  misc_feature: MA Experiment 108573 PARAMETER Experiment Name: At_Drought_cDNA_P Parameter: Tissue Value: Aerial
  misc_feature: MA Experiment 108573 PARAMETER Experiment Name: At_Drought_cDNA_P Parameter: Treatment Value: Drought vs. No Drought
  misc_feature: MA Experiment ID: 108579 Result: Down-regulated in Transcription
  misc_feature: MA Experiment 108579 PARAMETER Experiment Name: At_4deg_Cold_cDNA_P Parameter: Temperature (deg C) Value: 4 vs. 22
  misc_feature: MA Experiment 108579 PARAMETER Experiment Name: At_4deg_Cold_cDNA_P Parameter: Timepoint (hr) Value: 6
  misc_feature: MA Experiment 108579 PARAMETER Experiment Name: At_4deg_Cold_cDNA_P Parameter: Tissue Value: Aerial
  misc_feature: MA Experiment ID: 108585 Result: Up-regulated in Transcription
  misc_feature: MA Experiment 108585 PARAMETER Experiment Name: At_5mM_NaNP_cDNA_P Parameter: Timepoint (hr) Value: 6
  misc_feature: MA Experiment 108585 PARAMETER Experiment Name: At_5mM_NaNP_cDNA_P Parameter: Tissue Value: Aerial
  misc_feature: MA Experiment 108585 PARAMETER Experiment Name: At_5mM_NaNP_cDNA_P Parameter: Treatment Value: null
  misc_feature: MA Experiment ID: 108594 Result: Up-regulated in Transcription
  misc_feature: MA Experiment 108594 PARAMETER Experiment Name: At_Ler-rhl_Root_cDNA_P Parameter: Plant Line Value: null
  misc_feature: MA Experiment ID: 108595 Result: Up-regulated in Transcription
  misc_feature: MA Experiment 108595 PARAMETER Experiment Name: At_Ler-pi_Ovule_cDNA_P Parameter: Plant Line Value: null
  misc_feature: MA Experiment ID: 108605 Result: Up-regulated in Transcription
  misc_feature: MA Experiment 108605 PARAMETER Experiment Name: At_100uM_ABA_cDNA_P Parameter: Timepoint (hr) Value: 6
  misc_feature: MA Experiment 108605 PARAMETER Experiment Name: At_100uM_ABA_cDNA_P Parameter: Tissue Value: Aerial
  misc_feature: MA Experiment 108605 PARAMETER Experiment Name: At_100uM_ABA_cDNA_P Parameter: Treatment Value: 100uM ABA vs. No Treatment
  misc_feature: MA Experiment ID: 108607 Result: Up-regulated in Transcription
  misc_feature: MA Experiment 108607 PARAMETER Experiment Name: At_100uM_ABA_cDNA_P Parameter: Timepoint (hr) Value: 4
  misc_feature: MA Experiment 108607 PARAMETER Experiment Name: At_100uM_ABA_cDNA_P Parameter: Tissue Value: Aerial
  misc_feature: MA Experiment 108607 PARAMETER Experiment Name: At_100uM_ABA_cDNA_P Parameter: Treatment Value: 100uM ABA vs. No Treatment
  misc_feature: MA Experiment ID: 108608 Result: Up-regulated in Transcription
  misc_feature: MA Experiment 108608 PARAMETER Experiment Name: At_100uM_ABA_cDNA_P Parameter: Timepoint (hr) Value: 1
  misc_feature: MA Experiment 108608 PARAMETER Experiment Name: At_100uM_ABA_cDNA_P Parameter: Tissue Value: Aerial
  misc_feature: MA Experiment 108608 PARAMETER Experiment Name: At_100uM_ABA_cDNA_P Parameter: Treatment Value: 100uM ABA vs. No Treatment
  misc_feature: MA Experiment ID: 108609 Result: Up-regulated in Transcription
  misc_feature: MA Experiment 108609 PARAMETER Experiment Name: At_100uM_ABA_cDNA_P Parameter: Timepoint (hr) Value: 24
  misc_feature: MA Experiment 108609 PARAMETER Experiment Name: At_100uM_ABA_cDNA_P Parameter: Tissue Value: Aerial
  misc_feature: MA Experiment 108609 PARAMETER Experiment Name: At_100uM_ABA_cDNA_P Parameter: Treatment Value: 100uM ABA vs. No Treatment
  misc_feature: MA Experiment ID: 20000069 Result: Up-regulated in Transcription
  misc_feature: MA Experiment 20000069 PARAMETER Experiment Name: At_100uM_ABA_Mutants_cDNA_P Parameter: Plant Line Value: CS23
  misc_feature: MA Experiment 20000069 PARAMETER Experiment Name: At_100uM_ABA_Mutants_cDNA_P Parameter: Timepoint (hr) Value: 6
  misc_feature: MA Experiment 20000069 PARAMETER Experiment Name: At_100uM_ABA_Mutants_cDNA_P Parameter: Tissue Value: Aerial
  misc_feature: MA Experiment 20000069 PARAMETER Experiment Name: At_100uM_ABA_Mutants_cDNA_P Parameter: Treatment Value: 100uM ABA vs. No Treatment
  misc_feature: MA Experiment ID: 20000070 Result: Up-regulated in Transcription
  misc_feature: MA Experiment 20000070 PARAMETER Experiment Name: At_100uM_ABA_Mutants_cDNA_P Parameter: Plant Line Value: CS24
  misc_feature: MA Experiment 20000070 PARAMETER Experiment Name: At_100uM_ABA_Mutants_cDNA_P Parameter: Timepoint (hr) Value: 6
  misc_feature: MA Experiment 20000070 PARAMETER Experiment Name: At_100uM_ABA_Mutants_cDNA_P Parameter: Tissue Value: Aerial
  misc_feature: MA Experiment 20000070 PARAMETER Experiment Name: At_100uM_ABA_Mutants_cDNA_P Parameter: Treatment Value: 100uM ABA vs. No Treatment
  misc_feature: MA Experiment ID: 20000071 Result: Up-regulated in Transcription
  misc_feature: MA Experiment 20000071 PARAMETER Experiment Name: At_100uM_ABA_Mutants_cDNA_P Parameter: Plant Line Value: CS8104
  misc_feature: MA Experiment 20000071 PARAMETER Experiment Name: At_100uM_ABA_Mutants_cDNA_P Parameter: Timepoint (hr) Value: 6
  misc_feature: MA Experiment 20000071 PARAMETER Experiment Name: At_100uM_ABA_Mutants_cDNA_P Parameter: Tissue Value: Aerial
  misc_feature: MA Experiment 20000071 PARAMETER Experiment Name: At_100uM_ABA_Mutants_cDNA_P Parameter: Treatment Value: 100uM ABA vs. No Treatment
  misc_feature: MA Experiment ID: 20000072 Result: Up-regulated in Transcription
  misc_feature: MA Experiment 20000072 PARAMETER Experiment Name: At_100uM_ABA_Mutants_cDNA_P Parameter: Plant Line Value: CS8105
  misc_feature: MA Experiment 20000072 PARAMETER Experiment Name: At_100uM_ABA_Mutants_cDNA_P Parameter: Timepoint (hr) Value: 6
  misc_feature: MA Experiment 20000072 PARAMETER Experiment Name: At_100uM_ABA_Mutants_cDNA_P Parameter: Tissue Value: Aerial
  misc_feature: MA Experiment 20000072 PARAMETER Experiment Name: At_100uM_ABA_Mutants_cDNA_P Parameter: Treatment Value: 100uM ABA vs. No Treatment
  misc_feature: MA Experiment ID: 20000086 Result: Up-regulated in Transcription
  misc_feature: MA Experiment 20000086 PARAMETER Experiment Name: At_100uM_ABA_Mutants_cDNA_P Parameter: Plant Line Value: CS22
  misc_feature: MA Experiment 20000086 PARAMETER Experiment Name: At_100uM_ABA_Mutants_cDNA_P Parameter: Timepoint (hr) Value: 6
  misc_feature: MA Experiment 20000086 PARAMETER Experiment Name: At_100uM_ABA_Mutants_cDNA_P Parameter: Tissue Value: Aerial
  misc_feature: MA Experiment 20000086 PARAMETER Experiment Name: At_100uM_ABA_Mutants_cDNA_P Parameter: Treatment Value: 100uM ABA vs. No Treatment
  misc_feature: MA Experiment ID: 20000087 Result: Up-regulated in Transcription
  misc_feature: MA Experiment 20000087 PARAMETER Experiment Name: At_100uM_ABA_Mutants_cDNA_P Parameter: Plant Line Value: WS
  misc_feature: MA Experiment 20000087 PARAMETER Experiment Name: At_100uM_ABA_Mutants_cDNA_P Parameter: Timepoint (hr) Value: 6
  misc_feature: MA Experiment 20000087 PARAMETER Experiment Name: At_100uM_ABA_Mutants_cDNA_P Parameter: Tissue Value: Aerial
  misc_feature: MA Experiment 20000087 PARAMETER Experiment Name: At_100uM_ABA_Mutants_cDNA_P Parameter: Treatment Value: 100uM ABA vs. No Treatment
  misc_feature: MA Experiment ID: 20000088 Result: Up-regulated in Transcription
  misc_feature: MA Experiment 20000088 PARAMETER Experiment Name: At_100uM_ABA_Mutants_cDNA_P Parameter: Plant Line Value: Landsberg
  misc_feature: MA Experiment 20000088 PARAMETER Experiment Name: At_100uM_ABA_Mutants_cDNA_P Parameter: Timepoint (hr) Value: 6
  misc_feature: MA Experiment 20000088 PARAMETER Experiment Name: At_100uM_ABA_Mutants_cDNA_P Parameter: Tissue Value: Aerial
  misc_feature: MA Experiment 20000088 PARAMETER Experiment Name: At_100uM_ABA_Mutants_cDNA_P Parameter: Treatment Value: 100uM ABA vs. No Treatment
  misc_feature: MA Experiment ID: 20000089 Result: Down-regulated in Transcription
  misc_feature: MA Experiment ID: 20000090 Result: Down-regulated in Transcription
  misc_feature: MA Experiment ID: 20000111 Result: Down-regulated in Transcription
  misc_feature: MA Experiment 20000111 PARAMETER Experiment Name: At_42deg_Heat_cDNA_P Parameter: Temperature (deg C) Value: 42 vs. 22
  misc_feature: MA Experiment 20000111 PARAMETER Experiment Name: At_42deg_Heat_cDNA_P Parameter: Timepoint (hr) Value: 6
  misc_feature: MA Experiment 20000111 PARAMETER Experiment Name: At_42deg_Heat_cDNA_P Parameter: Tissue Value: Aerial
  misc_feature: MA Experiment ID: 20000117 Result: Up-regulated in Transcription
  misc_feature: MA Experiment 20000117 PARAMETER Experiment Name: At_100uM_ABA_Mutants_cDNA_P Parameter: Plant Line Value: Columbia
  misc_feature: MA Experiment 20000117 PARAMETER Experiment Name: At_100uM_ABA_Mutants_cDNA_P Parameter: Timepoint (hr) Value: 6
  misc_feature: MA Experiment 20000117 PARAMETER Experiment Name: At_100uM_ABA_Mutants_cDNA_P Parameter: Tissue Value: Aerial
  misc_feature: MA Experiment 20000117 PARAMETER Experiment Name: At_100uM_ABA_Mutants_cDNA_P Parameter: Treatment Value: 100uM ABA vs. No Treatment
  misc_feature: MA Experiment ID: 20000166 Result: Up-regulated in Transcription
  misc_feature: MA Experiment 20000166 PARAMETER Experiment Name: At_100uM_ABA_P Parameter: Age (day) Value: 14
  misc_feature: MA Experiment 20000166 PARAMETER Experiment Name: At_100uM_ABA_P Parameter: Organism Value: A. thaliana
  misc_feature: MA Experiment 20000166 PARAMETER Experiment Name: At_100uM_ABA_P Parameter: Plant Line Value: WS
  misc_feature: MA Experiment 20000166 PARAMETER Experiment Name: At_100uM_ABA_P Parameter: Timepoint (hr) Value: 1
  misc_feature: MA Experiment 20000166 PARAMETER Experiment Name: At_100uM_ABA_P Parameter: Tissue Value: Aerial
  misc_feature: MA Experiment 20000166 PARAMETER Experiment Name: At_100uM_ABA_P Parameter: Treatment Value: 100uM ABA vs. No Treatment
  misc_feature: MA Experiment ID: 20000169 Result: Up-regulated in Transcription
  misc_feature: MA Experiment 20000169 PARAMETER Experiment Name: At_100uM_ABA_P Parameter: Age (day) Value: 14
  misc_feature: MA Experiment 20000169 PARAMETER Experiment Name: At_100uM_ABA_P Parameter: Organism Value: A. thaliana
  misc_feature: MA Experiment 20000169 PARAMETER Experiment Name: At_100uM_ABA_P Parameter: Plant Line Value: WS
  misc_feature: MA Experiment 20000169 PARAMETER Experiment Name: At_100uM_ABA_P Parameter: Timepoint (hr) Value: 6
  misc_feature: MA Experiment 20000169 PARAMETER Experiment Name: At_100uM_ABA_P Parameter: Tissue Value: Aerial
  misc_feature: MA Experiment 20000169 PARAMETER Experiment Name: At_100uM_ABA_P Parameter: Treatment Value: 100uM ABA vs. No Treatment
  misc_feature: MA Experiment ID: 20000173 Result: Down-regulated in Transcription
  misc_feature: MA Experiment 20000173 PARAMETER Experiment Name: At_42deg_Heat_P Parameter: Age (day) Value: 14
  misc_feature: MA Experiment 20000173 PARAMETER Experiment Name: At_42deg_Heat_P Parameter: Organism Value: A. thaliana
  misc_feature: MA Experiment 20000173 PARAMETER Experiment Name: At_42deg_Heat_P Parameter: Plant Line Value: WS
  misc_feature: MA Experiment 20000173 PARAMETER Experiment Name: At_42deg_Heat_P Parameter: Temperature (deg C) Value: 42 vs. 22
  misc_feature: MA Experiment 20000173 PARAMETER Experiment Name: At_42deg_Heat_P Parameter: Timepoint (hr) Value: 6
  misc_feature: MA Experiment 20000173 PARAMETER Experiment Name: At_42deg_Heat_P Parameter: Tissue Value: Aerial
  misc_feature: MA Experiment ID: 20000180 Result: Down-regulated in Transcription
  misc_feature: MA Experiment 20000180 PARAMETER Experiment Name: At_Germinating_Seeds_P Parameter: Age (hr) Value: 24 vs. 0
  misc_feature: MA Experiment 20000180 PARAMETER Experiment Name: At_Germinating_Seeds_P Parameter: Tissue Value: Germinating Seeds
  misc_feature: MA Experiment ID: 20000184 Result: Down-regulated in Transcription
  misc_feature: MA Experiment 20000184 PARAMETER Experiment Name: At_Shoots__P Parameter: Age (day) Value: 7
  misc_feature: MA Experiment 20000184 PARAMETER Experiment Name: At_Shoots__P Parameter: Tissue Value: Shoots vs. Whole Plant
  misc_feature: MA Experiment ID: 20000185 Result: Down-regulated in Transcription
  misc_feature: MA Experiment 20000185 PARAMETER Experiment Name: At_Roots__P Parameter: Age (day) Value: 7 vs. 21
  misc_feature: MA Experiment 20000185 PARAMETER Experiment Name: At_Roots__P Parameter: Organism Value: A. thaliana
  misc_feature: MA Experiment 20000185 PARAMETER Experiment Name: At_Roots__P Parameter: Tissue Value: Roots vs. Whole Plant
  misc_feature: MA Experiment ID: 20000213 Result: Down-regulated in Transcription
  misc_feature: MA Experiment 20000213 PARAMETER Experiment Name: At_4deg_Cold_P Parameter: Timepoint (hr) Value: 2
  misc_feature: MA Experiment ID: 20000214 Result: Down-regulated in Transcription
  misc_feature: MA Experiment 20000214 PARAMETER Experiment Name: At_4deg_Cold_P Parameter: Timepoint (hr) Value: 6
  misc_feature: MA Experiment ID: 20000234 Result: Down-regulated in Transcription
  misc_feature: MA Experiment 20000234 PARAMETER Experiment Name: At_Siliques_P Parameter: Age (day) Value: 21
  misc_feature: MA Experiment 20000234 PARAMETER Experiment Name: At_Siliques_P Parameter: Organism Value: A. thaliana
  misc_feature: MA Experiment 20000234 PARAMETER Experiment Name: At_Siliques_P Parameter: Plant Line Value: WS
  misc_feature: MA Experiment 20000234 PARAMETER Experiment Name: At_Siliques_P Parameter: Tissue Value: Less Than 5mm Siliques vs. Whole Plant
  misc_feature: MA Experiment ID: 20000264 Result: Up-regulated in Transcription
  misc_feature: MA Experiment 20000264 PARAMETER Experiment Name: At_Open_Flower_P Parameter: Age (day) Value: 21
  misc_feature: MA Experiment 20000264 PARAMETER Experiment Name: At_Open_Flower_P Parameter: Plant Line Value: WS
  misc_feature: MA Experiment 20000264 PARAMETER Experiment Name: At_Open_Flower_P Parameter: Tissue Value: Open Flower vs. Whole Plant
  misc_feature: MA Experiment ID: 20000265 Result: Down-regulated in Transcription
  misc_feature: MA Experiment 20000265 PARAMETER Experiment Name: At_Open_Flower_P Parameter: Age (day) Value: 21
  misc_feature: MA Experiment 20000265 PARAMETER Experiment Name: At_Open_Flower_P Parameter: Plant Line Value: WS
  misc_feature: MA Experiment 20000265 PARAMETER Experiment Name: At_Open_Flower_P Parameter: Tissue Value: Closed Flower vs. Whole Plant
  misc_feature: MA Experiment ID: 20000267 Result: Up-regulated in Transcription
  misc_feature: MA Experiment 20000267 PARAMETER Experiment Name: At_Drought_P Parameter: Age (day) Value: 7
  misc_feature: MA Experiment 20000267 PARAMETER Experiment Name: At_Drought_P Parameter: Organism Value: A. thaliana
  misc_feature: MA Experiment 20000267 PARAMETER Experiment Name: At_Drought_P Parameter: Plant Line Value: WS
  misc_feature: MA Experiment 20000267 PARAMETER Experiment Name: At_Drought_P Parameter: Timepoint (hr) Value: 6
  misc_feature: MA Experiment 20000267 PARAMETER Experiment Name: At_Drought_P Parameter: Tissue Value: Whole Plant
  misc_feature: MA Experiment 20000267 PARAMETER Experiment Name: At_Drought_P Parameter: Treatment Value: Drought vs. No Drought
  misc_feature: MA Experiment ID: 20000308 Result: Down-regulated in Transcription
  misc_feature: MA Experiment 20000308 PARAMETER Experiment Name: At_100mM_NaCl__P Parameter: Age (day) Value: 17
  misc_feature: MA Experiment 20000308 PARAMETER Experiment Name: At_100mM_NaCl__P Parameter: Organism Value: A. thaliana
  misc_feature: MA Experiment 20000308 PARAMETER Experiment Name: At_100mM_NaCl__P Parameter: Plant Line Value: WS
  misc_feature: MA Experiment 20000308 PARAMETER Experiment Name: At_100mM_NaCl__P Parameter: Timepoint (hr) Value: 72
  misc_feature: MA Experiment 20000308 PARAMETER Experiment Name: At_100mM_NaCl__P Parameter: Tissue Value: Whole Plant
  misc_feature: MA Experiment 20000308 PARAMETER Experiment Name: At_100mM_NaCl__P Parameter: Treatment Value: 100mM NaCl vs. No Treatment
  misc_feature: MA Experiment ID: 20000436 Result: Up-regulated in Transcription
  misc_feature: MA Experiment 20000436 PARAMETER Experiment Name: At_Drought_P Parameter: Age (day) Value: 7
  misc_feature: MA Experiment 20000436 PARAMETER Experiment Name: At_Drought_P Parameter: Organism Value: A. thaliana
  misc_feature: MA Experiment 20000436 PARAMETER Experiment Name: At_Drought_P Parameter: Plant Line Value: WS
  misc_feature: MA Experiment 20000436 PARAMETER Experiment Name: At_Drought_P Parameter: Timepoint (hr) Value: 12
  misc_feature: MA Experiment 20000436 PARAMETER Experiment Name: At_Drought_P Parameter: Tissue Value: Whole Plant
  misc_feature: MA Experiment 20000436 PARAMETER Experiment Name: At_Drought_P Parameter: Treatment Value: Drought vs. No Drought
  misc_feature: MA Experiment ID: 20000439 Result: Down-regulated in Transcription
  misc_feature: MA Experiment 20000439 PARAMETER Experiment Name: At_Roots__P Parameter: Age (day) Value: 14 vs. 21
  misc_feature: MA Experiment 20000439 PARAMETER Experiment Name: At_Roots__P Parameter: Organism Value: A. thaliana
  misc_feature: MA Experiment 20000439 PARAMETER Experiment Name: At_Roots__P Parameter: Tissue Value: Roots vs. Whole Plant
  misc_feature: MA Experiment ID: 20000441 Result: Up-regulated in Transcription
  misc_feature: MA Experiment 20000441 PARAMETER Experiment Name: At_1uM_BR-BRZ__P Parameter: Tissue Value: Shoot Apices
  misc_feature: MA Experiment 20000441 PARAMETER Experiment Name: At_1uM_BR-BRZ__P Parameter: Treatment Value: 1uM BR vs. No Treatment
  misc_feature: MA Experiment ID: 20000443 Result: Up-regulated in Transcription
  misc_feature: MA Experiment 20000443 PARAMETER Experiment Name: At_1uM_BR-BRZ__P Parameter: Tissue Value: Shoot Apices
  misc_feature: MA Experiment 20000443 PARAMETER Experiment Name: At_1uM_BR-BRZ__P Parameter: Treatment Value: 1uM BRZ vs. No Treatment
  misc_feature: MA Experiment ID: 20000445 Result: Up-regulated in Transcription
  misc_feature: MA Experiment 20000445 PARAMETER Experiment Name: At_100uM_NAA__P Parameter: Age (day) Value: 14
  misc_feature: MA Experiment 20000445 PARAMETER Experiment Name: At_100uM_NAA__P Parameter: Organism Value: A. thaliana
  misc_feature: MA Experiment 20000445 PARAMETER Experiment Name: At_100uM_NAA__P Parameter: Plant Line Value: WS
  misc_feature: MA Experiment 20000445 PARAMETER Experiment Name: At_100uM_NAA__P Parameter: Timepoint (hr) Value: 6
  misc_feature: MA Experiment 20000445 PARAMETER Experiment Name: At_100uM_NAA__P Parameter: Tissue Value: Aerial
  misc_feature: MA Experiment 20000445 PARAMETER Experiment Name: At_100uM_NAA__P Parameter: Treatment Value: 100uM NAA vs. No Treatment
  misc_feature: MA Experiment ID: 20000451 Result: Up-regulated in Transcription
  misc_feature: MA Experiment 20000451 PARAMETER Experiment Name: At_CS6879_Shoots-Roots_P Parameter: Age (day) Value: 14
  misc_feature: MA Experiment 20000451 PARAMETER Experiment Name: At_CS6879_Shoots-Roots_P Parameter: Organism Value: A. thaliana
  misc_feature: MA Experiment 20000451 PARAMETER Experiment Name: At_CS6879_Shoots-Roots_P Parameter: Plant Line Value: CS6879 vs. WS
  misc_feature: MA Experiment 20000451 PARAMETER Experiment Name: At_CS6879_Shoots-Roots_P Parameter: Tissue Value: Roots
  misc_feature: MA Experiment ID: 20000453 Result: Up-regulated in Transcription
  misc_feature: MA Experiment 20000453 PARAMETER Experiment Name: At_100uM_ABA_P Parameter: Age (day) Value: 15
  misc_feature: MA Experiment 20000453 PARAMETER Experiment Name: At_100uM_ABA_P Parameter: Organism Value: A. thaliana
  misc_feature: MA Experiment 20000453 PARAMETER Experiment Name: At_100uM_ABA_P Parameter: Plant Line Value: WS
  misc_feature: MA Experiment 20000453 PARAMETER Experiment Name: At_100uM_ABA_P Parameter: Timepoint (hr) Value: 24
  misc_feature: MA Experiment 20000453 PARAMETER Experiment Name: At_100uM_ABA_P Parameter: Tissue Value: Aerial
  misc_feature: MA Experiment 20000453 PARAMETER Experiment Name: At_100uM_ABA_P Parameter: Treatment Value: 100uM ABA vs. No Treatment
  misc_feature: MA Experiment ID: 20000456 Result: Down-regulated in Transcription
  misc_feature: MA Experiment 20000456 PARAMETER Experiment Name: At_100uM_BA_P Parameter: Age (day) Value: 14
  misc_feature: MA Experiment 20000456 PARAMETER Experiment Name: At_100uM_BA_P Parameter: Organism Value: A. thaliana
  misc_feature: MA Experiment 20000456 PARAMETER Experiment Name: At_100uM_BA_P Parameter: Plant Line Value: WS
  misc_feature: MA Experiment 20000456 PARAMETER Experiment Name: At_100uM_BA_P Parameter: Timepoint (hr) Value: 6
  misc_feature: MA Experiment 20000456 PARAMETER Experiment Name: At_100uM_BA_P Parameter: Tissue Value: Aerial
  misc_feature: MA Experiment 20000456 PARAMETER Experiment Name: At_100uM_BA_P Parameter: Treatment Value: 100uM BA vs. No Treatment
  misc_feature: MA Experiment ID: 20000495 Result: Down-regulated in Transcription
  misc_feature: MA Experiment 20000495 PARAMETER Experiment Name: At_Guard_Cells_P Parameter: Harvest Date Value: 8/2/2002
  misc_feature: MA Experiment 20000495 PARAMETER Experiment Name: At_Guard_Cells_P Parameter: Organism Value: A. thaliana
  misc_feature: MA Experiment 20000495 PARAMETER Experiment Name: At_Guard_Cells_P Parameter: Tissue Value: Guard Cells vs. Leaves
  misc_feature: MA Experiment ID: 20000527 Result: Down-regulated in Transcription
  misc_feature: MA Experiment 20000527 PARAMETER Experiment Name: At_10percent_PEG_P Parameter: Age (day) Value: 20
  misc_feature: MA Experiment 20000527 PARAMETER Experiment Name: At_10percent_PEG_P Parameter: Organism Value: A. thaliana
  misc_feature: MA Experiment 20000527 PARAMETER Experiment Name: At_10percent_PEG_P Parameter: Plant Line Value: WS
  misc_feature: MA Experiment 20000527 PARAMETER Experiment Name: At_10percent_PEG_P Parameter: Timepoint (day) Value: 20
  misc_feature: MA Experiment 20000527 PARAMETER Experiment Name: At_10percent_PEG_P Parameter: Tissue Value: Whole Plant
  misc_feature: MA Experiment 20000527 PARAMETER Experiment Name: At_10percent_PEG_P Parameter: Treatment Value: 10percent PEG vs. No Treatment
  misc_feature: MA Experiment ID: 20000574 Result: Down-regulated in Transcription
  misc_feature: MA Experiment 20000574 PARAMETER Experiment Name: At_100uM_ABA_Mutants__P Parameter: Organism Value: A. thaliana
  misc_feature: MA Experiment 20000574 PARAMETER Experiment Name: At_100uM_ABA_Mutants__P Parameter: Plant Line Value: CS23 vs. Ler wt
  misc_feature: MA Experiment 20000574 PARAMETER Experiment Name: At_100uM_ABA_Mutants__P Parameter: Timepoint (hr) Value: N/A
  misc_feature: MA Experiment 20000574 PARAMETER Experiment Name: At_100uM_ABA_Mutants__P Parameter: Tissue Value: Whole Plant
  misc_feature: MA Experiment 20000574 PARAMETER Experiment Name: At_100uM_ABA_Mutants__P Parameter: Treatment Value: None
  misc_feature: MA Experiment ID: 20000578 Result: Down-regulated in Transcription
  misc_feature: MA Experiment 20000578 PARAMETER Experiment Name: At_CS3726__P Parameter: Organism Value: A. thaliana
  misc_feature: MA Experiment 20000578 PARAMETER Experiment Name: At_CS3726__P Parameter: Plant Line Value: CS3726
  misc_feature: MA Experiment 20000578 PARAMETER Experiment Name: At_CS3726__P Parameter: Tissue Value: Whole Plant
  misc_feature: MA Experiment ID: 20000606 Result: Down-regulated in Transcription
  misc_feature: MA Experiment 20000606 PARAMETER Experiment Name: At_CS8548_Mutant_P Parameter: Age (day) Value: 14
  misc_feature: MA Experiment 20000606 PARAMETER Experiment Name: At_CS8548_Mutant_P Parameter: Plant Line Value: CS8548 vs. wt
  misc_feature: MA Experiment 20000606 PARAMETER Experiment Name: At_CS8548_Mutant_P Parameter: Tissue Value: Whole Plant
  misc_feature: MA Experiment ID: 20000709 Result: Down-regulated in Transcription
  misc_feature: MA Experiment 20000709 PARAMETER Experiment Name: At_15mM_NH4NO3_L-to-H_P Parameter: Age (hr) Value: 14
  misc_feature: MA Experiment 20000709 PARAMETER Experiment Name: At_15mM_NH4NO3_L-to-H_P Parameter: Organism Value: A. thaliana
  misc_feature: MA Experiment 20000709 PARAMETER Experiment Name: At_15mM_NH4NO3_L-to-H_P Parameter: Plant Line Value: WS
  misc_feature: MA Experiment 20000709 PARAMETER Experiment Name: At_15mM_NH4NO3_L-to-H_P Parameter: Timepoint (hr) Value: 4
  misc_feature: MA Experiment 20000709 PARAMETER Experiment Name: At_15mM_NH4NO3_L-to-H_P Parameter: Tissue Value: Aerial
  misc_feature: MA Experiment 20000709 PARAMETER Experiment Name: At_15mM_NH4NO3_L-to-H_P Parameter: Treatment Value: 15mM NH4NO3 vs. 30mM Mannitol
  misc_feature: MA Experiment ID: 20000794 Result: Up-regulated in Transcription
  misc_feature: MA Experiment 20000794 PARAMETER Experiment Name: At_Petals_P Parameter: Age (day) Value: 23-25 days
  misc_feature: MA Experiment 20000794 PARAMETER Experiment Name: At_Petals_P Parameter: Plant Line Value: WS
  misc_feature: MA Experiment 20000794 PARAMETER Experiment Name: At_Petals_P Parameter: Tissue Value: Petals vs. Whole plant
  misc_feature: MA Experiment ID: 20001248 Result: Up-regulated in Transcription
  misc_feature: MA Experiment 20001248 PARAMETER Experiment Name: At_Far-red-induction_P Parameter: Age (day) Value: 7
  misc_feature: MA Experiment 20001248 PARAMETER Experiment Name: At_Far-red-induction_P Parameter: Light Value: Far-red vs. White
  misc_feature: MA Experiment 20001248 PARAMETER Experiment Name: At_Far-red-induction_P Parameter: Organism Value: A. thaliana
  misc_feature: MA Experiment 20001248 PARAMETER Experiment Name: At_Far-red-induction_P Parameter: Plant Line Value: Columbia
  misc_feature: MA Experiment 20001248 PARAMETER Experiment Name: At_Far-red-induction_P Parameter: Timepoint (hr) Value: 4
  misc_feature: MA Experiment 20001248 PARAMETER Experiment Name: At_Far-red-induction_P Parameter: Tissue Value: Whole Plant
  misc_feature: MA Experiment ID: 20001450 Result: Up-regulated in Transcription
  misc_feature: MA Experiment 20001450 PARAMETER Experiment Name: At_Far-red-induction_P Parameter: Age (day) Value: 7
  misc_feature: MA Experiment 20001450 PARAMETER Experiment Name: At_Far-red-induction_P Parameter: Light Value: Far-red vs. White
  misc_feature: MA Experiment 20001450 PARAMETER Experiment Name: At_Far-red-induction_P Parameter: Organism Value: A. thaliana
  misc_feature: MA Experiment 20001450 PARAMETER Experiment Name: At_Far-red-induction_P Parameter: Plant Line Value: Columbia
  misc_feature: MA Experiment 20001450 PARAMETER Experiment Name: At_Far-red-induction_P Parameter: Timepoint (hr) Value: 8
  misc_feature: MA Experiment 20001450 PARAMETER Experiment Name: At_Far-red-induction_P Parameter: Tissue Value: Whole Plant
  misc_feature: MA Experiment ID: 20001451 Result: Up-regulated in Transcription
  misc_feature: MA Experiment 20001451 PARAMETER Experiment Name: At_Far-red-induction_P Parameter: Age (day) Value: 7
  misc_feature: MA Experiment 20001451 PARAMETER Experiment Name: At_Far-red-induction_P Parameter: Light Value: Far-red vs. White
  misc_feature: MA Experiment 20001451 PARAMETER Experiment Name: At_Far-red-induction_P Parameter: Organism Value: A. thaliana
  misc_feature: MA Experiment 20001451 PARAMETER Experiment Name: At_Far-red-induction_P Parameter: Plant Line Value: Columbia
  misc_feature: MA Experiment 20001451 PARAMETER Experiment Name: At_Far-red-induction_P Parameter: Timepoint (hr) Value: 24
  misc_feature: MA Experiment 20001451 PARAMETER Experiment Name: At_Far-red-induction_P Parameter: Tissue Value: Whole Plant
  misc_feature: MA Experiment ID: 20001458 Result: Down-regulated in Transcription
  misc_feature: MA Experiment 20001458 PARAMETER Experiment Name: At_50mM_NH4NO3_L-to-H_P Parameter: Age (day) Value: Undefined
  misc_feature: MA Experiment 20001458 PARAMETER Experiment Name: At_50mM_NH4NO3_L-to-H_P Parameter: Organism Value: Undefined
  misc_feature: MA Experiment 20001458 PARAMETER Experiment Name: At_50mM_NH4NO3_L-to-H_P Parameter: Plant Line Value: Undefined
  misc_feature: MA Experiment 20001458 PARAMETER Experiment Name: At_50mM_NH4NO3_L-to-H_P Parameter: Timepoint (hr) Value: 2
  misc_feature: MA Experiment 20001458 PARAMETER Experiment Name: At_50mM_NH4NO3_L-to-H_P Parameter: Tissue Value: Siliques
  misc_feature: MA Experiment 20001458 PARAMETER Experiment Name: At_50mM_NH4NO3_L-to-H_P Parameter: Treatment Value: 50mM NH4NO3 vs. 100mM Manitol
  misc_feature: MA Experiment ID: 20001555 Result: Down-regulated in Transcription
  misc_feature: MA Experiment 20001555 PARAMETER Experiment Name: At_Drought_Soil_Dry_P Parameter: Age (day) Value: 24
  misc_feature: MA Experiment 20001555 PARAMETER Experiment Name: At_Drought_Soil_Dry_P Parameter: Organism Value: A. thaliana
  misc_feature: MA Experiment 20001555 PARAMETER Experiment Name: At_Drought_Soil_Dry_P Parameter: Plant Line Value: WS
  misc_feature: MA Experiment 20001555 PARAMETER Experiment Name: At_Drought_Soil_Dry_P Parameter: Post Timepoint (hr) Value: None
  misc_feature: MA Experiment 20001555 PARAMETER Experiment Name: At_Drought_Soil_Dry_P Parameter: Post-Treatment Value: None
  misc_feature: MA Experiment 20001555 PARAMETER Experiment Name: At_Drought_Soil_Dry_P Parameter: Timepoint (day) Value: 10
  misc_feature: MA Experiment 20001555 PARAMETER Experiment Name: At_Drought_Soil_Dry_P Parameter: Treatment Value: Drought vs. No Drought
  misc_feature: MA Experiment ID: 20001556 Result: Down-regulated in Transcription
  misc_feature: MA Experiment 20001556 PARAMETER Experiment Name: At_Drought_Soil_Dry_P Parameter: Age (day) Value: 26
  misc_feature: MA Experiment 20001556 PARAMETER Experiment Name: At_Drought_Soil_Dry_P Parameter: Organism Value: A. thaliana
  misc_feature: MA Experiment 20001556 PARAMETER Experiment Name: At_Drought_Soil_Dry_P Parameter: Plant Line Value: WS
  misc_feature: MA Experiment 20001556 PARAMETER Experiment Name: At_Drought_Soil_Dry_P Parameter: Post Timepoint (hr) Value: None
  misc_feature: MA Experiment 20001556 PARAMETER Experiment Name: At_Drought_Soil_Dry_P Parameter: Post-Treatment Value: None
  misc_feature: MA Experiment 20001556 PARAMETER Experiment Name: At_Drought_Soil_Dry_P Parameter: Timepoint (day) Value: 12
  misc_feature: MA Experiment 20001556 PARAMETER Experiment Name: At_Drought_Soil_Dry_P Parameter: Treatment Value: Drought vs. No Drought
  misc_feature: MA Experiment ID: 20001557 Result: Down-regulated in Transcription
  misc_feature: MA Experiment 20001557 PARAMETER Experiment Name: At_Drought_Soil_Dry_P Parameter: Age (day) Value: 27
  misc_feature: MA Experiment 20001557 PARAMETER Experiment Name: At_Drought_Soil_Dry_P Parameter: Organism Value: A. thaliana
  misc_feature: MA Experiment 20001557 PARAMETER Experiment Name: At_Drought_Soil_Dry_P Parameter: Plant Line Value: WS
  misc_feature: MA Experiment 20001557 PARAMETER Experiment Name: At_Drought_Soil_Dry_P Parameter: Post Timepoint (hr) Value: 3
  misc_feature: MA Experiment 20001557 PARAMETER Experiment Name: At_Drought_Soil_Dry_P Parameter: Post-Treatment Value: Re-Water vs. No Drought
  misc_feature: MA Experiment 20001557 PARAMETER Experiment Name: At_Drought_Soil_Dry_P Parameter: Timepoint (day) Value: 13
  misc_feature: MA Experiment 20001557 PARAMETER Experiment Name: At_Drought_Soil_Dry_P Parameter: Treatment Value: Drought vs. No Drought
  misc_feature: MA Experiment ID: 20001558 Result: Down-regulated in Transcription
  misc_feature: MA Experiment 20001558 PARAMETER Experiment Name: At_Drought_Soil_Dry_P Parameter: Age (day) Value: 27
  misc_feature: MA Experiment 20001558 PARAMETER Experiment Name: At_Drought_Soil_Dry_P Parameter: Organism Value: A. thaliana
  misc_feature: MA Experiment 20001558 PARAMETER Experiment Name: At_Drought_Soil_Dry_P Parameter: Plant Line Value: WS
  misc_feature: MA Experiment 20001558 PARAMETER Experiment Name: At_Drought_Soil_Dry_P Parameter: Post Timepoint (hr) Value: 6
  misc_feature: MA Experiment 20001558 PARAMETER Experiment Name: At_Drought_Soil_Dry_P Parameter: Post-Treatment Value: Re-Water vs. No Drought
  misc_feature: MA Experiment 20001558 PARAMETER Experiment Name: At_Drought_Soil_Dry_P Parameter: Timepoint (day) Value: 13
  misc_feature: MA Experiment 20001558 PARAMETER Experiment Name: At_Drought_Soil_Dry_P Parameter: Treatment Value: Drought vs. No Drought
  misc_feature: MA Experiment ID: 20001559 Result: Down-regulated in Transcription
  misc_feature: MA Experiment 20001559 PARAMETER Experiment Name: At_Drought_Soil_Dry_P Parameter: Age (day) Value: 28
  misc_feature: MA Experiment 20001559 PARAMETER Experiment Name: At_Drought_Soil_Dry_P Parameter: Organism Value: A. thaliana
  misc_feature: MA Experiment 20001559 PARAMETER Experiment Name: At_Drought_Soil_Dry_P Parameter: Plant Line Value: WS
  misc_feature: MA Experiment 20001559 PARAMETER Experiment Name: At_Drought_Soil_Dry_P Parameter: Post Timepoint (hr) Value: 29
  misc_feature: MA Experiment 20001559 PARAMETER Experiment Name: At_Drought_Soil_Dry_P Parameter: Post-Treatment Value: Re-Water vs. No Drought
  misc_feature: MA Experiment 20001559 PARAMETER Experiment Name: At_Drought_Soil_Dry_P Parameter: Timepoint (day) Value: 14
  misc_feature: MA Experiment 20001559 PARAMETER Experiment Name: At_Drought_Soil_Dry_P Parameter: Treatment Value: Drought vs. No Drought
  misc_feature: MA Experiment ID: 20001560 Result: Down-regulated in Transcription
  misc_feature: MA Experiment 20001560 PARAMETER Experiment Name: At_Drought_Soil_Dry_P Parameter: Age (day) Value: 28
  misc_feature: MA Experiment 20001560 PARAMETER Experiment Name: At_Drought_Soil_Dry_P Parameter: Organism Value: A. thaliana
  misc_feature: MA Experiment 20001560 PARAMETER Experiment Name: At_Drought_Soil_Dry_P Parameter: Plant Line Value: WS
  misc_feature: MA Experiment 20001560 PARAMETER Experiment Name: At_Drought_Soil_Dry_P Parameter: Post Timepoint (hr) Value: None
  misc_feature: MA Experiment 20001560 PARAMETER Experiment Name: At_Drought_Soil_Dry_P Parameter: Post-Treatment Value: None
  misc_feature: MA Experiment 20001560 PARAMETER Experiment Name: At_Drought_Soil_Dry_P Parameter: Timepoint (day) Value: 14
  misc_feature: MA Experiment 20001560 PARAMETER Experiment Name: At_Drought_Soil_Dry_P Parameter: Treatment Value: Drought vs. No Drought
  misc_feature: MA Experiment ID: 20001757 Result: Down-regulated in Transcription
  misc_feature: MA Experiment 20001757 PARAMETER Experiment Name: At_50mM_NH4NO3_L-to-H_P Parameter: Timepoint (hr) Value: 6
  misc_feature: MA Experiment 20001757 PARAMETER Experiment Name: At_50mM_NH4NO3_L-to-H_P Parameter: Tissue Value: Leaf
  misc_feature: MA Experiment 20001757 PARAMETER Experiment Name: At_50mM_NH4NO3_L-to-H_P Parameter: Treatment Value: 50mM NH4NO3 vs 100mM Mannitol
  misc_feature: MA Experiment ID: 20001768 Result: Up-regulated in Transcription
  misc_feature: MA Experiment 20001768 PARAMETER Experiment Name: At_Far-red-enriched-adult_P Parameter: Age (day) Value: 28
  misc_feature: MA Experiment 20001768 PARAMETER Experiment Name: At_Far-red-enriched-adult_P Parameter: Light Value: Far-red enriched vs. White
  misc_feature: MA Experiment 20001768 PARAMETER Experiment Name: At_Far-red-enriched-adult_P Parameter: Organism Value: A. thaliana
  misc_feature: MA Experiment 20001768 PARAMETER Experiment Name: At_Far-red-enriched-adult_P Parameter: Plant Line Value: Columbia
  misc_feature: MA Experiment 20001768 PARAMETER Experiment Name: At_Far-red-enriched-adult_P Parameter: Timepoint (hr) Value: 1
  misc_feature: MA Experiment 20001768 PARAMETER Experiment Name: At_Far-red-enriched-adult_P Parameter: Tissue Value: Aerial
  misc_feature: MA Experiment ID: 20001906 Result: Up-regulated in Transcription
  misc_feature: MA Experiment 20001906 PARAMETER Experiment Name: At_Drought_Reproduction_P Parameter: Age (day) Value: 35
  misc_feature: MA Experiment 20001906 PARAMETER Experiment Name: At_Drought_Reproduction_P Parameter: Organism Value: A. thaliana
  misc_feature: MA Experiment 20001906 PARAMETER Experiment Name: At_Drought_Reproduction_P Parameter: Plant Line Value: WS
  misc_feature: MA Experiment 20001906 PARAMETER Experiment Name: At_Drought_Reproduction_P Parameter: Timepoint (day) Value: 5
  misc_feature: MA Experiment 20001906 PARAMETER Experiment Name: At_Drought_Reproduction_P Parameter: Tissue Value: Siliques
  misc_feature: MA Experiment 20001906 PARAMETER Experiment Name: At_Drought_Reproduction_P Parameter: Treatment Value: Drought vs. No Drought
atttcaagaaccttgagaacatcaaaaactaacacagaaagaaaaaaaacagttcctgttctattagattgttttctaaattgtctgaaaatcatggaagtaacttcccaatctaccctccctccagggttcagatttcatcctaccgacgaagaactcatcgtttactatcttcgaaaccagaccatgtctaaaccatgccctgtctccatcatcccagaagttgatatctacaaattcgacccatggcaattacccgagaaaacagagtttggagaaaatgagtggtatttcttcagccctagagaaagaaaatatccaaacggagtcagaccaaaccgggcagctgtttccggttattggaaagcaaccggtacagacaaagccattcacagcggttcaagtaacgtaggtgtcaagaaagctctagtcttctacaaaggtagacctcctaaaggaatcaaaactgactggatcatgcatgagtatcgtctccatgattcacgtaaagcatcaacgaaacgtaacggttccatgaggttagatgaatgggtactgtgtaggatatacaagaagagaggagcaagtaagcttctgaatgagcaagagggtttcatggacgaagtactaatggaggatgagacaaaagttgtagttaacgaagcagagagaagaactgaagaagagataatgatgatgacgtcgatgaaacttccaaggacgtgttcgctggctcatttgttggaaatggattacatgggacccgtctctcacattgataattttagtcagttcgatcatcttcatcaacctgattcggagtctagttggttcggggaccttcagtttaaccaagacgagatcttaaaccatcatcgtcaagcgatgtttaagttttagtgatggggtcagtaaaaaagaagaagaaacaagaaaagatgtgcttgaaaagttactttggtagatatttggttagtttgggtacatgaatgaaaattgtaaaatattataactaaaacccaatgggattttatatttctcccatatgaatgtgaaatgaaaaacaatgtttaattaaaaattaagttgtttc

SEQ ID NO: 35064 - protein, 299 aa, Arabidopsis thaliana
  peptide (1)..(299): Ceres Seq. ID no. 12389090
  misc_feature (40)..(166): Pfam Name: No apical meristem (NAM) protein Pfam Description: No apical meristem (NAM) protein
  misc_feature (37)..(180): Homolog of NCBI NO: 30679026 NR Description: No apical meristem (NAM) protein family
  misc_feature (36)..(194): Homolog of NCBI NO: 10177060 NR Description: contains similarity to NAC-domain
  misc_feature (33)..(194): Homolog of NCBI NO: 30697896 NR Description: No apical meristem (NAM) protein family
  misc_feature (36)..(172): Homolog of NCBI NO: 34899790 NR Description: OJ1773_H01.21 [Oryza sativa (japonica
  misc_feature (30)..(261): Homolog of NCBI NO: 34900404 NR Description: OsNAC3 protein [Oryza sativa (japonica
  misc_feature (33)..(203): Homolog of NCBI NO: 34909234 NR Description: development regulation gene OsNAC4
  misc_feature (180)..(252): Homolog of NCBI NO: 34894054 NR Description: putative NAM protein [Oryza sativa (japonica
  misc_feature (40)..(173): Homolog of NCBI NO: 34894054 NR Description: putative NAM protein [Oryza sativa (japonica
  misc_feature (37)..(196): Homolog of NCBI NO: 6223651 NR Description: NAM-like protein (no apical meristem)
  misc_feature (32)..(198): Homolog of NCBI NO: 34902154 NR Description: Putative NAM (no apical meristem) protein
ISRTLRTSKTNTERKKTVPVLLDCFLNCLKIMEVTSQSTLPPGFRFHPTDEELIVYYLRNQTMSKPCPVSIIPEVDIYKFDPWQLPEKTEFGENEWYFFSPRERKYPNGVRPNRAAVSGYWKATGTDKAIHSGSSNVGVKKALVFYKGRPPKGIKTDWIMHEYRLHDSRKASTKRNGSMRLDEWVLCRIYKKRGASKLLNEQEGFMDEVLMEDETKVVVNEAERRTEEEIMMMTSMKLPRTCSLAHLLEMDYMGPVSHIDNFSQFDHLHQPDSESSWFGDLQFNQDEILNHHRQAMFKF

SEQ ID NO: 35065 - protein, 268 aa, Arabidopsis thaliana
  peptide (1)..(268): Ceres Seq. ID no. 12389091
  misc_feature (9)..(135): Pfam Name: No apical meristem (NAM) protein Pfam Description: No apical meristem (NAM) protein
  misc_feature (6)..(149): Homolog of NCBI NO: 30679026 NR Description: No apical meristem (NAM) protein family
  misc_feature (5)..(163): Homolog of NCBI NO: 10177060 NR Description: contains similarity to NAC-domain
  misc_feature (2)..(163): Homolog of NCBI NO: 30697896 NR Description: No apical meristem (NAM) protein family
  misc_feature (5)..(141): Homolog of NCBI NO: 34899790 NR Description: OJ1773_H01.21 [Oryza sativa (japonica
  misc_feature (1)..(230): Homolog of NCBI NO: 34900404 NR Description: OsNAC3 protein [Oryza sativa (japonica
  misc_feature (2)..(172): Homolog of NCBI NO: 34909234 NR Description: development regulation gene OsNAC4
  misc_feature (149)..(221): Homolog of NCBI NO: 34894054 NR Description: putative NAM protein [Oryza sativa (japonica
  misc_feature (9)..(142): Homolog of NCBI NO: 34894054 NR Description: putative NAM protein [Oryza sativa (japonica
  misc_feature (6)..(165): Homolog of NCBI NO: 6223651 NR Description: NAM-like protein (no apical meristem)
  misc_feature (1)..(167): Homolog of NCBI NO: 34902154 NR Description: Putative NAM (no apical meristem) protein
MEVTSQSTLPPGFRFHPTDEELIVYYLRNQTMSKPCPVSIIPEVDIYKFDPWQLPEKTEFGENEWYFFSPRERKYPNGVRPNRAAVSGYWKATGTDKAIHSGSSNVGVKKALVFYKGRPPKGIKTDWIMHEYRLHDSRKASTKRNGSMRLDEWVLCRIYKKRGASKLLNEQEGFMDEVLMEDETKVVVNEAERRTEEEIMMMTSMKLPRTCSLAHLLEMDYMGPVSHIDNFSQFDHLHQPDSESSWFGDLQFNQDEILNHHRQAMFKF

SEQ ID NO: 35066 - protein, 237 aa, Arabidopsis thaliana
  peptide (1)..(237): Ceres Seq. ID no. 12389092
  misc_feature (1)..(104): Pfam Name: No apical meristem (NAM) protein Pfam Description: No apical meristem (NAM) protein
  misc_feature (1)..(118): Homolog of NCBI NO: 30679026 NR Description: No apical meristem (NAM) protein family
  misc_feature (1)..(132): Homolog of NCBI NO: 10177060 NR Description: contains similarity to NAC-domain
  misc_feature (1)..(132): Homolog of NCBI NO: 30697896 NR Description: No apical meristem (NAM) protein family
  misc_feature (1)..(110): Homolog of NCBI NO: 34899790 NR Description: OJ1773_H01.21 [Oryza sativa (japonica
  misc_feature (1)..(199): Homolog of NCBI NO: 34900404 NR Description: OsNAC3 protein [Oryza sativa (japonica
  misc_feature (1)..(141): Homolog of NCBI NO: 34909234 NR Description: development regulation gene OsNAC4
  misc_feature (118)..(190): Homolog of NCBI NO: 34894054 NR Description: putative NAM protein [Oryza sativa (japonica
  misc_feature (1)..(111): Homolog of NCBI NO: 34894054 NR Description: putative NAM protein [Oryza sativa (japonica
  misc_feature (1)..(134): Homolog of NCBI NO: 6223651 NR Description: NAM-like protein (no apical meristem)
  misc_feature (1)..(136): Homolog of NCBI NO: 34902154 NR Description: Putative NAM (no apical meristem) protein
MSKPCPVSIIPEVDIYKFDPWQLPEKTEFGENEWYFFSPRERKYPNGVRPNRAAVSGYWKATGTDKAIHSGSSNVGVKKALVFYKGRPPKGIKTDWIMHEYRLHDSRKASTKRNGSMRLDEWVLCRIYKKRGASKLLNEQEGFMDEVLMEDETKVVVNEAERRTEEEIMMMTSMKLPRTCSLAHLLEMDYMGPVSHIDNFSQFDHLHQPDSESSWFGDLQFNQDEILNHHRQAMFKF

SEQ ID NO: 35067 - DNA, 1024 bp, Arabidopsis thaliana
  misc_feature (1)..(1024): Ceres Seq. ID no. 12332053
  misc_feature: MA Experiment ID: 108434 Result: Down-regulated in Transcription
  misc_feature: MA Experiment 108434 PARAMETER Experiment Name: At_Root_Tips_cDNA_P Parameter: Tissue Value: Root Tips
  misc_feature: MA Experiment ID: 108461 Result: Down-regulated in Transcription
  misc_feature: MA Experiment 108461 PARAMETER Experiment Name: At_Germinating_Seeds_cDNA_P Parameter: Age (day) Value: 1 vs. 0
  misc_feature: MA Experiment 108461 PARAMETER Experiment Name: At_Germinating_Seeds_cDNA_P Parameter: Tissue Value: Germinating Seeds
  misc_feature: MA Experiment ID: 108462 Result: Up-regulated in Transcription
  misc_feature: MA Experiment 108462 PARAMETER Experiment Name: At_Germinating_Seeds_cDNA_P Parameter: Age (day) Value: 2 vs. 0
  misc_feature: MA Experiment 108462 PARAMETER Experiment Name: At_Germinating_Seeds_cDNA_P Parameter: Tissue Value: Germinating Seeds
  misc_feature: MA Experiment ID: 108463 Result: Up-regulated in Transcription
  misc_feature: MA Experiment 108463 PARAMETER Experiment Name: At_Germinating_Seeds_cDNA_P Parameter: Age (day) Value: 3 vs. 0
  misc_feature: MA Experiment 108463 PARAMETER Experiment Name: At_Germinating_Seeds_cDNA_P Parameter: Tissue Value: Germinating Seeds
  misc_feature: MA Experiment ID: 108464 Result: Up-regulated in Transcription
  misc_feature: MA Experiment 108464 PARAMETER Experiment Name: At_Germinating_Seeds_cDNA_P Parameter: Age (day) Value: 4 vs. 0
  misc_feature: MA Experiment 108464 PARAMETER Experiment Name: At_Germinating_Seeds_cDNA_P Parameter: Tissue Value: Germinating Seeds
  misc_feature: MA Experiment ID: 108488 Result: Down-regulated in Transcription
  misc_feature: MA Experiment ID: 108561 Result: Up-regulated in Transcription
  misc_feature: MA Experiment 108561 PARAMETER Experiment Name: At_100uM_ABA_cDNA_P Parameter: Timepoint (hr) Value: 6
  misc_feature: MA Experiment 108561 PARAMETER Experiment Name: At_100uM_ABA_cDNA_P Parameter: Tissue Value: Aerial
  misc_feature: MA Experiment 108561 PARAMETER Experiment Name: At_100uM_ABA_cDNA_P Parameter: Treatment Value: 100uM ABA vs. No Treatment
  misc_feature: MA Experiment ID: 108573 Result: Up-regulated in Transcription
  misc_feature: MA Experiment 108573 PARAMETER Experiment Name: At_Drought_cDNA_P Parameter: Timepoint (hr) Value: 6
  misc_feature: MA Experiment 108573 PARAMETER Experiment Name: At_Drought_cDNA_P Parameter: Tissue Value: Aerial
  misc_feature: MA Experiment 108573 PARAMETER Experiment Name: At_Drought_cDNA_P Parameter: Treatment Value: Drought vs. No Drought
  misc_feature: MA Experiment ID: 108585 Result: Up-regulated in Transcription
  misc_feature: MA Experiment 108585 PARAMETER Experiment Name: At_5mM_NaNP_cDNA_P Parameter: Timepoint (hr) Value: 6
  misc_feature: MA Experiment 108585 PARAMETER Experiment Name: At_5mM_NaNP_cDNA_P Parameter: Tissue Value: Aerial
  misc_feature: MA Experiment 108585 PARAMETER Experiment Name: At_5mM_NaNP_cDNA_P Parameter: Treatment Value: null
  misc_feature: MA Experiment ID: 108594 Result: Down-regulated in Transcription
  misc_feature: MA Experiment 108594 PARAMETER Experiment Name: At_Ler-rhl_Root_cDNA_P Parameter: Plant Line Value: null
  misc_feature: MA Experiment ID: 108595 Result: Up-regulated in Transcription
  misc_feature: MA Experiment 108595 PARAMETER Experiment Name: At_Ler-pi_Ovule_cDNA_P Parameter: Plant Line Value: null
  misc_feature: MA Experiment ID: 108605 Result: Up-regulated in Transcription
  misc_feature: MA Experiment 108605 PARAMETER Experiment Name: At_100uM_ABA_cDNA_P Parameter: Timepoint (hr) Value: 6
  misc_feature: MA Experiment 108605 PARAMETER Experiment Name: At_100uM_ABA_cDNA_P Parameter: Tissue Value: Aerial
  misc_feature: MA Experiment 108605 PARAMETER Experiment Name: At_100uM_ABA_cDNA_P Parameter: Treatment Value: 100uM ABA vs. No Treatment
  misc_feature: MA Experiment ID: 108607 Result: Up-regulated in Transcription
  misc_feature: MA Experiment 108607 PARAMETER Experiment Name: At_100uM_ABA_cDNA_P Parameter: Timepoint (hr) Value: 4
  misc_feature: MA Experiment 108607 PARAMETER Experiment Name: At_100uM_ABA_cDNA_P Parameter: Tissue Value: Aerial
  misc_feature: MA Experiment 108607 PARAMETER Experiment Name: At_100uM_ABA_cDNA_P Parameter: Treatment Value: 100uM ABA vs. No Treatment
  misc_feature: MA Experiment ID: 108608 Result: Up-regulated in Transcription
  misc_feature: MA Experiment 108608 PARAMETER Experiment Name: At_100uM_ABA_cDNA_P Parameter: Timepoint (hr) Value: 1
  misc_feature: MA Experiment 108608 PARAMETER Experiment Name: At_100uM_ABA_cDNA_P Parameter: Tissue Value: Aerial
  misc_feature: MA Experiment 108608 PARAMETER Experiment Name: At_100uM_ABA_cDNA_P Parameter: Treatment Value: 100uM ABA vs. No Treatment
  misc_feature: MA Experiment ID: 108609 Result: Up-regulated in Transcription
  misc_feature: MA Experiment 108609 PARAMETER Experiment Name: At_100uM_ABA_cDNA_P Parameter: Timepoint (hr) Value: 24
  misc_feature: MA Experiment 108609 PARAMETER Experiment Name: At_100uM_ABA_cDNA_P Parameter: Tissue Value: Aerial
  misc_feature: MA Experiment 108609 PARAMETER Experiment Name: At_100uM_ABA_cDNA_P Parameter: Treatment Value: 100uM ABA vs. No Treatment
  misc_feature: MA Experiment ID: 108668 Result: Up-regulated in Transcription
  misc_feature: MA Experiment 108668 PARAMETER Experiment Name: At_2mM_SA_cDNA_P Parameter: Plant Line Value: WS
  misc_feature: MA Experiment 108668 PARAMETER Experiment Name: At_2mM_SA_cDNA_P Parameter: Timepoint (hr) Value: 6
  misc_feature: MA Experiment 108668 PARAMETER Experiment Name: At_2mM_SA_cDNA_P Parameter: Treatment Value: 2mM SA vs. No Treatment
  misc_feature: MA Experiment ID: 20000072 Result: Up-regulated in Transcription
  misc_feature: MA Experiment 20000072 PARAMETER Experiment Name: At_100uM_ABA_Mutants_cDNA_P Parameter: Plant Line Value: CS8105
  misc_feature: MA Experiment 20000072 PARAMETER Experiment Name: At_100uM_ABA_Mutants_cDNA_P Parameter: Timepoint (hr) Value: 6
  misc_feature: MA Experiment 20000072 PARAMETER Experiment Name: At_100uM_ABA_Mutants_cDNA_P Parameter: Tissue Value: Aerial
  misc_feature: MA Experiment 20000072 PARAMETER Experiment Name: At_100uM_ABA_Mutants_cDNA_P Parameter: Treatment Value: 100uM ABA vs. No Treatment
  misc_feature: MA Experiment ID: 20000086 Result: Up-regulated in Transcription
  misc_feature: MA Experiment 20000086 PARAMETER Experiment Name: At_100uM_ABA_Mutants_cDNA_P Parameter: Plant Line Value: CS22
  misc_feature: MA Experiment 20000086 PARAMETER Experiment Name: At_100uM_ABA_Mutants_cDNA_P Parameter: Timepoint (hr) Value: 6
  misc_feature: MA Experiment 20000086 PARAMETER Experiment Name: At_100uM_ABA_Mutants_cDNA_P Parameter: Tissue Value: Aerial
  misc_feature: MA Experiment 20000086 PARAMETER Experiment Name: At_100uM_ABA_Mutants_cDNA_P Parameter: Treatment Value: 100uM ABA vs. No Treatment
  misc_feature: MA Experiment ID: 20000087 Result: Up-regulated in Transcription
  misc_feature: MA Experiment 20000087 PARAMETER Experiment Name: At_100uM_ABA_Mutants_cDNA_P Parameter: Plant Line Value: WS
  misc_feature: MA Experiment 20000087 PARAMETER Experiment Name: At_100uM_ABA_Mutants_cDNA_P Parameter: Timepoint (hr) Value: 6
  misc_feature: MA Experiment 20000087 PARAMETER Experiment Name: At_100uM_ABA_Mutants_cDNA_P Parameter: Tissue Value: Aerial
  misc_feature: MA Experiment 20000087 PARAMETER Experiment Name: At_100uM_ABA_Mutants_cDNA_P Parameter: Treatment Value: 100uM ABA vs. No Treatment
  misc_feature: MA Experiment ID: 20000088 Result: Up-regulated in Transcription
  misc_feature: MA Experiment 20000088 PARAMETER Experiment Name: At_100uM_ABA_Mutants_cDNA_P Parameter: Plant Line Value: Landsberg
  misc_feature: MA Experiment 20000088 PARAMETER Experiment Name: At_100uM_ABA_Mutants_cDNA_P Parameter: Timepoint (hr) Value: 6
  misc_feature: MA Experiment 20000088 PARAMETER Experiment Name: At_100uM_ABA_Mutants_cDNA_P Parameter: Tissue Value: Aerial
  misc_feature: MA Experiment 20000088 PARAMETER Experiment Name: At_100uM_ABA_Mutants_cDNA_P Parameter: Treatment Value: 100uM ABA vs. No Treatment
  misc_feature: MA Experiment ID: 20000090 Result: Up-regulated in Transcription
  misc_feature: MA Experiment ID: 20000111 Result: Down-regulated in Transcription
  misc_feature: MA Experiment 20000111 PARAMETER Experiment Name: At_42deg_Heat_cDNA_P Parameter: Temperature (deg C) Value: 42 vs. 22
  misc_feature: MA Experiment 20000111 PARAMETER Experiment Name: At_42deg_Heat_cDNA_P Parameter: Timepoint (hr) Value: 6
  misc_feature: MA Experiment 20000111 PARAMETER Experiment Name: At_42deg_Heat_cDNA_P Parameter: Tissue Value: Aerial
  misc_feature: MA Experiment ID: 20000113 Result: Down-regulated in Transcription
  misc_feature: MA Experiment 20000113 PARAMETER Experiment Name: At_42deg_Heat_cDNA_P Parameter: Temperature (deg C) Value: 42 vs. 22
  misc_feature: MA Experiment 20000113 PARAMETER Experiment Name: At_42deg_Heat_cDNA_P Parameter: Timepoint (hr) Value: 8
  misc_feature: MA Experiment 20000113 PARAMETER Experiment Name: At_42deg_Heat_cDNA_P Parameter: Tissue Value: Aerial
  misc_feature: MA Experiment ID: 20000166 Result: Up-regulated in Transcription
  misc_feature: MA Experiment 20000166 PARAMETER Experiment Name: At_100uM_ABA_P Parameter: Age (day) Value: 14
  misc_feature: MA Experiment 20000166 PARAMETER Experiment Name: At_100uM_ABA_P Parameter: Organism Value: A. thaliana
  misc_feature: MA Experiment 20000166 PARAMETER Experiment Name: At_100uM_ABA_P Parameter: Plant Line Value: WS
  misc_feature: MA Experiment 20000166 PARAMETER Experiment Name: At_100uM_ABA_P Parameter: Timepoint (hr) Value: 1
  misc_feature: MA Experiment 20000166 PARAMETER Experiment Name: At_100uM_ABA_P Parameter: Tissue Value: Aerial
  misc_feature: MA Experiment 20000166 PARAMETER Experiment Name: At_100uM_ABA_P Parameter: Treatment Value: 100uM ABA vs. No Treatment
  misc_feature: MA Experiment ID: 20000169 Result: Up-regulated in Transcription
  misc_feature: MA Experiment 20000169 PARAMETER Experiment Name: At_100uM_ABA_P Parameter: Age (day) Value: 14
  misc_feature: MA Experiment 20000169 PARAMETER Experiment Name: At_100uM_ABA_P Parameter: Organism Value: A. thaliana
  misc_feature: MA Experiment 20000169 PARAMETER Experiment Name: At_100uM_ABA_P Parameter: Plant Line Value: WS
  misc_feature: MA Experiment 20000169 PARAMETER Experiment Name: At_100uM_ABA_P Parameter: Timepoint (hr) Value: 6
  misc_feature: MA Experiment 20000169 PARAMETER Experiment Name: At_100uM_ABA_P Parameter: Tissue Value: Aerial
  misc_feature: MA Experiment 20000169 PARAMETER Experiment Name: At_100uM_ABA_P Parameter: Treatment Value: 100uM ABA vs. No Treatment
  misc_feature: MA Experiment ID: 20000171 Result: Down-regulated in Transcription
  misc_feature: MA Experiment 20000171 PARAMETER Experiment Name: At_42deg_Heat_P Parameter: Age (day) Value: 14
  misc_feature: MA Experiment 20000171 PARAMETER Experiment Name: At_42deg_Heat_P Parameter: Organism Value: A. thaliana
  misc_feature: MA Experiment 20000171 PARAMETER Experiment Name: At_42deg_Heat_P Parameter: Plant Line Value: WS
  misc_feature: MA Experiment 20000171 PARAMETER Experiment Name: At_42deg_Heat_P Parameter: Temperature (deg C) Value: 42 vs. 22
  misc_feature: MA Experiment 20000171 PARAMETER Experiment Name: At_42deg_Heat_P Parameter: Timepoint (hr) Value: 1
  misc_feature: MA Experiment 20000171 PARAMETER Experiment Name: At_42deg_Heat_P Parameter: Tissue Value: Aerial
  misc_feature: MA Experiment ID: 20000173 Result: Down-regulated in Transcription
  misc_feature: MA Experiment 20000173 PARAMETER Experiment Name: At_42deg_Heat_P Parameter: Age (day) Value: 14
  misc_feature: MA Experiment 20000173 PARAMETER Experiment Name: At_42deg_Heat_P Parameter: Organism Value: A. thaliana
  misc_feature: MA Experiment 20000173 PARAMETER Experiment Name: At_42deg_Heat_P Parameter: Plant Line Value: WS
  misc_feature: MA Experiment 20000173 PARAMETER Experiment Name: At_42deg_Heat_P Parameter: Temperature (deg C) Value: 42 vs. 22
  misc_feature: MA Experiment 20000173 PARAMETER Experiment Name: At_42deg_Heat_P Parameter: Timepoint (hr) Value: 6
  misc_feature: MA Experiment 20000173 PARAMETER Experiment Name: At_42deg_Heat_P Parameter: Tissue Value: Aerial
  misc_feature: MA Experiment ID: 20000179 Result: Down-regulated in Transcription
  misc_feature: MA Experiment 20000179 PARAMETER Experiment Name: At_Germinating_Seeds_P Parameter: Age (hr) Value: 6 vs. 0
  misc_feature: MA Experiment 20000179 PARAMETER Experiment Name: At_Germinating_Seeds_P Parameter: Tissue Value: Germinating Seeds
  misc_feature: MA Experiment ID: 20000180 Result: Down-regulated in Transcription
  misc_feature: MA Experiment 20000180 PARAMETER Experiment Name: At_Germinating_Seeds_P Parameter: Age (hr) Value: 24 vs. 0
  misc_feature: MA Experiment 20000180 PARAMETER Experiment Name: At_Germinating_Seeds_P Parameter: Tissue Value: Germinating Seeds
  misc_feature: MA Experiment ID: 20000182 Result: Up-regulated in Transcription
  misc_feature: MA Experiment 20000182 PARAMETER Experiment Name: At_2mM_SA_P Parameter: Age (day) Value: 14
  misc_feature: MA Experiment 20000182 PARAMETER Experiment Name: At_2mM_SA_P Parameter: Organism Value: A. thaliana
  misc_feature: MA Experiment 20000182 PARAMETER Experiment Name: At_2mM_SA_P Parameter: Plant Line Value: WS
  misc_feature: MA Experiment 20000182 PARAMETER Experiment Name: At_2mM_SA_P Parameter: Timepoint (hr) Value: 6
  misc_feature: MA Experiment 20000182 PARAMETER Experiment Name: At_2mM_SA_P Parameter: Tissue Value: Aerial
  misc_feature: MA Experiment 20000182 PARAMETER Experiment Name: At_2mM_SA_P Parameter: Treatment Value: 2mM SA vs. No Treatment
  misc_feature: MA Experiment ID: 20000184 Result: Down-regulated in Transcription
  misc_feature: MA Experiment 20000184 PARAMETER Experiment Name: At_Shoots__P Parameter: Age (day) Value: 7
  misc_feature: MA Experiment 20000184 PARAMETER Experiment Name: At_Shoots__P Parameter: Tissue Value: Shoots vs. Whole Plant
  misc_feature: MA Experiment ID: 20000227 Result: Down-regulated in Transcription
  misc_feature: MA Experiment 20000227 PARAMETER Experiment Name: At_Root-Tips-vs-Tops_P Parameter: Tissue Value: Root Tips vs. Root Tops
  misc_feature: MA Experiment ID: 20000234 Result: Down-regulated in Transcription
  misc_feature: MA Experiment 20000234 PARAMETER Experiment Name: At_Siliques_P Parameter: Age (day) Value: 21
  misc_feature: MA Experiment 20000234 PARAMETER Experiment Name: At_Siliques_P Parameter: Organism Value: A. thaliana
  misc_feature: MA Experiment 20000234 PARAMETER Experiment Name: At_Siliques_P Parameter: Plant Line Value: WS
  misc_feature: MA Experiment 20000234 PARAMETER Experiment Name: At_Siliques_P Parameter: Tissue Value: Less Than 5mm Siliques vs. Whole Plant
  misc_feature: MA Experiment ID: 20000235 Result: Down-regulated in Transcription
  misc_feature: MA Experiment 20000235 PARAMETER Experiment Name: At_Siliques_P Parameter: Age (day) Value: 21
  misc_feature: MA Experiment 20000235 PARAMETER Experiment Name: At_Siliques_P Parameter: Organism Value: A. thaliana
  misc_feature: MA Experiment 20000235 PARAMETER Experiment Name: At_Siliques_P Parameter: Plant Line Value: WS
  misc_feature: MA Experiment 20000235 PARAMETER Experiment Name: At_Siliques_P Parameter: Tissue Value: 5-10mm Siliques vs. Whole Plant
  misc_feature: MA Experiment ID: 20000264 Result: Down-regulated in Transcription
  misc_feature: MA Experiment 20000264 PARAMETER Experiment Name: At_Open_Flower_P Parameter: Age (day) Value: 21
  misc_feature: MA Experiment 20000264 PARAMETER Experiment Name: At_Open_Flower_P Parameter: Plant Line Value: WS
  misc_feature: MA Experiment 20000264 PARAMETER Experiment Name: At_Open_Flower_P Parameter: Tissue Value: Open Flower vs. Whole Plant
  misc_feature: MA Experiment ID: 20000265 Result: Down-regulated in Transcription
  misc_feature: MA Experiment 20000265 PARAMETER Experiment Name: At_Open_Flower_P Parameter: Age (day) Value: 21
  misc_feature: MA Experiment 20000265 PARAMETER Experiment Name: At_Open_Flower_P Parameter: Plant Line Value: WS
  misc_feature: MA Experiment 20000265 PARAMETER Experiment Name: At_Open_Flower_P Parameter: Tissue Value: Closed Flower vs. Whole Plant
  misc_feature: MA Experiment ID: 20000267 Result: Up-regulated in Transcription
  misc_feature: MA Experiment 20000267 PARAMETER Experiment Name: At_Drought_P Parameter: Age (day) Value: 7
  misc_feature: MA Experiment 20000267 PARAMETER Experiment Name: At_Drought_P Parameter: Organism Value: A. thaliana
  misc_feature: MA Experiment 20000267 PARAMETER Experiment Name: At_Drought_P Parameter: Plant Line Value: WS
  misc_feature: MA Experiment 20000267 PARAMETER Experiment Name: At_Drought_P Parameter: Timepoint (hr) Value: 6
  misc_feature: MA Experiment 20000267 PARAMETER Experiment Name: At_Drought_P Parameter: Tissue Value: Whole Plant
  misc_feature: MA Experiment 20000267 PARAMETER Experiment Name: At_Drought_P Parameter: Treatment Value: Drought vs. No Drought
  misc_feature: MA Experiment ID: 20000269 Result: Up-regulated in Transcription
  misc_feature: MA Experiment 20000269 PARAMETER Experiment Name: At_1mM_KNO3_L-vs-H_Roots_P Parameter: Age (day) Value: 7,10,12
  misc_feature: MA Experiment 20000269 PARAMETER Experiment Name: At_1mM_KNO3_L-vs-H_Roots_P Parameter: Organism Value: A. thaliana
  misc_feature: MA Experiment 20000269 PARAMETER Experiment Name: At_1mM_KNO3_L-vs-H_Roots_P Parameter: Plant Line Value: WS
  misc_feature: MA Experiment 20000269 PARAMETER Experiment Name: At_1mM_KNO3_L-vs-H_Roots_P Parameter: Timepoint (day) Value: 7,10,12
  misc_feature: MA Experiment 20000269 PARAMETER Experiment Name: At_1mM_KNO3_L-vs-H_Roots_P Parameter: Tissue Value: Roots
  misc_feature: MA Experiment 20000269 PARAMETER Experiment Name: At_1mM_KNO3_L-vs-H_Roots_P Parameter: Treatment Value: 1mM KNO3 vs. 50mM KNO3
  misc_feature: MA Experiment ID: 20000286 Result: Down-regulated in Transcription
  misc_feature: MA Experiment 20000286 PARAMETER Experiment Name: At_Open_Flower_P Parameter: Age (day) Value: 21
  misc_feature: MA Experiment 20000286 PARAMETER Experiment Name: At_Open_Flower_P Parameter: Plant Line Value: WS
  misc_feature: MA Experiment 20000286 PARAMETER Experiment Name: At_Open_Flower_P Parameter: Tissue Value: Half Open vs. Whole Plant
  misc_feature: MA Experiment ID: 20000438 Result: Down-regulated in Transcription
  misc_feature: MA Experiment 20000438 PARAMETER Experiment Name: At_Shoots__P Parameter: Age (day) Value: 14
  misc_feature: MA Experiment 20000438 PARAMETER Experiment Name: At_Shoots__P Parameter: Tissue Value: Shoots vs. Whole Plant
  misc_feature: MA Experiment ID: 20000439 Result: Up-regulated in Transcription
  misc_feature: MA Experiment 20000439 PARAMETER Experiment Name: At_Roots__P Parameter: Age (day) Value: 14 vs. 21
  misc_feature: MA Experiment 20000439 PARAMETER Experiment Name: At_Roots__P Parameter: Organism Value: A. thaliana
  misc_feature: MA Experiment 20000439 PARAMETER Experiment Name: At_Roots__P Parameter: Tissue Value: Roots vs. Whole Plant
  misc_feature: MA Experiment ID: 20000453 Result: Up-regulated in Transcription
  misc_feature: MA Experiment 20000453 PARAMETER Experiment Name: At_100uM_ABA_P Parameter: Age (day) Value: 15
  misc_feature: MA Experiment 20000453 PARAMETER Experiment Name: At_100uM_ABA_P Parameter: Organism Value: A. thaliana
  misc_feature: MA Experiment 20000453 PARAMETER Experiment Name: At_100uM_ABA_P Parameter: Plant Line Value: WS
  misc_feature: MA Experiment 20000453 PARAMETER Experiment Name: At_100uM_ABA_P Parameter: Timepoint (hr) Value: 24
  misc_feature: MA Experiment 20000453 PARAMETER Experiment Name: At_100uM_ABA_P Parameter: Tissue Value: Aerial
  misc_feature: MA Experiment 20000453 PARAMETER Experiment Name: At_100uM_ABA_P Parameter: Treatment Value: 100uM ABA vs. No Treatment
  misc_feature: MA Experiment ID: 20000527 Result: Down-regulated in Transcription
  misc_feature: MA Experiment 20000527 PARAMETER Experiment Name: At_10percent_PEG_P Parameter: Age (day) Value: 20
  misc_feature: MA Experiment 20000527 PARAMETER Experiment Name: At_10percent_PEG_P Parameter: Organism Value: A. thaliana
  misc_feature: MA Experiment 20000527 PARAMETER Experiment Name: At_10percent_PEG_P Parameter: Plant Line Value: WS
  misc_feature: MA Experiment 20000527 PARAMETER Experiment Name: At_10percent_PEG_P Parameter: Timepoint (day) Value: 20
  misc_feature: MA Experiment 20000527 PARAMETER Experiment Name: At_10percent_PEG_P Parameter: Tissue Value: Whole Plant
  misc_feature: MA Experiment 20000527 PARAMETER Experiment Name: At_10percent_PEG_P Parameter: Treatment Value: 10percent PEG vs. No Treatment
  misc_feature: MA Experiment ID: 20000574 Result: Up-regulated in Transcription
  misc_feature: MA Experiment 20000574 PARAMETER Experiment Name: At_100uM_ABA_Mutants__P Parameter: Organism Value: A. thaliana
  misc_feature: MA Experiment 20000574 PARAMETER Experiment Name: At_100uM_ABA_Mutants__P Parameter: Plant Line Value: CS23 vs. Ler wt
  misc_feature: MA Experiment 20000574 PARAMETER Experiment Name: At_100uM_ABA_Mutants__P Parameter: Timepoint (hr) Value: N/A
  misc_feature: MA Experiment 20000574 PARAMETER Experiment Name: At_100uM_ABA_Mutants__P Parameter: Tissue Value: Whole Plant
  misc_feature: MA Experiment 20000574 PARAMETER Experiment Name: At_100uM_ABA_Mutants__P Parameter: Treatment Value: None
  misc_feature: MA Experiment ID: 20000794 Result: Down-regulated in Transcription
  misc_feature: MA Experiment 20000794 PARAMETER Experiment Name: At_Petals_P Parameter: Age (day) Value: 23-25 days
  misc_feature: MA Experiment 20000794 PARAMETER Experiment Name: At_Petals_P Parameter: Plant Line Value: WS
  misc_feature: MA Experiment 20000794 PARAMETER Experiment Name: At_Petals_P Parameter: Tissue Value: Petals vs. Whole plant
  misc_feature: MA Experiment ID: 20001558 Result: Down-regulated in Transcription
  misc_feature: MA Experiment 20001558 PARAMETER Experiment Name: At_Drought_Soil_Dry_P Parameter: Age (day) Value: 27
  misc_feature: MA Experiment 20001558 PARAMETER Experiment Name: At_Drought_Soil_Dry_P Parameter: Organism Value: A. thaliana
  misc_feature: MA Experiment 20001558 PARAMETER Experiment Name: At_Drought_Soil_Dry_P Parameter: Plant Line Value: WS
  misc_feature: MA Experiment 20001558 PARAMETER Experiment Name: At_Drought_Soil_Dry_P Parameter: Post Timepoint (hr) Value: 6
  misc_feature: MA Experiment 20001558 PARAMETER Experiment Name: At_Drought_Soil_Dry_P Parameter: Post-Treatment Value: Re-Water vs. No Drought
  misc_feature: MA Experiment 20001558 PARAMETER Experiment Name: At_Drought_Soil_Dry_P Parameter: Timepoint (day) Value: 13
  misc_feature: MA Experiment 20001558 PARAMETER Experiment Name: At_Drought_Soil_Dry_P Parameter: Treatment Value: Drought vs. No Drought
  misc_feature: MA Experiment ID: 20001560 Result: Down-regulated in Transcription
  misc_feature: MA Experiment 20001560 PARAMETER Experiment Name: At_Drought_Soil_Dry_P Parameter: Age (day) Value: 28
  misc_feature: MA Experiment 20001560 PARAMETER Experiment Name: At_Drought_Soil_Dry_P Parameter: Organism Value: A. thaliana
  misc_feature: MA Experiment 20001560 PARAMETER Experiment Name: At_Drought_Soil_Dry_P Parameter: Plant Line Value: WS
  misc_feature: MA Experiment 20001560 PARAMETER Experiment Name: At_Drought_Soil_Dry_P Parameter: Post Timepoint (hr) Value: None
  misc_feature: MA Experiment 20001560 PARAMETER Experiment Name: At_Drought_Soil_Dry_P Parameter: Post-Treatment Value: None
  misc_feature: MA Experiment 20001560 PARAMETER Experiment Name: At_Drought_Soil_Dry_P Parameter: Timepoint (day) Value: 14
  misc_feature: MA Experiment 20001560 PARAMETER Experiment Name: At_Drought_Soil_Dry_P Parameter: Treatment Value: Drought vs. No Drought
  misc_feature: MA Experiment ID: 20001761 Result: Down-regulated in Transcription
  misc_feature: MA Experiment 20001761 PARAMETER Experiment Name: At_50mM_NH4NO3_L-to-H_P Parameter: Timepoint (hr) Value: 4
  misc_feature: MA Experiment 20001761 PARAMETER Experiment Name: At_50mM_NH4NO3_L-to-H_P Parameter: Tissue Value: Siliques
  misc_feature: MA Experiment 20001761 PARAMETER Experiment Name: At_50mM_NH4NO3_L-to-H_P Parameter: Treatment Value: 50mM NH4NO3 vs 100mM Mannitol
  misc_feature: MA Experiment ID: 20001773 Result: Down-regulated in Transcription
  misc_feature: MA Experiment 20001773 PARAMETER Experiment Name: At_Far-red-enriched-adult_P Parameter: Age (day) Value: 30
  misc_feature: MA Experiment 20001773 PARAMETER Experiment Name: At_Far-red-enriched-adult_P Parameter: Light Value: Far-red enriched vs. White
  misc_feature: MA Experiment 20001773 PARAMETER Experiment Name: At_Far-red-enriched-adult_P Parameter: Organism Value: A. thaliana
  misc_feature: MA Experiment 20001773 PARAMETER Experiment Name: At_Far-red-enriched-adult_P Parameter: Plant Line Value: Columbia
  misc_feature: MA Experiment 20001773 PARAMETER Experiment Name: At_Far-red-enriched-adult_P Parameter: Timepoint (hr) Value: 48
  misc_feature: MA Experiment 20001773 PARAMETER Experiment Name: At_Far-red-enriched-adult_P Parameter: Tissue Value: Aerial
  misc_feature: MA Experiment ID: 20001905 Result: Up-regulated in Transcription
  misc_feature: MA Experiment 20001905 PARAMETER Experiment Name: At_Drought_Reproduction_P Parameter: Age (day) Value: 40
  misc_feature: MA Experiment 20001905 PARAMETER Experiment Name: At_Drought_Reproduction_P Parameter: Organism Value: A. thaliana
  misc_feature: MA Experiment 20001905 PARAMETER Experiment Name: At_Drought_Reproduction_P Parameter: Plant Line Value: WS
  misc_feature: MA Experiment 20001905 PARAMETER Experiment Name: At_Drought_Reproduction_P Parameter: Timepoint (day) Value: 10
  misc_feature: MA Experiment 20001905 PARAMETER Experiment Name: At_Drought_Reproduction_P Parameter: Tissue Value: Rosettes
  misc_feature: MA Experiment 20001905 PARAMETER Experiment Name: At_Drought_Reproduction_P Parameter: Treatment Value: Drought vs. No Drought
  misc_feature: MA Experiment ID: 20001906 Result: Up-regulated in Transcription
  misc_feature: MA Experiment 20001906 PARAMETER Experiment Name: At_Drought_Reproduction_P Parameter: Age (day) Value: 35
  misc_feature: MA Experiment 20001906 PARAMETER Experiment Name: At_Drought_Reproduction_P Parameter: Organism Value: A. thaliana
  misc_feature: MA Experiment 20001906 PARAMETER Experiment Name: At_Drought_Reproduction_P Parameter: Plant Line Value: WS
  misc_feature: MA Experiment 20001906 PARAMETER Experiment Name: At_Drought_Reproduction_P Parameter: Timepoint (day) Value: 5
  misc_feature: MA Experiment 20001906 PARAMETER Experiment Name: At_Drought_Reproduction_P Parameter: Tissue Value: Siliques
  misc_feature: MA Experiment 20001906 PARAMETER Experiment Name: At_Drought_Reproduction_P Parameter: Treatment Value: Drought vs. No Drought
aaagatctacaaacaaagcttcttcttcttcttggtgtcatcaagattttccaaaaatgtctcaacaccaaaaaatctatccggtccaagatccagaagccgcaacagcgcgtccaacagctcctttggttcctcgtggttcctctagatcagaacatggagacccatccaaagtccctttgaaccaaaggccacaacggttcgtgccgttggctcctccaaagaagagaagaagttgttgttgcagatgcttttgctacacgttctgctttcttttgcttcttgtcgttgcagtaggcgcatccattggtatactataccttgtctttaaaccgaagctaccggattactctattgaccggttacagctcacccggtttgcactgaaccaagactcgagtttgactacggcttttaacgtgactataaccgctaagaatccgaacgagaagattggaatttattatgaagatgggagcaagattactgtgtggtacatggaacatcaactaagcaatgggtcgttgccaaaattttaccaaggacatgaaaatacgacagtgatatacgtagaaatgactggccaaacacaaaatgcatcgggtttaaggacgacattagaagagcaacaacaaagaaccgggaatataccattgagaattagagtaaaccaaccggttcgggtcaaatttgggaagttgaagctcttcgaagtaagattcttggtcagatgtggtgtatttgttgatagcttggctaccaataatgttattaagattcaaagtagtagttgcaaatttcgtcttaggttatagatccgtttttttttatataattaatatcgagatatacagagggaattttgtcagatatagtcacatactcatatatagttctcctctaaagtacattattgtgtctcagacctttgttgtataataaactgttggtttaaattaatatattaaagtatacaatactatgtacataggtggaattcaaagtatagtagttgtaagttttt

SEQ ID NO: 35068 - protein, 270 aa, Arabidopsis thaliana
  peptide (1)..(270): Ceres Seq. ID no. 12332054
  misc_feature (57)..(269): Homolog of NCBI NO: 34909192 NR Description: P0425G02.19 [Oryza sativa (japonica
  misc_feature (57)..(270): Homolog of NCBI NO: 15242167 NR Description: putative protein; protein id: At5g21130.1
  misc_feature (83)..(262): Homolog of NCBI NO: 38636986 NR Description: unknown protein [Oryza sativa (japonica
  misc_feature (57)..(264): Homolog of NCBI NO: 18401317 NR Description: expressed protein
  misc_feature (19)..(270): Homolog of NCBI NO: 38344198 NR Description: OSJNBa0064G10.14 [Oryza sativa (japonica
  misc_feature (19)..(270): Homolog of NCBI NO: 15221846 NR Description: hypothetical protein; protein id: At1g54540.1
  misc_feature (19)..(270): Homolog of NCBI NO: 10178216 NR Description: gb|AAF23842.1~gene_id:MLF18.15~similar to unknown
  misc_feature (19)..(270): Homolog of NCBI NO: 15239459 NR Description: putative protein; protein id: At5g36970.1
  misc_feature (19)..(270): Homolog of NCBI NO: 6686408 NR Description: F1E22.7 [Arabidopsis thaliana]
  misc_feature (19)..(270): Homolog of NCBI NO: 18408342 NR Description: expressed protein
RSTNKASSSSWCHQDFPKMSQHQKIYPVQDPEAATARPTAPLVPRGSSRSEHGDPSKVPLNQRPQRFVPLAPPKKRRSCCCRCFCYTFCFLLLLVVAVGASIGILYLVFKPKLPDYSIDRLQLTRFALNQDSSLTTAFNVTITAKNPNEKIGIYYEDGSKITVWYMEHQLSNGSLPKFYQGHENTTVIYVEMTGQTQNASGLRTTLEEQQQRTGNIPLRIRVNQPVRVKFGKLKLFEVRFLVRCGVFVDSLATNNVIKIQSSSCKFRLRL

SEQ ID NO: 35069 - protein, 252 aa, Arabidopsis thaliana
  peptide (1)..(252): Ceres Seq. ID no. 12332055
  misc_feature (39)..(251): Homolog of NCBI NO: 34909192 NR Description: P0425G02.19 [Oryza sativa (japonica
  misc_feature (39)..(252): Homolog of NCBI NO: 15242167 NR Description: putative protein; protein id: At5g21130.1
  misc_feature (65)..(244): Homolog of NCBI NO: 38636986 NR Description: unknown protein [Oryza sativa (japonica
  misc_feature (39)..(246): Homolog of NCBI NO: 18401317 NR Description: expressed protein
  misc_feature (1)..(252): Homolog of NCBI NO: 38344198 NR Description: OSJNBa0064G10.14 [Oryza sativa (japonica
  misc_feature (1)..(252): Homolog of NCBI NO: 15221846 NR Description: hypothetical protein; protein id: At1g54540.1
  misc_feature (1)..(252): Homolog of NCBI NO: 10178216 NR Description: gb|AAF23842.1~gene_id:MLF18.15~similar to unknown
  misc_feature (1)..(252): Homolog of NCBI NO: 15239459 NR Description: putative protein; protein id: At5g36970.1
  misc_feature (1)..(252): Homolog of NCBI NO: 6686408 NR Description: F1E22.7 [Arabidopsis thaliana]
  misc_feature (1)..(252): Homolog of NCBI NO: 18408342 NR Description: expressed protein
MSQHQKIYPVQDPEAATARPTAPLVPRGSSRSEHGDPSKVPLNQRPQRFVPLAPPKKRRSCCCRCFCYTFCFLLLLVVAVGASIGILYLVFKPKLPDYSIDRLQLTRFALNQDSSLTTAFNVTITAKNPNEKIGIYYEDGSKITVWYMEHQLSNGSLPKFYQGHENTTVIYVEMTGQTQNASGLRTTLEEQQQRTGNIPLRIRVNQPVRVKFGKLKLFEVRFLVRCGVFVDSLATNNVIKIQSSSCKFRLRL

SEQ ID NO: 35070 - DNA, 1096 bp, Arabidopsis thaliana
  misc_feature (1)..(1096): Ceres Seq. ID no. 13491503
  misc_feature: MA Experiment ID: 20000171 Result: Up-regulated in Transcription
  misc_feature: MA Experiment 20000171 PARAMETER Experiment Name: At_42deg_Heat_P Parameter: Age (day) Value: 14
  misc_feature: MA Experiment 20000171 PARAMETER Experiment Name: At_42deg_Heat_P Parameter: Organism Value: A. thaliana
  misc_feature: MA Experiment 20000171 PARAMETER Experiment Name: At_42deg_Heat_P Parameter: Plant Line Value: WS
  misc_feature: MA Experiment 20000171 PARAMETER Experiment Name: At_42deg_Heat_P Parameter: Temperature (deg C) Value: 42 vs. 22
  misc_feature: MA Experiment 20000171 PARAMETER Experiment Name: At_42deg_Heat_P Parameter: Timepoint (hr) Value: 1
  misc_feature: MA Experiment 20000171 PARAMETER Experiment Name: At_42deg_Heat_P Parameter: Tissue Value: Aerial
  misc_feature: MA Experiment ID: 20000173 Result: Up-regulated in Transcription
  misc_feature: MA Experiment 20000173 PARAMETER Experiment Name: At_42deg_Heat_P Parameter: Age (day) Value: 14
  misc_feature: MA Experiment 20000173 PARAMETER Experiment Name: At_42deg_Heat_P Parameter: Organism Value: A. thaliana
  misc_feature: MA Experiment 20000173 PARAMETER Experiment Name: At_42deg_Heat_P Parameter: Plant Line Value: WS
  misc_feature: MA Experiment 20000173 PARAMETER Experiment Name: At_42deg_Heat_P Parameter: Temperature (deg C) Value: 42 vs. 22
  misc_feature: MA Experiment 20000173 PARAMETER Experiment Name: At_42deg_Heat_P Parameter: Timepoint (hr) Value: 6
  misc_feature: MA Experiment 20000173 PARAMETER Experiment Name: At_42deg_Heat_P Parameter: Tissue Value: Aerial
  misc_feature: MA Experiment ID: 20000185 Result: Up-regulated in Transcription
  misc_feature: MA Experiment 20000185 PARAMETER Experiment Name: At_Roots__P Parameter: Age (day) Value: 7 vs. 21
  misc_feature: MA Experiment 20000185 PARAMETER Experiment Name: At_Roots__P Parameter: Organism Value: A. thaliana
  misc_feature: MA Experiment 20000185 PARAMETER Experiment Name: At_Roots__P Parameter: Tissue Value: Roots vs. Whole Plant
  misc_feature: MA Experiment ID: 20000265 Result: Up-regulated in Transcription
  misc_feature: MA Experiment 20000265 PARAMETER Experiment Name: At_Open_Flower_P Parameter: Age (day) Value: 21
  misc_feature: MA Experiment 20000265 PARAMETER Experiment Name: At_Open_Flower_P Parameter: Plant Line Value: WS
  misc_feature: MA Experiment 20000265 PARAMETER Experiment Name: At_Open_Flower_P Parameter: Tissue Value: Closed Flower vs. Whole Plant
  misc_feature: MA Experiment ID: 20000437 Result: Up-regulated in Transcription
  misc_feature: MA Experiment 20000437 PARAMETER Experiment Name: At_Drought_P Parameter: Age (day) Value: 8
  misc_feature: MA Experiment 20000437 PARAMETER Experiment Name: At_Drought_P Parameter: Organism Value: A. thaliana
  misc_feature: MA Experiment 20000437 PARAMETER Experiment Name: At_Drought_P Parameter: Plant Line Value: WS
  misc_feature: MA Experiment 20000437 PARAMETER Experiment Name: At_Drought_P Parameter: Timepoint (hr) Value: 24
  misc_feature: MA Experiment 20000437 PARAMETER Experiment Name: At_Drought_P Parameter: Tissue Value: Whole Plant
  misc_feature: MA Experiment 20000437 PARAMETER Experiment Name: At_Drought_P Parameter: Treatment Value: Drought vs. No Drought
  misc_feature: MA Experiment ID: 20000794 Result: Up-regulated in Transcription
  misc_feature: MA Experiment 20000794 PARAMETER Experiment Name: At_Petals_P Parameter: Age (day) Value: 23-25 days
  misc_feature: MA Experiment 20000794 PARAMETER Experiment Name: At_Petals_P Parameter: Plant Line Value: WS
  misc_feature: MA Experiment 20000794 PARAMETER Experiment Name: At_Petals_P Parameter: Tissue Value: Petals vs. Whole plant
  misc_feature: MA Experiment ID: 20001248 Result: Down-regulated in Transcription
  misc_feature: MA Experiment 20001248 PARAMETER Experiment Name: At_Far-red-induction_P Parameter: Age (day) Value: 7
  misc_feature: MA Experiment 20001248 PARAMETER Experiment Name: At_Far-red-induction_P Parameter: Light Value: Far-red vs. White
  misc_feature: MA Experiment 20001248 PARAMETER Experiment Name: At_Far-red-induction_P Parameter: Organism Value: A. thaliana
  misc_feature: MA Experiment 20001248 PARAMETER Experiment Name: At_Far-red-induction_P Parameter: Plant Line Value: Columbia
  misc_feature: MA Experiment 20001248 PARAMETER Experiment Name: At_Far-red-induction_P Parameter: Timepoint (hr) Value: 4
  misc_feature: MA Experiment 20001248 PARAMETER Experiment Name: At_Far-red-induction_P Parameter: Tissue Value: Whole Plant
  misc_feature: MA Experiment ID: 20001559 Result: Up-regulated in Transcription
  misc_feature: MA Experiment 20001559 PARAMETER Experiment Name: At_Drought_Soil_Dry_P Parameter: Age (day) Value: 28
  misc_feature: MA Experiment 20001559 PARAMETER Experiment Name: At_Drought_Soil_Dry_P Parameter: Organism Value: A. thaliana
  misc_feature: MA Experiment 20001559 PARAMETER Experiment Name: At_Drought_Soil_Dry_P Parameter: Plant Line Value: WS
  misc_feature: MA Experiment 20001559 PARAMETER Experiment Name: At_Drought_Soil_Dry_P Parameter: Post Timepoint (hr) Value: 29
  misc_feature: MA Experiment 20001559 PARAMETER Experiment Name: At_Drought_Soil_Dry_P Parameter: Post-Treatment Value: Re-Water vs. No Drought
  misc_feature: MA Experiment 20001559 PARAMETER Experiment Name: At_Drought_Soil_Dry_P Parameter: Timepoint (day) Value: 14
  misc_feature: MA Experiment 20001559 PARAMETER Experiment Name: At_Drought_Soil_Dry_P Parameter: Treatment Value: Drought vs. No Drought
  misc_feature: MA Experiment ID: 20001757 Result: Down-regulated in Transcription
  misc_feature: MA Experiment 20001757 PARAMETER Experiment Name: At_50mM_NH4NO3_L-to-H_P Parameter: Timepoint (hr) Value: 6
  misc_feature: MA Experiment 20001757 PARAMETER Experiment Name: At_50mM_NH4NO3_L-to-H_P Parameter: Tissue Value: Leaf
  misc_feature: MA Experiment 20001757 PARAMETER Experiment Name: At_50mM_NH4NO3_L-to-H_P Parameter: Treatment Value: 50mM NH4NO3 vs 100mM Mannitol
  misc_feature: MA Experiment ID: 20001905 Result: Up-regulated in Transcription
  misc_feature: MA Experiment 20001905 PARAMETER Experiment Name: At_Drought_Reproduction_P Parameter: Age (day) Value: 40
  misc_feature: MA Experiment 20001905 PARAMETER Experiment Name: At_Drought_Reproduction_P Parameter: Organism Value: A. thaliana
  misc_feature: MA Experiment 20001905 PARAMETER Experiment Name: At_Drought_Reproduction_P Parameter: Plant Line Value: WS
  misc_feature: MA Experiment 20001905 PARAMETER Experiment Name: At_Drought_Reproduction_P Parameter: Timepoint (day) Value: 10
  misc_feature: MA Experiment 20001905 PARAMETER Experiment Name: At_Drought_Reproduction_P Parameter: Tissue Value: Rosettes
  misc_feature: MA Experiment 20001905 PARAMETER Experiment Name: At_Drought_Reproduction_P Parameter: Treatment Value: Drought vs. No Drought
  misc_feature: MA Experiment ID: 20001911 Result: Up-regulated in Transcription
  misc_feature: MA Experiment 20001911 PARAMETER Experiment Name: At_Drought_Reproduction_P Parameter: Age (day) Value: 40
  misc_feature: MA Experiment 20001911 PARAMETER Experiment Name: At_Drought_Reproduction_P Parameter: Organism Value: A. thaliana
  misc_feature: MA Experiment 20001911 PARAMETER Experiment Name: At_Drought_Reproduction_P Parameter: Plant Line Value: WS
  misc_feature: MA Experiment 20001911 PARAMETER Experiment Name: At_Drought_Reproduction_P Parameter: Timepoint (day) Value: 10
  misc_feature: MA Experiment 20001911 PARAMETER Experiment Name: At_Drought_Reproduction_P Parameter: Tissue Value: Flowers
  misc_feature: MA Experiment 20001911 PARAMETER Experiment Name: At_Drought_Reproduction_P Parameter: Treatment Value: Drought vs. No Drought
atgagtagccgatggaatcgtacgatctacgttgggaatttgcctggagatattcgcaagtgtgaggttgaagatctcttctacaagtatggaccaattgtggacattgatttgaagattccaccgagacctcctggttatgcctttgtcgagtttgaagatcctcgtgatgcagacgatgcaatttatggacgtgatggttatgattttgatgggtgtcgacttcgggttgagattgcacatggtggtcgtagattttcaccatcagttgataggtacagcagcagctacagtgcgagccgtgcaccttcaagacgctctgactaccgcgtgcttgtgaccggattaccgccttctgcttcgtggcaggaccttaaggatcacatgcgcaaagctggagatgtctgcttctctgaagttttccctgaccgtaaaggcatgtctggggttgtggattatagcaactatgatgatatgaagtacgcaataaggaaacttgatgccactgaatttcgaaatgctttctctagtgcttatatacgggtgagggaatatgagtcgaggagtgtgagtcgaagcccagatgattctaaaagctatagaagcaggagtcggagccgtggtccaagctgtagctatagtagcaagagcaggagtgtgtcacctgctagatccatttccccgcgttcacggccccttagtcgttctcgctcgctatacagctctgtctcaaggtcccaatcaagatcaaaatcaagatcaagatcaagatcgaattctccagtttcacctgtgatatctggttgaaaatgaaaactggccactggctgtacccgaatcgtctcaagcttctcaggctccactgctaatagaatttgattccgatttgggattattatactggtcttcttgtatgggacgaccaatatgtctttctagttttagttgtgaacctggaattggtctgttattgtgtcattaaaaagccggaaactctgtctcggctgcataataaagttcatcagacattgtgttgggtgtggtgaggtttttccatacatatacatttacattacaactactggtgtcttttatg

SEQ ID NO: 35071 - protein, 268 aa, Arabidopsis thaliana
  peptide (1)..(268): Ceres Seq. ID no. 13491504
  misc_feature (9)..(77): Pfam Name: RNA recognition motif. (a.k.a. RRM, RBD, or RNP domain) Pfam Description: RNA recognition motif. (a.k.a. RRM, RBD, or RNP
  misc_feature (1)..(261): Homolog of NCBI NO: 30679143 NR Description: arginine/serine-rich splicing factor (atSRp34),
  misc_feature (1)..(256): Homolog of NCBI NO: 30678395 NR Description: pre-mRNA splicing factor SF2 (SR1 protein)
  misc_feature (1)..(256): Homolog of NCBI NO: 2443473 NR Description: ASF/SF2 homolog [Arabidopsis thaliana]
  misc_feature (1)..(265): Homolog of NCBI NO: 5815235 NR Description: splicing factor SR1 [Arabidopsis thaliana]
  misc_feature (1)..(265): Homolog of NCBI NO: 30678391 NR Description: pre-mRNA splicing factor SF2 (SR1 protein)
  misc_feature (62)..(268): Homolog of NCBI NO: 21954085 NR Description: putative SF2/ASF splicing modulator Srp30 protein
  misc_feature (1)..(218): Homolog of NCBI NO: 25386570 NR Description: hypothetical protein [imported] - Arabidopsis
  misc_feature (1)..(248): Homolog of NCBI NO: 4775271 NR Description: SF2/ASF-like splicing modulator Srp30, variant 1
  misc_feature (1)..(265): Homolog of NCBI NO: 22329428 NR Description: arginine/serine-rich splicing factor, atSRp30
  misc_feature (1)..(268): Homolog of NCBI NO: 4775270 NR Description: SF2/ASF-like splicing modulator Srp30
MSSRWNRTIYVGNLPGDIRKCEVEDLFYKYGPIVDIDLKIPPRPPGYAFVEFEDPRDADDAIYGRDGYDFDGCRLRVEIAHGGRRFSPSVDRYSSSYSASRAPSRRSDYRVLVTGLPPSASWQDLKDHMRKAGDVCFSEVFPDRKGMSGVVDYSNYDDMKYAIRKLDATEFRNAFSSAYIRVREYESRSVSRSPDDSKSYRSRSRSRGPSCSYSSKSRSVSPARSISPRSRPLSRSRSLYSSVSRSQSRSKSRSRSRSNSPVSPVISG

SEQ ID NO: 35072 - protein, 140 aa, Arabidopsis thaliana
  peptide (1)..(140): Ceres Seq. ID no. 13491505
  misc_feature (1)..(133): Homolog of NCBI NO: 30679143 NR Description: arginine/serine-rich splicing factor (atSRp34),
  misc_feature (1)..(128): Homolog of NCBI NO: 30678395 NR Description: pre-mRNA splicing factor SF2 (SR1 protein)
  misc_feature (1)..(128): Homolog of NCBI NO: 2443473 NR Description: ASF/SF2 homolog [Arabidopsis thaliana]
  misc_feature (1)..(137): Homolog of NCBI NO: 5815235 NR Description: splicing factor SR1 [Arabidopsis thaliana]
  misc_feature (1)..(137): Homolog of NCBI NO: 30678391 NR Description: pre-mRNA splicing factor SF2 (SR1 protein)
  misc_feature (1)..(140): Homolog of NCBI NO: 21954085 NR Description: putative SF2/ASF splicing modulator Srp30 protein
  misc_feature (1)..(90): Homolog of NCBI NO: 25386570 NR Description: hypothetical protein [imported] - Arabidopsis
  misc_feature (1)..(120): Homolog of NCBI NO: 4775271 NR Description: SF2/ASF-like splicing modulator Srp30, variant 1
  misc_feature (1)..(137): Homolog of NCBI NO: 22329428 NR Description: arginine/serine-rich splicing factor, atSRp30
  misc_feature (1)..(140): Homolog of NCBI NO: 4775270 NR Description: SF2/ASF-like splicing modulator Srp30
MRKAGDVCFSEVFPDRKGMSGVVDYSNYDDMKYAIRKLDATEFRNAFSSAYIRVREYESRSVSRSPDDSKSYRSRSRSRGPSCSYSSKSRSVSPARSISPRSRPLSRSRSLYSSVSRSQSRSKSRSRSRSNSPVSPVISG

SEQ ID NO: 35073 - DNA, 744 bp, Arabidopsis thaliana
  misc_feature (1)..(744): Ceres Seq. ID no. 12698218
  misc_feature: MA Experiment ID: 108462 Result: Up-regulated in Transcription
  misc_feature: MA Experiment 108462 PARAMETER Experiment Name: At_Germinating_Seeds_cDNA_P Parameter: Age (day) Value: 2 vs. 0
  misc_feature: MA Experiment 108462 PARAMETER Experiment Name: At_Germinating_Seeds_cDNA_P Parameter: Tissue Value: Germinating Seeds
  misc_feature: MA Experiment ID: 108463 Result: Up-regulated in Transcription
  misc_feature: MA Experiment 108463 PARAMETER Experiment Name: At_Germinating_Seeds_cDNA_P Parameter: Age (day) Value: 3 vs. 0
  misc_feature: MA Experiment 108463 PARAMETER Experiment Name: At_Germinating_Seeds_cDNA_P Parameter: Tissue Value: Germinating Seeds
  misc_feature: MA Experiment ID: 108464 Result: Up-regulated in Transcription
  misc_feature: MA Experiment 108464 PARAMETER Experiment Name: At_Germinating_Seeds_cDNA_P Parameter: Age (day) Value: 4 vs. 0
  misc_feature: MA Experiment 108464 PARAMETER Experiment Name: At_Germinating_Seeds_cDNA_P Parameter: Tissue Value: Germinating Seeds
  misc_feature: MA Experiment ID: 108572 Result: Down-regulated in Transcription
  misc_feature: MA Experiment 108572 PARAMETER Experiment Name: At_Drought_cDNA_P Parameter: Timepoint (hr) Value: 1
  misc_feature: MA Experiment 108572 PARAMETER Experiment Name: At_Drought_cDNA_P Parameter: Tissue Value: Aerial
  misc_feature: MA Experiment 108572 PARAMETER Experiment Name: At_Drought_cDNA_P Parameter: Treatment Value: Drought vs. No Drought
  misc_feature: MA Experiment ID: 108573 Result: Down-regulated in Transcription
  misc_feature: MA Experiment 108573 PARAMETER Experiment Name: At_Drought_cDNA_P Parameter: Timepoint (hr) Value: 6
  misc_feature: MA Experiment 108573 PARAMETER Experiment Name: At_Drought_cDNA_P Parameter: Tissue Value: Aerial
  misc_feature: MA Experiment 108573 PARAMETER Experiment Name: At_Drought_cDNA_P Parameter: Treatment Value: Drought vs. No Drought
  misc_feature: MA Experiment ID: 108577 Result: Up-regulated in Transcription
  misc_feature: MA Experiment 108577 PARAMETER Experiment Name: At_42deg_Heat_cDNA_P Parameter: Temperature (deg C) Value: 42 vs. 22
  misc_feature: MA Experiment 108577 PARAMETER Experiment Name: At_42deg_Heat_cDNA_P Parameter: Timepoint (hr) Value: 6
  misc_feature: MA Experiment 108577 PARAMETER Experiment Name: At_42deg_Heat_cDNA_P Parameter: Tissue Value: Aerial
  misc_feature: MA Experiment ID: 108579 Result: Up-regulated in Transcription
  misc_feature: MA Experiment 108579 PARAMETER Experiment Name: At_4deg_Cold_cDNA_P Parameter: Temperature (deg C) Value: 4 vs. 22
  misc_feature: MA Experiment 108579 PARAMETER Experiment Name: At_4deg_Cold_cDNA_P Parameter: Timepoint (hr) Value: 6
  misc_feature: MA Experiment 108579 PARAMETER Experiment Name: At_4deg_Cold_cDNA_P Parameter: Tissue Value: Aerial
  misc_feature: MA Experiment ID: 108594 Result: Down-regulated in Transcription
  misc_feature: MA Experiment 108594 PARAMETER Experiment Name: At_Ler-rhl_Root_cDNA_P Parameter: Plant Line Value: null
  misc_feature: MA Experiment ID: 108595 Result: Down-regulated in Transcription
  misc_feature: MA Experiment 108595 PARAMETER Experiment Name: At_Ler-pi_Ovule_cDNA_P Parameter: Plant Line Value: null
  misc_feature: MA Experiment ID: 20000069 Result: Down-regulated in Transcription
  misc_feature: MA Experiment 20000069 PARAMETER Experiment Name: At_100uM_ABA_Mutants_cDNA_P Parameter: Plant Line Value: CS23
  misc_feature: MA Experiment 20000069 PARAMETER Experiment Name: At_100uM_ABA_Mutants_cDNA_P Parameter: Timepoint (hr) Value: 6
  misc_feature: MA Experiment 20000069 PARAMETER Experiment Name: At_100uM_ABA_Mutants_cDNA_P Parameter: Tissue Value: Aerial
  misc_feature: MA Experiment 20000069 PARAMETER Experiment Name: At_100uM_ABA_Mutants_cDNA_P Parameter: Treatment Value: 100uM ABA vs. No Treatment
  misc_feature: MA Experiment ID: 20000070 Result: Down-regulated in Transcription
  misc_feature: MA Experiment 20000070 PARAMETER Experiment Name: At_100uM_ABA_Mutants_cDNA_P Parameter: Plant Line Value: CS24
  misc_feature: MA Experiment 20000070 PARAMETER Experiment Name: At_100uM_ABA_Mutants_cDNA_P Parameter: Timepoint (hr) Value: 6
  misc_feature: MA Experiment 20000070 PARAMETER Experiment Name: At_100uM_ABA_Mutants_cDNA_P Parameter: Tissue Value: Aerial
  misc_feature: MA Experiment 20000070 PARAMETER Experiment Name: At_100uM_ABA_Mutants_cDNA_P Parameter: Treatment Value: 100uM ABA vs. No Treatment
  misc_feature: MA Experiment ID: 20000071 Result: Down-regulated in Transcription
  misc_feature: MA Experiment 20000071 PARAMETER Experiment Name: At_100uM_ABA_Mutants_cDNA_P Parameter: Plant Line Value: CS8104
  misc_feature: MA Experiment 20000071 PARAMETER Experiment Name: At_100uM_ABA_Mutants_cDNA_P Parameter: Timepoint (hr) Value: 6
  misc_feature: MA Experiment 20000071 PARAMETER Experiment Name: At_100uM_ABA_Mutants_cDNA_P Parameter: Tissue Value: Aerial
  misc_feature: MA Experiment 20000071 PARAMETER Experiment Name: At_100uM_ABA_Mutants_cDNA_P Parameter: Treatment Value: 100uM ABA vs. No Treatment
  misc_feature: MA Experiment ID: 20000072 Result: Down-regulated in Transcription
  misc_feature: MA Experiment 20000072 PARAMETER Experiment Name: At_100uM_ABA_Mutants_cDNA_P Parameter: Plant Line Value: CS8105
  misc_feature: MA Experiment 20000072 PARAMETER Experiment Name: At_100uM_ABA_Mutants_cDNA_P Parameter: Timepoint (hr) Value: 6
  misc_feature: MA Experiment 20000072 PARAMETER Experiment Name: At_100uM_ABA_Mutants_cDNA_P Parameter: Tissue Value: Aerial
  misc_feature: MA Experiment 20000072 PARAMETER Experiment Name: At_100uM_ABA_Mutants_cDNA_P Parameter: Treatment Value: 100uM ABA vs. No Treatment
  misc_feature: MA Experiment ID: 20000086 Result: Down-regulated in Transcription
  misc_feature: MA Experiment 20000086 PARAMETER Experiment Name: At_100uM_ABA_Mutants_cDNA_P Parameter: Plant Line Value: CS22
  misc_feature: MA Experiment 20000086 PARAMETER Experiment Name: At_100uM_ABA_Mutants_cDNA_P Parameter: Timepoint (hr) Value: 6
  misc_feature: MA Experiment 20000086 PARAMETER Experiment Name: At_100uM_ABA_Mutants_cDNA_P Parameter: Tissue Value: Aerial
  misc_feature: MA Experiment 20000086 PARAMETER Experiment Name: At_100uM_ABA_Mutants_cDNA_P Parameter: Treatment Value: 100uM ABA vs. No Treatment
  misc_feature: MA Experiment ID: 20000087 Result: Down-regulated in Transcription
  misc_feature: MA Experiment 20000087 PARAMETER Experiment Name: At_100uM_ABA_Mutants_cDNA_P Parameter: Plant Line Value: WS
  misc_feature: MA Experiment 20000087 PARAMETER Experiment Name: At_100uM_ABA_Mutants_cDNA_P Parameter: Timepoint (hr) Value: 6
  misc_feature: MA Experiment 20000087 PARAMETER Experiment Name: At_100uM_ABA_Mutants_cDNA_P Parameter: Tissue Value: Aerial
  misc_feature: MA Experiment 20000087 PARAMETER Experiment Name: At_100uM_ABA_Mutants_cDNA_P Parameter: Treatment Value: 100uM ABA vs. No Treatment
  misc_feature: MA Experiment ID: 20000088 Result: Down-regulated in Transcription
  misc_feature: MA Experiment 20000088 PARAMETER Experiment Name: At_100uM_ABA_Mutants_cDNA_P Parameter: Plant Line Value: Landsberg
  misc_feature: MA Experiment 20000088 PARAMETER Experiment Name: At_100uM_ABA_Mutants_cDNA_P Parameter: Timepoint (hr) Value: 6
  misc_feature: MA Experiment 20000088 PARAMETER Experiment Name: At_100uM_ABA_Mutants_cDNA_P Parameter: Tissue Value: Aerial
  misc_feature: MA Experiment 20000088 PARAMETER Experiment Name: At_100uM_ABA_Mutants_cDNA_P Parameter: Treatment Value: 100uM ABA vs. No Treatment
  misc_feature: MA Experiment ID: 20000089 Result: Down-regulated in Transcription
  misc_feature: MA Experiment ID: 20000090 Result: Down-regulated in Transcription
  misc_feature: MA Experiment ID: 20000111 Result: Up-regulated in Transcription
  misc_feature: MA Experiment 20000111 PARAMETER Experiment Name: At_42deg_Heat_cDNA_P Parameter: Temperature (deg C) Value: 42 vs. 22
  misc_feature: MA Experiment 20000111 PARAMETER Experiment Name: At_42deg_Heat_cDNA_P Parameter: Timepoint (hr) Value: 6
  misc_feature: MA Experiment 20000111 PARAMETER Experiment Name: At_42deg_Heat_cDNA_P Parameter: Tissue Value: Aerial
  misc_feature: MA Experiment ID: 20000113 Result: Up-regulated in Transcription
  misc_feature: MA Experiment 20000113 PARAMETER Experiment Name: At_42deg_Heat_cDNA_P Parameter: Temperature (deg C) Value: 42 vs. 22
  misc_feature: MA Experiment 20000113 PARAMETER Experiment Name: At_42deg_Heat_cDNA_P Parameter: Timepoint (hr) Value: 8
  misc_feature: MA Experiment 20000113 PARAMETER Experiment Name: At_42deg_Heat_cDNA_P Parameter: Tissue Value: Aerial
  misc_feature: MA Experiment ID: 20000117 Result: Down-regulated in Transcription
  misc_feature: MA Experiment 20000117 PARAMETER Experiment Name: At_100uM_ABA_Mutants_cDNA_P Parameter: Plant Line Value: Columbia
  misc_feature: MA Experiment 20000117 PARAMETER Experiment Name: At_100uM_ABA_Mutants_cDNA_P Parameter: Timepoint (hr) Value: 6
  misc_feature: MA Experiment 20000117 PARAMETER Experiment Name: At_100uM_ABA_Mutants_cDNA_P Parameter: Tissue Value: Aerial
  misc_feature: MA Experiment 20000117 PARAMETER Experiment Name: At_100uM_ABA_Mutants_cDNA_P Parameter: Treatment Value: 100uM ABA vs. No Treatment
  misc_feature: MA Experiment ID: 20000173 Result: Up-regulated in Transcription
  misc_feature: MA Experiment 20000173 PARAMETER Experiment Name: At_42deg_Heat_P Parameter: Age (day) Value: 14
  misc_feature: MA Experiment 20000173 PARAMETER Experiment Name: At_42deg_Heat_P Parameter: Organism Value: A. thaliana
  misc_feature: MA Experiment 20000173 PARAMETER Experiment Name: At_42deg_Heat_P Parameter: Plant Line Value: WS
  misc_feature: MA Experiment 20000173 PARAMETER Experiment Name: At_42deg_Heat_P Parameter: Temperature (deg C) Value: 42 vs. 22
  misc_feature: MA Experiment 20000173 PARAMETER Experiment Name: At_42deg_Heat_P Parameter: Timepoint (hr) Value: 6
  misc_feature: MA Experiment 20000173 PARAMETER Experiment Name: At_42deg_Heat_P Parameter: Tissue Value: Aerial
  misc_feature: MA Experiment ID: 20000180 Result: Up-regulated in Transcription
  misc_feature: MA Experiment 20000180 PARAMETER Experiment Name: At_Germinating_Seeds_P Parameter: Age (hr) Value: 24 vs. 0
  misc_feature: MA Experiment 20000180 PARAMETER Experiment Name: At_Germinating_Seeds_P Parameter: Tissue Value: Germinating Seeds
  misc_feature: MA Experiment ID: 20000184 Result: Up-regulated in Transcription
  misc_feature: MA Experiment 20000184 PARAMETER Experiment Name: At_Shoots__P Parameter: Age (day) Value: 7
  misc_feature: MA Experiment 20000184 PARAMETER Experiment Name: At_Shoots__P Parameter: Tissue Value: Shoots vs. Whole Plant
  misc_feature: MA Experiment ID: 20000185 Result: Up-regulated in Transcription
  misc_feature: MA Experiment 20000185 PARAMETER Experiment Name: At_Roots__P Parameter: Age (day) Value: 7 vs. 21
  misc_feature: MA Experiment 20000185 PARAMETER Experiment Name: At_Roots__P Parameter: Organism Value: A. thaliana
  misc_feature: MA Experiment 20000185 PARAMETER Experiment Name: At_Roots__P Parameter: Tissue Value: Roots vs. Whole Plant
  misc_feature: MA Experiment ID: 20000224 Result: Up-regulated in Transcription
  misc_feature: MA Experiment ID: 20000234 Result: Up-regulated in Transcription
  misc_feature: MA Experiment 20000234 PARAMETER Experiment Name: At_Siliques_P Parameter: Age (day) Value: 21
  misc_feature: MA Experiment 20000234 PARAMETER Experiment Name: At_Siliques_P Parameter: Organism Value: A. thaliana
  misc_feature: MA Experiment 20000234 PARAMETER Experiment Name: At_Siliques_P Parameter: Plant Line Value: WS
  misc_feature: MA Experiment 20000234 PARAMETER Experiment Name: At_Siliques_P Parameter: Tissue Value: Less Than 5mm Siliques vs. Whole Plant
  misc_feature: MA Experiment ID: 20000235 Result: Up-regulated in Transcription
  misc_feature: MA Experiment 20000235 PARAMETER Experiment Name: At_Siliques_P Parameter: Age (day) Value: 21
  misc_feature: MA Experiment 20000235 PARAMETER Experiment Name: At_Siliques_P Parameter: Organism Value: A. thaliana
  misc_feature: MA Experiment 20000235 PARAMETER Experiment Name: At_Siliques_P Parameter: Plant Line Value: WS
  misc_feature: MA Experiment 20000235 PARAMETER Experiment Name: At_Siliques_P Parameter: Tissue Value: 5-10mm Siliques vs. Whole Plant
  misc_feature: MA Experiment ID: 20000264 Result: Up-regulated in Transcription
  misc_feature: MA Experiment 20000264 PARAMETER Experiment Name: At_Open_Flower_P Parameter: Age (day) Value: 21
  misc_feature: MA Experiment 20000264 PARAMETER Experiment Name: At_Open_Flower_P Parameter: Plant Line Value: WS
  misc_feature: MA Experiment 20000264 PARAMETER Experiment Name: At_Open_Flower_P Parameter: Tissue Value: Open Flower vs. Whole Plant
  misc_feature: MA Experiment ID: 20000437 Result: Down-regulated in Transcription
  misc_feature: MA Experiment 20000437 PARAMETER Experiment Name: At_Drought_P Parameter: Age (day) Value: 8
  misc_feature: MA Experiment 20000437 PARAMETER Experiment Name: At_Drought_P Parameter: Organism Value: A. thaliana
  misc_feature: MA Experiment 20000437 PARAMETER Experiment Name: At_Drought_P Parameter: Plant Line Value: WS
  misc_feature: MA Experiment 20000437 PARAMETER Experiment Name: At_Drought_P Parameter: Timepoint (hr) Value: 24
  misc_feature: MA Experiment 20000437 PARAMETER Experiment Name: At_Drought_P Parameter: Tissue Value: Whole Plant
  misc_feature: MA Experiment 20000437 PARAMETER Experiment Name: At_Drought_P Parameter: Treatment Value: Drought vs. No Drought
  misc_feature: MA Experiment ID: 20000438 Result: Up-regulated in Transcription
  misc_feature: MA Experiment 20000438 PARAMETER Experiment Name: At_Shoots__P Parameter: Age (day) Value: 14
  misc_feature: MA Experiment 20000438 PARAMETER Experiment Name: At_Shoots__P Parameter: Tissue Value: Shoots vs. Whole Plant
  misc_feature: MA Experiment ID: 20000441 Result: Up-regulated in Transcription
  misc_feature: MA Experiment 20000441 PARAMETER Experiment Name: At_1uM_BR-BRZ__P Parameter: Tissue Value: Shoot Apices
  misc_feature: MA Experiment 20000441 PARAMETER Experiment Name: At_1uM_BR-BRZ__P Parameter: Treatment Value: 1uM BR vs. No Treatment
  misc_feature: MA Experiment ID: 20000443 Result: Up-regulated in Transcription
  misc_feature: MA Experiment 20000443 PARAMETER Experiment Name: At_1uM_BR-BRZ__P Parameter: Tissue Value: Shoot Apices
  misc_feature: MA Experiment 20000443 PARAMETER Experiment Name: At_1uM_BR-BRZ__P Parameter: Treatment Value: 1uM BRZ vs. No Treatment
  misc_feature: MA Experiment ID: 20000709 Result: Up-regulated in Transcription
  misc_feature: MA Experiment 20000709 PARAMETER Experiment Name: At_15mM_NH4NO3_L-to-H_P Parameter: Age (hr) Value: 14
  misc_feature: MA Experiment 20000709 PARAMETER Experiment Name: At_15mM_NH4NO3_L-to-H_P Parameter: Organism Value: A. thaliana
  misc_feature: MA Experiment 20000709 PARAMETER Experiment Name: At_15mM_NH4NO3_L-to-H_P Parameter: Plant Line Value: WS
  misc_feature: MA Experiment 20000709 PARAMETER Experiment Name: At_15mM_NH4NO3_L-to-H_P Parameter: Timepoint (hr) Value: 4
  misc_feature: MA Experiment 20000709 PARAMETER Experiment Name: At_15mM_NH4NO3_L-to-H_P Parameter: Tissue Value: Aerial
  misc_feature: MA Experiment 20000709 PARAMETER Experiment Name: At_15mM_NH4NO3_L-to-H_P Parameter: Treatment Value: 15mM NH4NO3 vs. 30mM Mannitol
  misc_feature: MA Experiment ID: 20000794 Result: Up-regulated in Transcription
  misc_feature: MA Experiment 20000794 PARAMETER Experiment Name: At_Petals_P Parameter: Age (day) Value: 23-25 days
  misc_feature: MA Experiment 20000794 PARAMETER Experiment Name: At_Petals_P Parameter: Plant Line Value: WS
  misc_feature: MA Experiment 20000794 PARAMETER Experiment Name: At_Petals_P Parameter: Tissue Value: Petals vs. Whole plant
  misc_feature: MA Experiment ID: 20001247 Result: Up-regulated in Transcription
  misc_feature: MA Experiment 20001247 PARAMETER Experiment Name: At_Far-red-induction_P Parameter: Age (day) Value: 7
  misc_feature: MA Experiment 20001247 PARAMETER Experiment Name: At_Far-red-induction_P Parameter: Light Value: Far-red vs. White
  misc_feature: MA Experiment 20001247 PARAMETER Experiment Name: At_Far-red-induction_P Parameter: Organism Value: A. thaliana
  misc_feature: MA Experiment 20001247 PARAMETER Experiment Name: At_Far-red-induction_P Parameter: Plant Line Value: Columbia
  misc_feature: MA Experiment 20001247 PARAMETER Experiment Name: At_Far-red-induction_P Parameter: Timepoint (hr) Value: 1
  misc_feature: MA Experiment 20001247 PARAMETER Experiment Name: At_Far-red-induction_P Parameter: Tissue Value: Whole Plant
  misc_feature: MA Experiment ID: 20001248 Result: Down-regulated in Transcription
  misc_feature: MA Experiment 20001248 PARAMETER Experiment Name: At_Far-red-induction_P Parameter: Age (day) Value: 7
  misc_feature: MA Experiment 20001248 PARAMETER Experiment Name: At_Far-red-induction_P Parameter: Light Value: Far-red vs. White
  misc_feature: MA Experiment 20001248 PARAMETER Experiment Name: At_Far-red-induction_P Parameter: Organism Value: A. thaliana
  misc_feature: MA Experiment 20001248 PARAMETER Experiment Name: At_Far-red-induction_P Parameter: Plant Line Value: Columbia
  misc_feature: MA Experiment 20001248 PARAMETER Experiment Name: At_Far-red-induction_P Parameter: Timepoint (hr) Value: 4
  misc_feature: MA Experiment 20001248 PARAMETER Experiment Name: At_Far-red-induction_P Parameter: Tissue Value: Whole Plant
  misc_feature: MA Experiment ID: 20001450 Result: Down-regulated in Transcription
  misc_feature: MA Experiment 20001450 PARAMETER Experiment Name: At_Far-red-induction_P Parameter: Age (day) Value: 7
  misc_feature: MA Experiment 20001450 PARAMETER Experiment Name: At_Far-red-induction_P Parameter: Light Value: Far-red vs. White
  misc_feature: MA Experiment 20001450 PARAMETER Experiment Name: At_Far-red-induction_P Parameter: Organism Value: A. thaliana
  misc_feature: MA Experiment 20001450 PARAMETER Experiment Name: At_Far-red-induction_P Parameter: Plant Line Value: Columbia
  misc_feature: MA Experiment 20001450 PARAMETER Experiment Name: At_Far-red-induction_P Parameter: Timepoint (hr) Value: 8
  misc_feature: MA Experiment 20001450 PARAMETER Experiment Name: At_Far-red-induction_P Parameter: Tissue Value: Whole Plant
  misc_feature: MA Experiment ID: 20001451 Result: Up-regulated in Transcription
  misc_feature: MA Experiment 20001451 PARAMETER Experiment Name: At_Far-red-induction_P Parameter: Age (day) Value: 7
  misc_feature: MA Experiment 20001451 PARAMETER Experiment Name: At_Far-red-induction_P Parameter: Light Value: Far-red vs. White
  misc_feature: MA Experiment 20001451 PARAMETER Experiment Name: At_Far-red-induction_P Parameter: Organism Value: A. thaliana
  misc_feature: MA Experiment 20001451 PARAMETER Experiment Name: At_Far-red-induction_P Parameter: Plant Line Value: Columbia
  misc_feature: MA Experiment 20001451 PARAMETER Experiment Name: At_Far-red-induction_P Parameter: Timepoint (hr) Value: 24
  misc_feature: MA Experiment 20001451 PARAMETER Experiment Name: At_Far-red-induction_P Parameter: Tissue Value: Whole Plant
  misc_feature: MA Experiment ID: 20001459 Result: Up-regulated in Transcription
  misc_feature: MA Experiment 20001459 PARAMETER Experiment Name: At_50mM_NH4NO3_L-to-H_P Parameter: Age (day) Value: Undefined
  misc_feature: MA Experiment 20001459 PARAMETER Experiment Name: At_50mM_NH4NO3_L-to-H_P Parameter: Organism Value: Undefined
  misc_feature: MA Experiment 20001459 PARAMETER Experiment Name: At_50mM_NH4NO3_L-to-H_P Parameter: Plant Line Value: Undefined
  misc_feature: MA Experiment 20001459 PARAMETER Experiment Name: At_50mM_NH4NO3_L-to-H_P Parameter: Timepoint (hr) Value: 4
  misc_feature: MA Experiment 20001459 PARAMETER Experiment Name: At_50mM_NH4NO3_L-to-H_P Parameter: Tissue Value: Siliques
  misc_feature: MA Experiment 20001459 PARAMETER Experiment Name: At_50mM_NH4NO3_L-to-H_P Parameter: Treatment Value: 50mM NH4NO3 vs. 100mM Manitol
acttggaatttgagtgaaaaccataagatgggttttagagcactgcctcttcaacacagcagtgggttcatctccacgaccaaagtatccatctcaagaacctcgcccaggattttccggaaccctagatgggtcgttgtctcagcaaagcaagagaaagatgaggataagaagaagaatgaagaggagacttcgttgtttactcaattaacggatgccttggacttctcacaagttcgatcggagaaagacgctgagcttctctacgaggctcgagaagccaccaaatctggtcgcaagatgacccaagaacagtatggggcattgaggagaaaaatcggaggaacatacaaggacttttttaaatcctacgttgaagtggatgggcaatatgtggaggagggatgggtggacaaaacatgtaagatatgcaaaaaggacacaaagggtgaggcaagacaagtggacaagttagggagatatgctcatgtctcttgtcttcaaaatcctccctctggaaatttcttcaccagactcttctctagatgatgatgatcaatttcccaaatcatatgaatgtgtttgcttgtaactaaattactcttgaaattttgtgtgtatttttatagaaatcgaaattcgttctacataccaaaacaaacatcacggttatttgggatcttgttaaacaagagacagaagtggatgtatacatttttggtttaaatgttttcaagtttttat

SEQ ID NO: 35074 - protein, 182 aa, Arabidopsis thaliana
  peptide (1)..(182): Ceres Seq. ID no. 12698219
  misc_feature (10)..(182): Homolog of NCBI NO: 34907850 NR Description: P0031D02.12 [Oryza sativa (japonica
  misc_feature (10)..(182): Homolog of NCBI NO: 15228878 NR Description: putative protein
TWNLSENHKMGFRALPLQHSSGFISTTKVSISRTSPRIFRNPRWVVVSAKQEKDEDKKKNEEETSLFTQLTDALDFSQVRSEKDAELLYEAREATKSGRKMTQEQYGALRRKIGGTYKDFFKSYVEVDGQYVEEGWVDKTCKICKKDTKGEARQVDKLGRYAHVSCLQNPPSGNFFTRLFSR

SEQ ID NO: 35075 - protein, 173 aa, Arabidopsis thaliana
  peptide (1)..(173): Ceres Seq. ID no. 12698220
  misc_feature (1)..(173): Homolog of NCBI NO: 34907850 NR Description: P0031D02.12 [Oryza sativa (japonica
  misc_feature (1)..(173): Homolog of NCBI NO: 15228878 NR Description: putative protein
MGFRALPLQHSSGFISTTKVSISRTSPRIFRNPRWVVVSAKQEKDEDKKKNEEETSLFTQLTDALDFSQVRSEKDAELLYEAREATKSGRKMTQEQYGALRRKIGGTYKDFFKSYVEVDGQYVEEGWVDKTCKICKKDTKGEARQVDKLGRYAHVSCLQNPPSGNFFTRLFSR

SEQ ID NO: 35076 - DNA, 852 bp, Arabidopsis thaliana
  misc_feature (1)..(852): Ceres Seq. ID no. 13645724
  misc_feature: MA Experiment ID: 20000179 Result: Down-regulated in Transcription
  misc_feature: MA Experiment 20000179 PARAMETER Experiment Name: At_Germinating_Seeds_P Parameter: Age (hr) Value: 6 vs. 0
  misc_feature: MA Experiment 20000179 PARAMETER Experiment Name: At_Germinating_Seeds_P Parameter: Tissue Value: Germinating Seeds
  misc_feature: MA Experiment ID: 20000182 Result: Up-regulated in Transcription
  misc_feature: MA Experiment 20000182 PARAMETER Experiment Name: At_2mM_SA_P Parameter: Age (day) Value: 14
  misc_feature: MA Experiment 20000182 PARAMETER Experiment Name: At_2mM_SA_P Parameter: Organism Value: A. thaliana
  misc_feature: MA Experiment 20000182 PARAMETER Experiment Name: At_2mM_SA_P Parameter: Plant Line Value: WS
  misc_feature: MA Experiment 20000182 PARAMETER Experiment Name: At_2mM_SA_P Parameter: Timepoint (hr) Value: 6
  misc_feature: MA Experiment 20000182 PARAMETER Experiment Name: At_2mM_SA_P Parameter: Tissue Value: Aerial
  misc_feature: MA Experiment 20000182 PARAMETER Experiment Name: At_2mM_SA_P Parameter: Treatment Value: 2mM SA vs. No Treatment
  misc_feature: MA Experiment ID: 20000185 Result: Up-regulated in Transcription
  misc_feature: MA Experiment 20000185 PARAMETER Experiment Name: At_Roots__P Parameter: Age (day) Value: 7 vs. 21
  misc_feature: MA Experiment 20000185 PARAMETER Experiment Name: At_Roots__P Parameter: Organism Value: A. thaliana
  misc_feature: MA Experiment 20000185 PARAMETER Experiment Name: At_Roots__P Parameter: Tissue Value: Roots vs. Whole Plant
  misc_feature: MA Experiment ID: 20000227 Result: Up-regulated in Transcription
  misc_feature: MA Experiment 20000227 PARAMETER Experiment Name: At_Root-Tips-vs-Tops_P Parameter: Tissue Value: Root Tips vs. Root Tops
  misc_feature: MA Experiment ID: 20000265 Result: Up-regulated in Transcription
  misc_feature: MA Experiment 20000265 PARAMETER Experiment Name: At_Open_Flower_P Parameter: Age (day) Value: 21
  misc_feature: MA Experiment 20000265 PARAMETER Experiment Name: At_Open_Flower_P Parameter: Plant Line Value: WS
  misc_feature: MA Experiment 20000265 PARAMETER Experiment Name: At_Open_Flower_P Parameter: Tissue Value: Closed Flower vs. Whole Plant
  misc_feature: MA Experiment ID: 20000267 Result: Up-regulated in Transcription
  misc_feature: MA Experiment 20000267 PARAMETER Experiment Name: At_Drought_P Parameter: Age (day) Value: 7
  misc_feature: MA Experiment 20000267 PARAMETER Experiment Name: At_Drought_P Parameter: Organism Value: A. thaliana
  misc_feature: MA Experiment 20000267 PARAMETER Experiment Name: At_Drought_P Parameter: Plant Line Value: WS
  misc_feature: MA Experiment 20000267 PARAMETER Experiment Name: At_Drought_P Parameter: Timepoint (hr) Value: 6
  misc_feature: MA Experiment 20000267 PARAMETER Experiment Name: At_Drought_P Parameter: Tissue Value: Whole Plant
  misc_feature: MA Experiment 20000267 PARAMETER Experiment Name: At_Drought_P Parameter: Treatment Value: Drought vs. No Drought
  misc_feature: MA Experiment ID: 20000439 Result: Up-regulated in Transcription
  misc_feature: MA Experiment 20000439 PARAMETER Experiment Name: At_Roots__P Parameter: Age (day) Value: 14 vs. 21
  misc_feature: MA Experiment 20000439 PARAMETER Experiment Name: At_Roots__P Parameter: Organism Value: A. thaliana
  misc_feature: MA Experiment 20000439 PARAMETER Experiment Name: At_Roots__P Parameter: Tissue Value: Roots vs. Whole Plant
  misc_feature: MA Experiment ID: 20000456 Result: Up-regulated in Transcription
  misc_feature: MA Experiment 20000456 PARAMETER Experiment Name: At_100uM_BA_P Parameter: Age (day) Value: 14
  misc_feature: MA Experiment 20000456 PARAMETER Experiment Name: At_100uM_BA_P Parameter: Organism Value: A. thaliana
  misc_feature: MA Experiment 20000456 PARAMETER Experiment Name: At_100uM_BA_P Parameter: Plant Line Value: WS
  misc_feature: MA Experiment 20000456 PARAMETER Experiment Name: At_100uM_BA_P Parameter: Timepoint (hr) Value: 6
  misc_feature: MA Experiment 20000456 PARAMETER Experiment Name: At_100uM_BA_P Parameter: Tissue Value: Aerial
  misc_feature: MA Experiment 20000456 PARAMETER Experiment Name: At_100uM_BA_P Parameter: Treatment Value: 100uM BA vs. No Treatment
  misc_feature: MA Experiment ID: 20000527 Result: Down-regulated in Transcription
  misc_feature: MA Experiment 20000527 PARAMETER Experiment Name: At_10percent_PEG_P Parameter: Age (day) Value: 20
  misc_feature: MA Experiment 20000527 PARAMETER Experiment Name: At_10percent_PEG_P Parameter: Organism Value: A. thaliana
  misc_feature: MA Experiment 20000527 PARAMETER Experiment Name: At_10percent_PEG_P Parameter: Plant Line Value: WS
  misc_feature: MA Experiment 20000527 PARAMETER Experiment Name: At_10percent_PEG_P Parameter: Timepoint (day) Value: 20
  misc_feature: MA Experiment 20000527 PARAMETER Experiment Name: At_10percent_PEG_P Parameter: Tissue Value: Whole Plant
  misc_feature: MA Experiment 20000527 PARAMETER Experiment Name: At_10percent_PEG_P Parameter: Treatment Value: 10percent PEG vs. No Treatment
  misc_feature: MA Experiment ID: 20000574 Result: Up-regulated in Transcription
  misc_feature: MA Experiment 20000574 PARAMETER Experiment Name: At_100uM_ABA_Mutants__P Parameter: Organism Value: A. thaliana
  misc_feature: MA Experiment 20000574 PARAMETER Experiment Name: At_100uM_ABA_Mutants__P Parameter: Plant Line Value: CS23 vs. Ler wt
  misc_feature: MA Experiment 20000574 PARAMETER Experiment Name: At_100uM_ABA_Mutants__P Parameter: Timepoint (hr) Value: N/A
  misc_feature: MA Experiment 20000574 PARAMETER Experiment Name: At_100uM_ABA_Mutants__P Parameter: Tissue Value: Whole Plant
  misc_feature: MA Experiment 20000574 PARAMETER Experiment Name: At_100uM_ABA_Mutants__P Parameter: Treatment Value: None
  misc_feature: MA Experiment ID: 20000709 Result: Up-regulated in Transcription
  misc_feature: MA Experiment 20000709 PARAMETER Experiment Name: At_15mM_NH4NO3_L-to-H_P Parameter: Age (hr) Value: 14
  misc_feature: MA Experiment 20000709 PARAMETER Experiment Name: At_15mM_NH4NO3_L-to-H_P Parameter: Organism Value: A. thaliana
  misc_feature: MA Experiment 20000709 PARAMETER Experiment Name: At_15mM_NH4NO3_L-to-H_P Parameter: Plant Line Value: WS
  misc_feature: MA Experiment 20000709 PARAMETER Experiment Name: At_15mM_NH4NO3_L-to-H_P Parameter: Timepoint (hr) Value: 4
  misc_feature: MA Experiment 20000709 PARAMETER Experiment Name: At_15mM_NH4NO3_L-to-H_P Parameter: Tissue Value: Aerial
  misc_feature: MA Experiment 20000709 PARAMETER Experiment Name: At_15mM_NH4NO3_L-to-H_P Parameter: Treatment Value: 15mM NH4NO3 vs. 30mM Mannitol
atacttagacacaaaacaaacaaacaaaaatatcttagtgagcttaatcaagaacagcaatggcagacgaggtgattcttcttgatttctggccgagcatgtttggaatgaggacgaggattgctttagaagagaaaaatgtcaaattcgattacagagaacaagatctgtggaacaaaagcccgattctcctcgagatgaatccggttcataagaaaataccggttctcatccacaatggtaatccggtatgtgaatcactcatccagatcgaatacatcgacgaagtttggcctagcaaaaccccacttcttccttctgatccttaccaaagagctcaggccaaattttggggagatttcattgataagaaggtgtatgcttcagcgaggttgatttggggagctaaaggcgaagagcatgaggcggggaagaaggagttcatcgagatactcaagacactagagtctgagcttggagacaagacttactttggaggtgaaacattcggttatgttgatatagctctcattggattttacagttggtttgaagcgtatgagaagtttgggagtttcagcattgaagccgagtgtccaaaactgattgcttggggtaaaaggtgtgtggagagagagagtgtggctaagtctcttcctgattcggagaagatcattaagttcgttcctgagctaaggaaaaaacttgggatcgaaatcgaatagattctacgctgatatgtttttatgtttctgtttgtgttgctgtttctgctctgtttcatgttctgtttcttccttgtttcggaaatctttaagataatgtcatcaaaataatacaaatatttactcg

SEQ ID NO: 35077 - protein, 221 aa, Arabidopsis thaliana
  peptide (1)..(221): Ceres Seq. ID no. 13645725
  misc_feature (1)..(215): Homolog of NCBI NO: 21592644 NR Description: glutathione transferase, putative [Arabidopsis
  misc_feature (1)..(215): Homolog of NCBI NO: 18411929 NR Description: glutathione transferase, putative [Arabidopsis
  misc_feature (1)..(219): Homolog of NCBI NO: 15220040 NR Description: glutathione transferase, putative [Arabidopsis
  misc_feature (1)..(221): Homolog of NCBI NO: 15220041 NR Description: glutathione transferase, putative [Arabidopsis
MADEVILLDFWPSMFGMRTRIALEEKNVKFDYREQDLWNKSPILLEMNPVHKKIPVLIHNGNPVCESLIQIEYIDEVWPSKTPLLPSDPYQRAQAKFWGDFIDKKVYASARLIWGAKGEEHEAGKKEFIEILKTLESELGDKTYFGGETFGYVDIALIGFYSWFEAYEKFGSFSIEAECPKLIAWGKRCVERESVAKSLPDSEKIIKFVPELRKKLGIEIE

SEQ ID NO: 35078 - protein, 208 aa, Arabidopsis thaliana
  peptide (1)..(208): Ceres Seq. ID no. 13645726
  misc_feature (1)..(202): Homolog of NCBI NO: 21592644 NR Description: glutathione transferase, putative [Arabidopsis
  misc_feature (1)..(202): Homolog of NCBI NO: 18411929 NR Description: glutathione transferase, putative [Arabidopsis
  misc_feature (1)..(206): Homolog of NCBI NO: 15220040 NR Description: glutathione transferase, putative [Arabidopsis
  misc_feature (1)..(208): Homolog of NCBI NO: 15220041 NR Description: glutathione transferase, putative [Arabidopsis
MFGMRTRIALEEKNVKFDYREQDLWNKSPILLEMNPVHKKIPVLIHNGNPVCESLIQIEYIDEVWPSKTPLLPSDPYQRAQAKFWGDFIDKKVYASARLIWGAKGEEHEAGKKEFIEILKTLESELGDKTYFGGETFGYVDIALIGFYSWFEAYEKFGSFSIEAECPKLIAWGKRCVERESVAKSLPDSEKIIKFVPELRKKLGIEIE

SEQ ID NO: 35079 - protein, 205 aa, Arabidopsis thaliana
  peptide (1)..(205): Ceres Seq. ID no. 13645727
  misc_feature (1)..(199): Homolog of NCBI NO: 21592644 NR Description: glutathione transferase, putative [Arabidopsis
  misc_feature (1)..(199): Homolog of NCBI NO: 18411929 NR Description: glutathione transferase, putative [Arabidopsis
  misc_feature (1)..(203): Homolog of NCBI NO: 15220040 NR Description: glutathione transferase, putative [Arabidopsis
  misc_feature (1)..(205): Homolog of NCBI NO: 15220041 NR Description: glutathione transferase, putative [Arabidopsis
MRTRIALEEKNVKFDYREQDLWNKSPILLEMNPVHKKIPVLIHNGNPVCESLIQIEYIDEVWPSKTPLLPSDPYQRAQAKFWGDFIDKKVYASARLIWGAKGEEHEAGKKEFIEILKTLESELGDKTYFGGETFGYVDIALIGFYSWFEAYEKFGSFSIEAECPKLIAWGKRCVERESVAKSLPDSEKIIKFVPELRKKLGIEIE

SEQ ID NO: 35080 - DNA, 800 bp, Arabidopsis thaliana
  misc_feature (1)..(800): Ceres Seq. ID no. 12344997
  misc_feature: MA Experiment ID: 108473 Result: Up-regulated in Transcription
  misc_feature: MA Experiment 108473 PARAMETER Experiment Name: At_Drought_Flowers_cDNA_P Parameter: Timepoint (hr) Value: 7 d
  misc_feature: MA Experiment 108473 PARAMETER Experiment Name: At_Drought_Flowers_cDNA_P Parameter: Tissue Value: Flower
  misc_feature: MA Experiment 108473 PARAMETER Experiment Name: At_Drought_Flowers_cDNA_P Parameter: Treatment Value: Drought vs. No Drought
  misc_feature: MA Experiment ID: 108488 Result: Down-regulated in Transcription
  misc_feature: MA Experiment ID: 108489 Result: Up-regulated in Transcription
  misc_feature: MA Experiment ID: 108501 Result: Down-regulated in Transcription
  misc_feature: MA Experiment 108501 PARAMETER Experiment Name: At_ap2_floral_buds_cDNA_P Parameter: Plant Line Value: ap2 (Ler.)
  misc_feature: MA Experiment 108501 PARAMETER Experiment Name: At_ap2_floral_buds_cDNA_P Parameter: Tissue Value: Closed Flower
  misc_feature: MA Experiment ID: 108561 Result: Up-regulated in Transcription
  misc_feature: MA Experiment 108561 PARAMETER Experiment Name: At_100uM_ABA_cDNA_P Parameter: Timepoint (hr) Value: 6
  misc_feature: MA Experiment 108561 PARAMETER Experiment Name: At_100uM_ABA_cDNA_P Parameter: Tissue Value: Aerial
  misc_feature: MA Experiment 108561 PARAMETER Experiment Name: At_100uM_ABA_cDNA_P Parameter: Treatment Value: 100uM ABA vs. No Treatment
  misc_feature: MA Experiment ID: 108572 Result: Up-regulated in Transcription
  misc_feature: MA Experiment 108572 PARAMETER Experiment Name: At_Drought_cDNA_P Parameter: Timepoint (hr) Value: 1
  misc_feature: MA Experiment 108572 PARAMETER Experiment Name: At_Drought_cDNA_P Parameter: Tissue Value: Aerial
  misc_feature: MA Experiment 108572 PARAMETER Experiment Name: At_Drought_cDNA_P Parameter: Treatment Value: Drought vs. No Drought
  misc_feature: MA Experiment ID: 108573 Result: Up-regulated in Transcription
  misc_feature: MA Experiment 108573 PARAMETER Experiment Name: At_Drought_cDNA_P Parameter: Timepoint (hr) Value: 6
  misc_feature: MA Experiment 108573 PARAMETER Experiment Name: At_Drought_cDNA_P Parameter: Tissue Value: Aerial
  misc_feature: MA Experiment 108573 PARAMETER Experiment Name: At_Drought_cDNA_P Parameter: Treatment Value: Drought vs. No Drought
  misc_feature: MA Experiment ID: 108574 Result: Down-regulated in Transcription
  misc_feature: MA Experiment 108574 PARAMETER Experiment Name: At_Wounding__cDNA_P Parameter: Timepoint (hr) Value: 1
  misc_feature: MA Experiment 108574 PARAMETER Experiment Name: At_Wounding__cDNA_P Parameter: Tissue Value: Aerial
  misc_feature: MA Experiment 108574 PARAMETER Experiment Name: At_Wounding__cDNA_P Parameter: Treatment Value: Wounding vs. No Wounding
  misc_feature: MA Experiment ID: 108579 Result: Down-regulated in Transcription
  misc_feature: MA Experiment 108579 PARAMETER Experiment Name: At_4deg_Cold_cDNA_P Parameter: Temperature (deg C) Value: 4 vs. 22
  misc_feature: MA Experiment 108579 PARAMETER Experiment Name: At_4deg_Cold_cDNA_P Parameter: Timepoint (hr) Value: 6
  misc_feature: MA Experiment 108579 PARAMETER Experiment Name: At_4deg_Cold_cDNA_P Parameter: Tissue Value: Aerial
  misc_feature: MA Experiment ID: 108595 Result: Up-regulated in Transcription
  misc_feature: MA Experiment 108595 PARAMETER Experiment Name: At_Ler-pi_Ovule_cDNA_P Parameter: Plant Line Value: null
  misc_feature: MA Experiment ID: 108605 Result: Up-regulated in Transcription
  misc_feature: MA Experiment 108605 PARAMETER Experiment Name: At_100uM_ABA_cDNA_P Parameter: Timepoint (hr) Value: 6
  misc_feature: MA Experiment 108605 PARAMETER Experiment Name: At_100uM_ABA_cDNA_P Parameter: Tissue Value: Aerial
  misc_feature: MA Experiment 108605 PARAMETER Experiment Name: At_100uM_ABA_cDNA_P Parameter: Treatment Value: 100uM ABA vs. No Treatment
  misc_feature: MA Experiment ID: 108607 Result: Up-regulated in Transcription
  misc_feature: MA Experiment 108607 PARAMETER Experiment Name: At_100uM_ABA_cDNA_P Parameter: Timepoint (hr) Value: 4
  misc_feature: MA Experiment 108607 PARAMETER Experiment Name: At_100uM_ABA_cDNA_P Parameter: Tissue Value: Aerial
  misc_feature: MA Experiment 108607 PARAMETER Experiment Name: At_100uM_ABA_cDNA_P Parameter: Treatment Value: 100uM ABA vs. No Treatment
  misc_feature: MA Experiment ID: 108608 Result: Up-regulated in Transcription
  misc_feature: MA Experiment 108608 PARAMETER Experiment Name: At_100uM_ABA_cDNA_P Parameter: Timepoint (hr) Value: 1
  misc_feature: MA Experiment 108608 PARAMETER Experiment Name: At_100uM_ABA_cDNA_P Parameter: Tissue Value: Aerial
  misc_feature: MA Experiment 108608 PARAMETER Experiment Name: At_100uM_ABA_cDNA_P Parameter: Treatment Value: 100uM ABA vs. No Treatment
  misc_feature: MA Experiment ID: 108609 Result: Up-regulated in Transcription
  misc_feature: MA Experiment 108609 PARAMETER Experiment Name: At_100uM_ABA_cDNA_P Parameter: Timepoint (hr) Value: 24
  misc_feature: MA Experiment 108609 PARAMETER Experiment Name: At_100uM_ABA_cDNA_P Parameter: Tissue Value: Aerial
  misc_feature: MA Experiment 108609 PARAMETER Experiment Name: At_100uM_ABA_cDNA_P Parameter: Treatment Value: 100uM ABA vs. No Treatment
  misc_feature: MA Experiment ID: 108668 Result: Up-regulated in Transcription
  misc_feature: MA Experiment 108668 PARAMETER Experiment Name: At_2mM_SA_cDNA_P Parameter: Plant Line Value: WS
  misc_feature: MA Experiment 108668 PARAMETER Experiment Name: At_2mM_SA_cDNA_P Parameter: Timepoint (hr) Value: 6
  misc_feature: MA Experiment 108668 PARAMETER Experiment Name: At_2mM_SA_cDNA_P Parameter: Treatment Value: 2mM SA vs. No Treatment
  misc_feature: MA Experiment ID: 20000070 Result: Up-regulated in Transcription
  misc_feature: MA Experiment 20000070 PARAMETER Experiment Name: At_100uM_ABA_Mutants_cDNA_P Parameter: Plant Line Value: CS24
  misc_feature: MA Experiment 20000070 PARAMETER Experiment Name: At_100uM_ABA_Mutants_cDNA_P Parameter: Timepoint (hr) Value: 6
  misc_feature: MA Experiment 20000070 PARAMETER Experiment Name: At_100uM_ABA_Mutants_cDNA_P Parameter: Tissue Value: Aerial
  misc_feature: MA Experiment 20000070 PARAMETER Experiment Name: At_100uM_ABA_Mutants_cDNA_P Parameter: Treatment Value: 100uM ABA vs. No Treatment
  misc_feature: MA Experiment ID: 20000071 Result: Up-regulated in Transcription
  misc_feature: MA Experiment 20000071 PARAMETER Experiment Name: At_100uM_ABA_Mutants_cDNA_P Parameter: Plant Line Value: CS8104
  misc_feature: MA Experiment 20000071 PARAMETER Experiment Name: At_100uM_ABA_Mutants_cDNA_P Parameter: Timepoint (hr) Value: 6
  misc_feature: MA Experiment 20000071 PARAMETER Experiment Name: At_100uM_ABA_Mutants_cDNA_P Parameter: Tissue Value: Aerial
  misc_feature: MA Experiment 20000071 PARAMETER Experiment Name: At_100uM_ABA_Mutants_cDNA_P Parameter: Treatment Value: 100uM ABA vs. No Treatment
  misc_feature: MA Experiment ID: 20000072 Result: Up-regulated in Transcription
  misc_feature: MA Experiment 20000072 PARAMETER Experiment Name: At_100uM_ABA_Mutants_cDNA_P Parameter: Plant Line Value: CS8105
  misc_feature: MA Experiment 20000072 PARAMETER Experiment Name: At_100uM_ABA_Mutants_cDNA_P Parameter: Timepoint (hr) Value: 6
  misc_feature: MA Experiment 20000072 PARAMETER Experiment Name: At_100uM_ABA_Mutants_cDNA_P Parameter: Tissue Value: Aerial
  misc_feature: MA Experiment 20000072 PARAMETER Experiment Name: At_100uM_ABA_Mutants_cDNA_P Parameter: Treatment Value: 100uM ABA vs. No Treatment
  misc_feature: MA Experiment ID: 20000086 Result: Up-regulated in Transcription
  misc_feature: MA Experiment 20000086 PARAMETER Experiment Name: At_100uM_ABA_Mutants_cDNA_P Parameter: Plant Line Value: CS22
  misc_feature: MA Experiment 20000086 PARAMETER Experiment Name: At_100uM_ABA_Mutants_cDNA_P Parameter: Timepoint (hr) Value: 6
  misc_feature: MA Experiment 20000086 PARAMETER Experiment Name: At_100uM_ABA_Mutants_cDNA_P Parameter: Tissue Value: Aerial
  misc_feature: MA Experiment 20000086 PARAMETER Experiment Name: At_100uM_ABA_Mutants_cDNA_P Parameter: Treatment Value: 100uM ABA vs. No Treatment
  misc_feature: MA Experiment ID: 20000087 Result: Up-regulated in Transcription
  misc_feature: MA Experiment 20000087 PARAMETER Experiment Name: At_100uM_ABA_Mutants_cDNA_P Parameter: Plant Line Value: WS
  misc_feature: MA Experiment 20000087 PARAMETER Experiment Name: At_100uM_ABA_Mutants_cDNA_P Parameter: Timepoint (hr) Value: 6
  misc_feature: MA Experiment 20000087 PARAMETER Experiment Name: At_100uM_ABA_Mutants_cDNA_P Parameter: Tissue Value: Aerial
  misc_feature: MA Experiment 20000087 PARAMETER Experiment Name: At_100uM_ABA_Mutants_cDNA_P Parameter: Treatment Value: 100uM ABA vs. No Treatment
  misc_feature: MA Experiment ID: 20000088 Result: Up-regulated in Transcription
  misc_feature: MA Experiment 20000088 PARAMETER Experiment Name: At_100uM_ABA_Mutants_cDNA_P Parameter: Plant Line Value: Landsberg
  misc_feature: MA Experiment 20000088 PARAMETER Experiment Name: At_100uM_ABA_Mutants_cDNA_P Parameter: Timepoint (hr) Value: 6
  misc_feature: MA Experiment 20000088 PARAMETER Experiment Name: At_100uM_ABA_Mutants_cDNA_P Parameter: Tissue Value: Aerial
  misc_feature: MA Experiment 20000088 PARAMETER Experiment Name: At_100uM_ABA_Mutants_cDNA_P Parameter: Treatment Value: 100uM ABA vs. No Treatment
  misc_feature: MA Experiment ID: 20000112 Result: Up-regulated in Transcription
  misc_feature: MA Experiment 20000112 PARAMETER Experiment Name: At_42deg_Heat_cDNA_P Parameter: Temperature (deg C) Value: 42 vs. 22
  misc_feature: MA Experiment 20000112 PARAMETER Experiment Name: At_42deg_Heat_cDNA_P Parameter: Timepoint (hr) Value: 2
  misc_feature: MA Experiment 20000112 PARAMETER Experiment Name: At_42deg_Heat_cDNA_P Parameter: Tissue Value: Aerial
  misc_feature: MA Experiment ID: 20000117 Result: Up-regulated in Transcription
  misc_feature: MA Experiment 20000117 PARAMETER Experiment Name: At_100uM_ABA_Mutants_cDNA_P Parameter: Plant Line Value: Columbia
  misc_feature: MA Experiment 20000117 PARAMETER Experiment Name: At_100uM_ABA_Mutants_cDNA_P Parameter: Timepoint (hr) Value: 6
  misc_feature: MA Experiment 20000117 PARAMETER Experiment Name: At_100uM_ABA_Mutants_cDNA_P Parameter: Tissue Value: Aerial
  misc_feature: MA Experiment 20000117 PARAMETER Experiment Name: At_100uM_ABA_Mutants_cDNA_P Parameter: Treatment Value: 100uM ABA vs. No Treatment
  misc_feature: MA Experiment ID: 20000166 Result: Up-regulated in Transcription
  misc_feature: MA Experiment 20000166 PARAMETER Experiment Name: At_100uM_ABA_P Parameter: Age (day) Value: 14
  misc_feature: MA Experiment 20000166 PARAMETER Experiment Name: At_100uM_ABA_P Parameter: Organism Value: A. thaliana
  misc_feature: MA Experiment 20000166 PARAMETER Experiment Name: At_100uM_ABA_P Parameter: Plant Line Value: WS
  misc_feature: MA Experiment 20000166 PARAMETER Experiment Name: At_100uM_ABA_P Parameter: Timepoint (hr) Value: 1
  misc_feature: MA Experiment 20000166 PARAMETER Experiment Name: At_100uM_ABA_P Parameter: Tissue Value: Aerial
  misc_feature: MA Experiment 20000166 PARAMETER Experiment Name: At_100uM_ABA_P Parameter: Treatment Value: 100uM ABA vs. No Treatment
  misc_feature: MA Experiment ID: 20000169 Result: Up-regulated in Transcription
  misc_feature: MA Experiment 20000169 PARAMETER Experiment Name: At_100uM_ABA_P Parameter: Age (day) Value: 14
  misc_feature: MA Experiment 20000169 PARAMETER Experiment Name: At_100uM_ABA_P Parameter: Organism Value: A. thaliana
  misc_feature: MA Experiment 20000169 PARAMETER Experiment Name: At_100uM_ABA_P Parameter: Plant Line Value: WS
  misc_feature: MA Experiment 20000169 PARAMETER Experiment Name: At_100uM_ABA_P Parameter: Timepoint (hr) Value: 6
  misc_feature: MA Experiment 20000169 PARAMETER Experiment Name: At_100uM_ABA_P Parameter: Tissue Value: Aerial
  misc_feature: MA Experiment 20000169 PARAMETER Experiment Name: At_100uM_ABA_P Parameter: Treatment Value: 100uM ABA vs. No Treatment
  misc_feature: MA Experiment ID: 20000182 Result: Up-regulated in Transcription
  misc_feature: MA Experiment 20000182 PARAMETER Experiment Name: At_2mM_SA_P Parameter: Age (day) Value: 14
  misc_feature: MA Experiment 20000182 PARAMETER Experiment Name: At_2mM_SA_P Parameter: Organism Value: A. thaliana
  misc_feature: MA Experiment 20000182 PARAMETER Experiment Name: At_2mM_SA_P Parameter: Plant Line Value: WS
  misc_feature: MA Experiment 20000182 PARAMETER Experiment Name: At_2mM_SA_P Parameter: Timepoint (hr) Value: 6
  misc_feature: MA Experiment 20000182 PARAMETER Experiment Name: At_2mM_SA_P Parameter: Tissue Value: Aerial
  misc_feature: MA Experiment 20000182 PARAMETER Experiment Name: At_2mM_SA_P Parameter: Treatment Value: 2mM SA vs. No Treatment
  misc_feature: MA Experiment ID: 20000184 Result: Down-regulated in Transcription
  misc_feature: MA Experiment 20000184 PARAMETER Experiment Name: At_Shoots__P Parameter: Age (day) Value: 7
  misc_feature: MA Experiment 20000184 PARAMETER Experiment Name: At_Shoots__P Parameter: Tissue Value: Shoots vs. Whole Plant
  misc_feature: MA Experiment ID: 20000185 Result: Down-regulated in Transcription
  misc_feature: MA Experiment 20000185 PARAMETER Experiment Name: At_Roots__P Parameter: Age (day) Value: 7 vs. 21
  misc_feature: MA Experiment 20000185 PARAMETER Experiment Name: At_Roots__P Parameter: Organism Value: A. thaliana
  misc_feature: MA Experiment 20000185 PARAMETER Experiment Name: At_Roots__P Parameter: Tissue Value: Roots vs. Whole Plant
  misc_feature: MA Experiment ID: 20000234 Result: Down-regulated in Transcription
  misc_feature: MA Experiment 20000234 PARAMETER Experiment Name: At_Siliques_P Parameter: Age (day) Value: 21
  misc_feature: MA Experiment 20000234 PARAMETER Experiment Name: At_Siliques_P Parameter: Organism Value: A. thaliana
  misc_feature: MA Experiment 20000234 PARAMETER Experiment Name: At_Siliques_P Parameter: Plant Line Value: WS
  misc_feature: MA Experiment 20000234 PARAMETER Experiment Name: At_Siliques_P Parameter: Tissue Value: Less Than 5mm Siliques vs. Whole Plant
  misc_feature: MA Experiment ID: 20000265 Result: Down-regulated in Transcription
  misc_feature: MA Experiment 20000265 PARAMETER Experiment Name: At_Open_Flower_P Parameter: Age (day) Value: 21
  misc_feature: MA Experiment 20000265 PARAMETER Experiment Name: At_Open_Flower_P Parameter: Plant Line Value: WS
  misc_feature: MA Experiment 20000265 PARAMETER Experiment Name: At_Open_Flower_P Parameter: Tissue Value: Closed Flower vs. Whole Plant
  misc_feature: MA Experiment ID: 20000267 Result: Up-regulated in Transcription
  misc_feature: MA Experiment 20000267 PARAMETER Experiment Name: At_Drought_P Parameter: Age (day) Value: 7
  misc_feature: MA Experiment 20000267 PARAMETER Experiment Name: At_Drought_P Parameter: Organism Value: A. thaliana
  misc_feature: MA Experiment 20000267 PARAMETER Experiment Name: At_Drought_P Parameter: Plant Line Value: WS
  misc_feature: MA Experiment 20000267 PARAMETER Experiment Name: At_Drought_P Parameter: Timepoint (hr) Value: 6
  misc_feature: MA Experiment 20000267 PARAMETER Experiment Name: At_Drought_P Parameter: Tissue Value: Whole Plant
  misc_feature: MA Experiment 20000267 PARAMETER Experiment Name: At_Drought_P Parameter: Treatment Value: Drought vs. No Drought
  misc_feature: MA Experiment ID: 20000268 Result: Up-regulated in Transcription
  misc_feature: MA Experiment 20000268 PARAMETER Experiment Name: At_100mM_NaCl__P Parameter: Age (day) Value: 14
  misc_feature: MA Experiment 20000268 PARAMETER Experiment Name: At_100mM_NaCl__P Parameter: Organism Value: A. thaliana
  misc_feature: MA Experiment 20000268 PARAMETER Experiment Name: At_100mM_NaCl__P Parameter: Plant Line Value: WS
  misc_feature: MA Experiment 20000268 PARAMETER Experiment Name: At_100mM_NaCl__P Parameter: Timepoint (hr) Value: 6
  misc_feature: MA Experiment 20000268 PARAMETER Experiment Name: At_100mM_NaCl__P Parameter: Tissue Value: Whole Plant
  misc_feature: MA Experiment 20000268 PARAMETER Experiment Name: At_100mM_NaCl__P Parameter: Treatment Value: 100mM NaCl vs. No Treatment
  misc_feature: MA Experiment ID: 20000288 Result: Down-regulated in Transcription
  misc_feature: MA Experiment 20000288 PARAMETER Experiment Name: At_Drought_P Parameter: Age (day) Value: 7
  misc_feature: MA Experiment 20000288 PARAMETER Experiment Name: At_Drought_P Parameter: Organism Value: A. thaliana
  misc_feature: MA Experiment 20000288 PARAMETER Experiment Name: At_Drought_P Parameter: Plant Line Value: WS
  misc_feature: MA Experiment 20000288 PARAMETER Experiment Name: At_Drought_P Parameter: Timepoint (hr) Value: 1
  misc_feature: MA Experiment 20000288 PARAMETER Experiment Name: At_Drought_P Parameter: Tissue Value: Whole Plant
  misc_feature: MA Experiment 20000288 PARAMETER Experiment Name: At_Drought_P Parameter: Treatment Value: Drought vs. No Drought
  misc_feature: MA Experiment ID: 20000436 Result: Up-regulated in Transcription
  misc_feature: MA Experiment 20000436 PARAMETER Experiment Name: At_Drought_P Parameter: Age (day) Value: 7
  misc_feature: MA Experiment 20000436 PARAMETER Experiment Name: At_Drought_P Parameter: Organism Value: A. thaliana
  misc_feature: MA Experiment 20000436 PARAMETER Experiment Name: At_Drought_P Parameter: Plant Line Value: WS
  misc_feature: MA Experiment 20000436 PARAMETER Experiment Name: At_Drought_P Parameter: Timepoint (hr) Value: 12
  misc_feature: MA Experiment 20000436 PARAMETER Experiment Name: At_Drought_P Parameter: Tissue Value: Whole Plant
  misc_feature: MA Experiment 20000436 PARAMETER Experiment Name: At_Drought_P Parameter: Treatment Value: Drought vs. No Drought
  misc_feature: MA Experiment ID: 20000437 Result: Up-regulated in Transcription
  misc_feature: MA Experiment 20000437 PARAMETER Experiment Name: At_Drought_P Parameter: Age (day) Value: 8
  misc_feature: MA Experiment 20000437 PARAMETER Experiment Name: At_Drought_P Parameter: Organism Value: A. thaliana
  misc_feature: MA Experiment 20000437 PARAMETER Experiment Name: At_Drought_P Parameter: Plant Line Value: WS
  misc_feature: MA Experiment 20000437 PARAMETER Experiment Name: At_Drought_P Parameter: Timepoint (hr) Value: 24
  misc_feature: MA Experiment 20000437 PARAMETER Experiment Name: At_Drought_P Parameter: Tissue Value: Whole Plant
  misc_feature: MA Experiment 20000437 PARAMETER Experiment Name: At_Drought_P Parameter: Treatment Value: Drought vs. No Drought
  misc_feature: MA Experiment ID: 20000438 Result: Down-regulated in Transcription
  misc_feature: MA Experiment 20000438 PARAMETER Experiment Name: At_Shoots__P Parameter: Age (day) Value: 14
  misc_feature: MA Experiment 20000438 PARAMETER Experiment Name: At_Shoots__P Parameter: Tissue Value: Shoots vs. Whole Plant
  misc_feature: MA Experiment ID: 20000439 Result: Down-regulated in Transcription
  misc_feature: MA Experiment 20000439 PARAMETER Experiment Name: At_Roots__P Parameter: Age (day) Value: 14 vs. 21
  misc_feature: MA Experiment 20000439 PARAMETER Experiment Name: At_Roots__P Parameter: Organism Value: A. thaliana
  misc_feature: MA Experiment 20000439 PARAMETER Experiment Name: At_Roots__P Parameter: Tissue Value: Roots vs. Whole Plant
  misc_feature: MA Experiment ID: 20000453 Result: Up-regulated in Transcription
  misc_feature: MA Experiment 20000453 PARAMETER Experiment Name: At_100uM_ABA_P Parameter: Age (day) Value: 15
  misc_feature: MA Experiment 20000453 PARAMETER Experiment Name: At_100uM_ABA_P Parameter: Organism Value: A. thaliana
  misc_feature: MA Experiment 20000453 PARAMETER Experiment Name: At_100uM_ABA_P Parameter: Plant Line Value: WS
  misc_feature: MA Experiment 20000453 PARAMETER Experiment Name: At_100uM_ABA_P Parameter: Timepoint (hr) Value: 24
  misc_feature: MA Experiment 20000453 PARAMETER Experiment Name: At_100uM_ABA_P Parameter: Tissue Value: Aerial
  misc_feature: MA Experiment 20000453 PARAMETER Experiment Name: At_100uM_ABA_P Parameter: Treatment Value: 100uM ABA vs. No Treatment
  misc_feature: MA Experiment ID: 20000455 Result: Up-regulated in Transcription
  misc_feature: MA Experiment 20000455 PARAMETER Experiment Name: At_100uM_ABA_P Parameter: Age (day) Value: 16
  misc_feature: MA Experiment 20000455 PARAMETER Experiment Name: At_100uM_ABA_P Parameter: Organism Value: A. thaliana
  misc_feature: MA Experiment 20000455 PARAMETER Experiment Name: At_100uM_ABA_P Parameter: Plant Line Value: WS
  misc_feature: MA Experiment 20000455 PARAMETER Experiment Name: At_100uM_ABA_P Parameter: Timepoint (hr) Value: 48
  misc_feature: MA Experiment 20000455 PARAMETER Experiment Name: At_100uM_ABA_P Parameter: Tissue Value: Aerial
  misc_feature: MA Experiment 20000455 PARAMETER Experiment Name: At_100uM_ABA_P Parameter: Treatment Value: 100uM ABA vs. No Treatment
  misc_feature: MA Experiment ID: 20000573 Result: Up-regulated in Transcription
  misc_feature: MA Experiment 20000573 PARAMETER Experiment Name: At_100uM_ABA_Mutants__P Parameter: Organism Value: A. thaliana
  misc_feature: MA Experiment 20000573 PARAMETER Experiment Name: At_100uM_ABA_Mutants__P Parameter: Plant Line Value: CS22 vs. Ler wt
  misc_feature: MA Experiment 20000573 PARAMETER Experiment Name: At_100uM_ABA_Mutants__P Parameter: Timepoint (hr) Value: N/A
  misc_feature: MA Experiment 20000573 PARAMETER Experiment Name: At_100uM_ABA_Mutants__P Parameter: Tissue Value: Whole Plant
  misc_feature: MA Experiment 20000573 PARAMETER Experiment Name: At_100uM_ABA_Mutants__P Parameter: Treatment Value: None
  misc_feature: MA Experiment ID: 20000574 Result: Up-regulated in Transcription
  misc_feature: MA Experiment 20000574 PARAMETER Experiment Name: At_100uM_ABA_Mutants__P Parameter: Organism Value: A. thaliana
  misc_feature: MA Experiment 20000574 PARAMETER Experiment Name: At_100uM_ABA_Mutants__P Parameter: Plant Line Value: CS23 vs. Ler wt
  misc_feature: MA Experiment 20000574 PARAMETER Experiment Name: At_100uM_ABA_Mutants__P Parameter: Timepoint (hr) Value: N/A
  misc_feature: MA Experiment 20000574 PARAMETER Experiment Name: At_100uM_ABA_Mutants__P Parameter: Tissue Value: Whole Plant
  misc_feature: MA Experiment 20000574 PARAMETER Experiment Name: At_100uM_ABA_Mutants__P Parameter: Treatment Value: None
  misc_feature: MA Experiment ID: 20001248 Result: Up-regulated in Transcription
  misc_feature: MA Experiment 20001248 PARAMETER Experiment Name: At_Far-red-induction_P Parameter: Age (day) Value: 7
  misc_feature: MA Experiment 20001248 PARAMETER Experiment Name: At_Far-red-induction_P Parameter: Light Value: Far-red vs. White
  misc_feature: MA Experiment 20001248 PARAMETER Experiment Name: At_Far-red-induction_P Parameter: Organism Value: A. thaliana
  misc_feature: MA Experiment 20001248 PARAMETER Experiment Name: At_Far-red-induction_P Parameter: Plant Line Value: Columbia
  misc_feature: MA Experiment 20001248 PARAMETER Experiment Name: At_Far-red-induction_P Parameter: Timepoint (hr) Value: 4
  misc_feature: MA Experiment 20001248 PARAMETER Experiment Name: At_Far-red-induction_P Parameter: Tissue Value: Whole Plant
  misc_feature: MA Experiment ID: 20001450 Result: Up-regulated in Transcription
  misc_feature: MA Experiment 20001450 PARAMETER Experiment Name: At_Far-red-induction_P Parameter: Age (day) Value: 7
  misc_feature: MA Experiment 20001450 PARAMETER Experiment Name: At_Far-red-induction_P Parameter: Light Value: Far-red vs. White
  misc_feature: MA Experiment 20001450 PARAMETER Experiment Name: At_Far-red-induction_P Parameter: Organism Value: A. thaliana
  misc_feature: MA Experiment 20001450 PARAMETER Experiment Name: At_Far-red-induction_P Parameter: Plant Line Value: Columbia
  misc_feature: MA Experiment 20001450 PARAMETER Experiment Name: At_Far-red-induction_P Parameter: Timepoint (hr) Value: 8
  misc_feature: MA Experiment 20001450 PARAMETER Experiment Name: At_Far-red-induction_P Parameter: Tissue Value: Whole Plant
  misc_feature: MA Experiment ID: 20001451 Result: Up-regulated in Transcription
  misc_feature: MA Experiment 20001451 PARAMETER Experiment Name: At_Far-red-induction_P Parameter: Age (day) Value: 7
  misc_feature: MA Experiment 20001451 PARAMETER Experiment Name: At_Far-red-induction_P Parameter: Light Value: Far-red vs. White
  misc_feature: MA Experiment 20001451 PARAMETER Experiment Name: At_Far-red-induction_P Parameter: Organism Value: A. thaliana
  misc_feature: MA Experiment 20001451 PARAMETER Experiment Name: At_Far-red-induction_P Parameter: Plant Line Value: Columbia
  misc_feature: MA Experiment 20001451 PARAMETER Experiment Name: At_Far-red-induction_P Parameter: Timepoint (hr) Value: 24
  misc_feature: MA Experiment 20001451 PARAMETER Experiment Name: At_Far-red-induction_P Parameter: Tissue Value: Whole Plant
  misc_feature: MA Experiment ID: 20001554 Result: Up-regulated in Transcription
  misc_feature: MA Experiment 20001554 PARAMETER Experiment Name: At_Drought_Soil_Dry_P Parameter: Age (day) Value: 21
  misc_feature: MA Experiment 20001554 PARAMETER Experiment Name: At_Drought_Soil_Dry_P Parameter: Organism Value: A. thaliana
  misc_feature: MA Experiment 20001554 PARAMETER Experiment Name: At_Drought_Soil_Dry_P Parameter: Plant Line Value: WS
  misc_feature: MA Experiment 20001554 PARAMETER Experiment Name: At_Drought_Soil_Dry_P Parameter: Post Timepoint (hr) Value: None
  misc_feature: MA Experiment 20001554 PARAMETER Experiment Name: At_Drought_Soil_Dry_P Parameter: Post-Treatment Value: None
  misc_feature: MA Experiment 20001554 PARAMETER Experiment Name: At_Drought_Soil_Dry_P Parameter: Timepoint (day) Value: 7
  misc_feature: MA Experiment 20001554 PARAMETER Experiment Name: At_Drought_Soil_Dry_P Parameter: Treatment Value: Drought vs. No Drought
  misc_feature: MA Experiment ID: 20001555 Result: Up-regulated in Transcription
  misc_feature: MA Experiment 20001555 PARAMETER Experiment Name: At_Drought_Soil_Dry_P Parameter: Age (day) Value: 24
  misc_feature: MA Experiment 20001555 PARAMETER Experiment Name: At_Drought_Soil_Dry_P Parameter: Organism Value: A. thaliana
  misc_feature: MA Experiment 20001555 PARAMETER Experiment Name: At_Drought_Soil_Dry_P Parameter: Plant Line Value: WS
  misc_feature: MA Experiment 20001555 PARAMETER Experiment Name: At_Drought_Soil_Dry_P Parameter: Post Timepoint (hr) Value: None
  misc_feature: MA Experiment 20001555 PARAMETER Experiment Name: At_Drought_Soil_Dry_P Parameter: Post-Treatment Value: None
  misc_feature: MA Experiment 20001555 PARAMETER Experiment Name: At_Drought_Soil_Dry_P Parameter: Timepoint (day) Value: 10
  misc_feature: MA Experiment 20001555 PARAMETER Experiment Name: At_Drought_Soil_Dry_P Parameter: Treatment Value: Drought vs. No Drought
  misc_feature: MA Experiment ID: 20001556 Result: Up-regulated in Transcription
  misc_feature: MA Experiment 20001556 PARAMETER Experiment Name: At_Drought_Soil_Dry_P Parameter: Age (day) Value: 26
  misc_feature: MA Experiment 20001556 PARAMETER Experiment Name: At_Drought_Soil_Dry_P Parameter: Organism Value: A. thaliana
  misc_feature: MA Experiment 20001556 PARAMETER Experiment Name: At_Drought_Soil_Dry_P Parameter: Plant Line Value: WS
  misc_feature: MA Experiment 20001556 PARAMETER Experiment Name: At_Drought_Soil_Dry_P Parameter: Post Timepoint (hr) Value: None
  misc_feature: MA Experiment 20001556 PARAMETER Experiment Name: At_Drought_Soil_Dry_P Parameter: Post-Treatment Value: None
  misc_feature: MA Experiment 20001556 PARAMETER Experiment Name: At_Drought_Soil_Dry_P Parameter: Timepoint (day) Value: 12
  misc_feature: MA Experiment 20001556 PARAMETER Experiment Name: At_Drought_Soil_Dry_P Parameter: Treatment Value: Drought vs. No Drought
  misc_feature: MA Experiment ID: 20001557 Result: Up-regulated in Transcription
  misc_feature: MA Experiment 20001557 PARAMETER Experiment Name: At_Drought_Soil_Dry_P Parameter: Age (day) Value: 27
  misc_feature: MA Experiment 20001557 PARAMETER Experiment Name: At_Drought_Soil_Dry_P Parameter: Organism Value: A. thaliana
  misc_feature: MA Experiment 20001557 PARAMETER Experiment Name: At_Drought_Soil_Dry_P Parameter: Plant Line Value: WS
  misc_feature: MA Experiment 20001557 PARAMETER Experiment Name: At_Drought_Soil_Dry_P Parameter: Post Timepoint (hr) Value: 3
  misc_feature: MA Experiment 20001557 PARAMETER Experiment Name: At_Drought_Soil_Dry_P Parameter: Post-Treatment Value: Re-Water vs. No Drought
  misc_feature: MA Experiment 20001557 PARAMETER Experiment Name: At_Drought_Soil_Dry_P Parameter: Timepoint (day) Value: 13
  misc_feature: MA Experiment 20001557 PARAMETER Experiment Name: At_Drought_Soil_Dry_P Parameter: Treatment Value: Drought vs. No Drought
  misc_feature: MA Experiment ID: 20001558 Result: Up-regulated in Transcription
  misc_feature: MA Experiment 20001558 PARAMETER Experiment Name: At_Drought_Soil_Dry_P Parameter: Age (day) Value: 27
  misc_feature: MA Experiment 20001558 PARAMETER Experiment Name: At_Drought_Soil_Dry_P Parameter: Organism Value: A. thaliana
  misc_feature: MA Experiment 20001558 PARAMETER Experiment Name: At_Drought_Soil_Dry_P Parameter: Plant Line Value: WS
  misc_feature: MA Experiment 20001558 PARAMETER Experiment Name: At_Drought_Soil_Dry_P Parameter: Post Timepoint (hr) Value: 6
  misc_feature: MA Experiment 20001558 PARAMETER Experiment Name: At_Drought_Soil_Dry_P Parameter: Post-Treatment Value: Re-Water vs. No Drought
  misc_feature: MA Experiment 20001558 PARAMETER Experiment Name: At_Drought_Soil_Dry_P Parameter: Timepoint (day) Value: 13
  misc_feature: MA Experiment 20001558 PARAMETER Experiment Name: At_Drought_Soil_Dry_P Parameter: Treatment Value: Drought vs. No Drought
  misc_feature: MA Experiment ID: 20001560 Result: Up-regulated in Transcription
  misc_feature: MA Experiment 20001560 PARAMETER Experiment Name: At_Drought_Soil_Dry_P Parameter: Age (day) Value: 28
  misc_feature: MA Experiment 20001560 PARAMETER Experiment Name: At_Drought_Soil_Dry_P Parameter: Organism Value: A. thaliana
  misc_feature: MA Experiment 20001560 PARAMETER Experiment Name: At_Drought_Soil_Dry_P Parameter: Plant Line Value: WS
  misc_feature: MA Experiment 20001560 PARAMETER Experiment Name: At_Drought_Soil_Dry_P Parameter: Post Timepoint (hr) Value: None
  misc_feature: MA Experiment 20001560 PARAMETER Experiment Name: At_Drought_Soil_Dry_P Parameter: Post-Treatment Value: None
  misc_feature: MA Experiment 20001560 PARAMETER Experiment Name: At_Drought_Soil_Dry_P Parameter: Timepoint (day) Value: 14
  misc_feature: MA Experiment 20001560 PARAMETER Experiment Name: At_Drought_Soil_Dry_P Parameter: Treatment Value: Drought vs. No Drought
  misc_feature: MA Experiment ID: 20001906 Result: Up-regulated in Transcription
  misc_feature: MA Experiment 20001906 PARAMETER Experiment Name: At_Drought_Reproduction_P Parameter: Age (day) Value: 35
  misc_feature: MA Experiment 20001906 PARAMETER Experiment Name: At_Drought_Reproduction_P Parameter: Organism Value: A. thaliana
  misc_feature: MA Experiment 20001906 PARAMETER Experiment Name: At_Drought_Reproduction_P Parameter: Plant Line Value: WS
  misc_feature: MA Experiment 20001906 PARAMETER Experiment Name: At_Drought_Reproduction_P Parameter: Timepoint (day) Value: 5
  misc_feature: MA Experiment 20001906 PARAMETER Experiment Name: At_Drought_Reproduction_P Parameter: Tissue Value: Siliques
  misc_feature: MA Experiment 20001906 PARAMETER Experiment Name: At_Drought_Reproduction_P Parameter: Treatment Value: Drought vs. No Drought
  misc_feature: MA Experiment ID: 20001908 Result: Up-regulated in Transcription
  misc_feature: MA Experiment 20001908 PARAMETER Experiment Name: At_Drought_Reproduction_P Parameter: Age (day) Value: 40
  misc_feature: MA Experiment 20001908 PARAMETER Experiment Name: At_Drought_Reproduction_P Parameter: Organism Value: A. thaliana
  misc_feature: MA Experiment 20001908 PARAMETER Experiment Name: At_Drought_Reproduction_P Parameter: Plant Line Value: WS
  misc_feature: MA Experiment 20001908 PARAMETER Experiment Name: At_Drought_Reproduction_P Parameter: Timepoint (day) Value: 10
  misc_feature: MA Experiment 20001908 PARAMETER Experiment Name: At_Drought_Reproduction_P Parameter: Tissue Value: Siliques
  misc_feature: MA Experiment 20001908 PARAMETER Experiment Name: At_Drought_Reproduction_P Parameter: Treatment Value: Drought vs. No Drought
  misc_feature: MA Experiment ID: 20001911 Result: Up-regulated in Transcription
  misc_feature: MA Experiment 20001911 PARAMETER Experiment Name: At_Drought_Reproduction_P Parameter: Age (day) Value: 40
  misc_feature: MA Experiment 20001911 PARAMETER Experiment Name: At_Drought_Reproduction_P Parameter: Organism Value: A. thaliana
  misc_feature: MA Experiment 20001911 PARAMETER Experiment Name: At_Drought_Reproduction_P Parameter: Plant Line Value: WS
  misc_feature: MA Experiment 20001911 PARAMETER Experiment Name: At_Drought_Reproduction_P Parameter: Timepoint (day) Value: 10
  misc_feature: MA Experiment 20001911 PARAMETER Experiment Name: At_Drought_Reproduction_P Parameter: Tissue Value: Flowers
  misc_feature: MA Experiment 20001911 PARAMETER Experiment Name: At_Drought_Reproduction_P Parameter: Treatment Value: Drought vs. No Drought
attcattatataggcgtatatttcggaattctaagttttgttgctacgatcgagccagcgttctgtttctgtacgtctctctgggtaaagaaaaaatgaaggacgaaacgggaaaccctctgcatatcaagtctttgaatcacatctctcttctctgtcgatccgtggaggaatccattagcttttaccaaaacgttttagggttcctccctattcgcagacctgactcttttgatttcgatggcgcgtggttgtttggacatggaattgggattcatcttcttcaatctcctgaacctgagaaattactcaagaaaacagagattaatcccaaggataatcacatttctttccagtgcgaaagcatggaagcagtggagaagaagctcaaggagatggagatagagtatgtgagagcagtggttgaagaaggtggcatccaagtggaccaactcttcttccacgaccctgatgccttcatgatcgagatatgcaactgcgatagcctccccgttatccctctcgctggagaaatggctcgttcatgctctcgacttaatatccgccagctcgttcagccaactcagatccacccctagttctctctgtcttccctaatttctgttttcgtaaataatttcaagtgtccatgtgattgtctctttgattgcgtgtgaatataattgcatgtaataagacagctagtggtaagttgatgtgattcctcaaccgggaaaatgaccatttgcttcacactctagtctctctctaccattacttgagataccaaactctctctc

SEQ ID NO: 35081 - protein, 198 aa, Arabidopsis thaliana
  peptide (1)..(198): Ceres Seq. ID no. 12344998
  misc_feature (45)..(163): Homolog of NCBI NO: 15616434 NR Description: BH3872~unknown conserved protein in others
  misc_feature (27)..(174): Homolog of NCBI NO: 21740426 NR Description: OSJNBa0091D06.24 [Oryza sativa (japonica
  misc_feature (42)..(180): Homolog of NCBI NO: 34899038 NR Description: hypothetical protein~similar to Arabidopsis
  misc_feature (42)..(180): Homolog of NCBI NO: 34395261 NR Description: glyoxalase family-like protein
  misc_feature (29)..(173): Homolog of NCBI NO: 18401734 NR Description: expressed protein
  misc_feature (29)..(173): Homolog of NCBI NO: 15529260 NR Description: At2g28420/T1B3.6 [Arabidopsis thaliana]
  misc_feature (37)..(181): Homolog of NCBI NO: 34910246 NR Description: OSJNBa0089K24.9 [Oryza sativa (japonica
  misc_feature (32)..(197): Homolog of NCBI NO: 18394235 NR Description: expressed protein
  misc_feature (32)..(198): Homolog of NCBI NO: 18412683 NR Description: expressed protein
  misc_feature (1)..(198): Homolog of NCBI NO: 25406639 NR Description: hypothetical protein F18B13.24 [imported] -
SLYRRIFRNSKFCCYDRASVLFLYVSLGKEKMKDETGNPLHIKSLNHISLLCRSVEESISFYQNVLGFLPIRRPDSFDFDGAWLFGHGIGIHLLQSPEPEKLLKKTEINPKDNHISFQCESMEAVEKKLKEMEIEYVRAVVEEGGIQVDQLFFHDPDAFMIEICNCDSLPVIPLAGEMARSCSRLNIRQLVQPTQIHP

SEQ ID NO: 35082 - protein, 167 aa, Arabidopsis thaliana
  peptide (1)..(167): Ceres Seq. ID no. 12344999
  misc_feature (14)..(132): Homolog of NCBI NO: 15616434 NR Description: BH3872~unknown conserved protein in others
  misc_feature (1)..(143): Homolog of NCBI NO: 21740426 NR Description: OSJNBa0091D06.24 [Oryza sativa (japonica
  misc_feature (11)..(149): Homolog of NCBI NO: 34899038 NR Description: hypothetical protein~similar to Arabidopsis
  misc_feature (11)..(149): Homolog of NCBI NO: 34395261 NR Description: glyoxalase family-like protein
  misc_feature (1)..(142): Homolog of NCBI NO: 18401734 NR Description: expressed protein
  misc_feature (1)..(142): Homolog of NCBI NO: 15529260 NR Description: At2g28420/T1B3.6 [Arabidopsis thaliana]
  misc_feature (6)..(150): Homolog of NCBI NO: 34910246 NR Description: OSJNBa0089K24.9 [Oryza sativa (japonica
  misc_feature (1)..(166): Homolog of NCBI NO: 18394235 NR Description: expressed protein
  misc_feature (1)..(167): Homolog of NCBI NO: 18412683 NR Description: expressed protein
  misc_feature (1)..(167): Homolog of NCBI NO: 25406639 NR Description: hypothetical protein F18B13.24 [imported] -
MKDETGNPLHIKSLNHISLLCRSVEESISFYQNVLGFLPIRRPDSFDFDGAWLFGHGIGIHLLQSPEPEKLLKKTEINPKDNHISFQCESMEAVEKKLKEMEIEYVRAVVEEGGIQVDQLFFHDPDAFMIEICNCDSLPVIPLAGEMARSCSRLNIRQLVQPTQIHP

SEQ ID NO: 35083 - DNA, 1324 bp, Arabidopsis thaliana
  misc_feature (1)..(1324): Ceres Seq. ID no. 13645934
  misc_feature: MA Experiment ID: 108435 Result: Down-regulated in Transcription
  misc_feature: MA Experiment 108435 PARAMETER Experiment Name: At_stm_Mutants_cDNA_P Parameter: Plant Line Value: wt Landsburg vs stm
  misc_feature: MA Experiment 108435 PARAMETER Experiment Name: At_stm_Mutants_cDNA_P Parameter: Tissue Value: Shoot Apical Meristem Region
  misc_feature: MA Experiment ID: 108461 Result: Up-regulated in Transcription
  misc_feature: MA Experiment 108461 PARAMETER Experiment Name: At_Germinating_Seeds_cDNA_P Parameter: Age (day) Value: 1 vs. 0
  misc_feature: MA Experiment 108461 PARAMETER Experiment Name: At_Germinating_Seeds_cDNA_P Parameter: Tissue Value: Germinating Seeds
  misc_feature: MA Experiment ID: 108464 Result: Up-regulated in Transcription
  misc_feature: MA Experiment 108464 PARAMETER Experiment Name: At_Germinating_Seeds_cDNA_P Parameter: Age (day) Value: 4 vs. 0
  misc_feature: MA Experiment 108464 PARAMETER Experiment Name: At_Germinating_Seeds_cDNA_P Parameter: Tissue Value: Germinating Seeds
  misc_feature: MA Experiment ID: 108474 Result: Up-regulated in Transcription
  misc_feature: MA Experiment 108474 PARAMETER Experiment Name: At_Drought_Flowers_cDNA_P Parameter: Timepoint (hr) Value: null
  misc_feature: MA Experiment 108474 PARAMETER Experiment Name: At_Drought_Flowers_cDNA_P Parameter: Treatment Value: Drought vs. No Drought
  misc_feature: MA Experiment ID: 108605 Result: Down-regulated in Transcription
  misc_feature: MA Experiment 108605 PARAMETER Experiment Name: At_100uM_ABA_cDNA_P Parameter: Timepoint (hr) Value: 6
  misc_feature: MA Experiment 108605 PARAMETER Experiment Name: At_100uM_ABA_cDNA_P Parameter: Tissue Value: Aerial
  misc_feature: MA Experiment 108605 PARAMETER Experiment Name: At_100uM_ABA_cDNA_P Parameter: Treatment Value: 100uM ABA vs. No Treatment
  misc_feature: MA Experiment ID: 20000069 Result: Down-regulated in Transcription
  misc_feature: MA Experiment 20000069 PARAMETER Experiment Name: At_100uM_ABA_Mutants_cDNA_P Parameter: Plant Line Value: CS23
  misc_feature: MA Experiment 20000069 PARAMETER Experiment Name: At_100uM_ABA_Mutants_cDNA_P Parameter: Timepoint (hr) Value: 6
  misc_feature: MA Experiment 20000069 PARAMETER Experiment Name: At_100uM_ABA_Mutants_cDNA_P Parameter: Tissue Value: Aerial
  misc_feature: MA Experiment 20000069 PARAMETER Experiment Name: At_100uM_ABA_Mutants_cDNA_P Parameter: Treatment Value: 100uM ABA vs. No Treatment
  misc_feature: MA Experiment ID: 20000070 Result: Down-regulated in Transcription
  misc_feature: MA Experiment 20000070 PARAMETER Experiment Name: At_100uM_ABA_Mutants_cDNA_P Parameter: Plant Line Value: CS24
  misc_feature: MA Experiment 20000070 PARAMETER Experiment Name: At_100uM_ABA_Mutants_cDNA_P Parameter: Timepoint (hr) Value: 6
  misc_feature: MA Experiment 20000070 PARAMETER Experiment Name: At_100uM_ABA_Mutants_cDNA_P Parameter: Tissue Value: Aerial
  misc_feature: MA Experiment 20000070 PARAMETER Experiment Name: At_100uM_ABA_Mutants_cDNA_P Parameter: Treatment Value: 100uM ABA vs. No Treatment
  misc_feature: MA Experiment ID: 20000072 Result: Down-regulated in Transcription
  misc_feature: MA Experiment 20000072 PARAMETER Experiment Name: At_100uM_ABA_Mutants_cDNA_P Parameter: Plant Line Value: CS8105
  misc_feature: MA Experiment 20000072 PARAMETER Experiment Name: At_100uM_ABA_Mutants_cDNA_P Parameter: Timepoint (hr) Value: 6
  misc_feature: MA Experiment 20000072 PARAMETER Experiment Name: At_100uM_ABA_Mutants_cDNA_P Parameter: Tissue Value: Aerial
  misc_feature: MA Experiment 20000072 PARAMETER Experiment Name: At_100uM_ABA_Mutants_cDNA_P Parameter: Treatment Value: 100uM ABA vs. No Treatment
  misc_feature: MA Experiment ID: 20000087 Result: Down-regulated in Transcription
  misc_feature: MA Experiment 20000087 PARAMETER Experiment Name: At_100uM_ABA_Mutants_cDNA_P Parameter: Plant Line Value: WS
  misc_feature: MA Experiment 20000087 PARAMETER Experiment Name: At_100uM_ABA_Mutants_cDNA_P Parameter: Timepoint (hr) Value: 6
  misc_feature: MA Experiment 20000087 PARAMETER Experiment Name: At_100uM_ABA_Mutants_cDNA_P Parameter: Tissue Value: Aerial
  misc_feature: MA Experiment 20000087 PARAMETER Experiment Name: At_100uM_ABA_Mutants_cDNA_P Parameter: Treatment Value: 100uM ABA vs. No Treatment
  misc_feature: MA Experiment ID: 20000088 Result: Down-regulated in Transcription
  misc_feature: MA Experiment 20000088 PARAMETER Experiment Name: At_100uM_ABA_Mutants_cDNA_P Parameter: Plant Line Value: Landsberg
  misc_feature: MA Experiment 20000088 PARAMETER Experiment Name: At_100uM_ABA_Mutants_cDNA_P Parameter: Timepoint (hr) Value: 6
  misc_feature: MA Experiment 20000088 PARAMETER Experiment Name: At_100uM_ABA_Mutants_cDNA_P Parameter: Tissue Value: Aerial
  misc_feature: MA Experiment 20000088 PARAMETER Experiment Name: At_100uM_ABA_Mutants_cDNA_P Parameter: Treatment Value: 100uM ABA vs. No Treatment
  misc_feature: MA Experiment ID: 20000090 Result: Down-regulated in Transcription
  misc_feature: MA Experiment ID: 20000113 Result: Up-regulated in Transcription
  misc_feature: MA Experiment 20000113 PARAMETER Experiment Name: At_42deg_Heat_cDNA_P Parameter: Temperature (deg C) Value: 42 vs. 22
  misc_feature: MA Experiment 20000113 PARAMETER Experiment Name: At_42deg_Heat_cDNA_P Parameter: Timepoint (hr) Value: 8
  misc_feature: MA Experiment 20000113 PARAMETER Experiment Name: At_42deg_Heat_cDNA_P Parameter: Tissue Value: Aerial
  misc_feature: MA Experiment ID: 20000117 Result: Down-regulated in Transcription
  misc_feature: MA Experiment 20000117 PARAMETER Experiment Name: At_100uM_ABA_Mutants_cDNA_P Parameter: Plant Line Value: Columbia
  misc_feature: MA Experiment 20000117 PARAMETER Experiment Name: At_100uM_ABA_Mutants_cDNA_P Parameter: Timepoint (hr) Value: 6
  misc_feature: MA Experiment 20000117 PARAMETER Experiment Name: At_100uM_ABA_Mutants_cDNA_P Parameter: Tissue Value: Aerial
  misc_feature: MA Experiment 20000117 PARAMETER Experiment Name: At_100uM_ABA_Mutants_cDNA_P Parameter: Treatment Value: 100uM ABA vs. No Treatment
  misc_feature: MA Experiment ID: 20000184 Result: Up-regulated in Transcription
  misc_feature: MA Experiment 20000184 PARAMETER Experiment Name: At_Shoots__P Parameter: Age (day) Value: 7
  misc_feature: MA Experiment 20000184 PARAMETER Experiment Name: At_Shoots__P Parameter: Tissue Value: Shoots vs. Whole Plant
  misc_feature: MA Experiment ID: 20000185 Result: Down-regulated in Transcription
  misc_feature: MA Experiment 20000185 PARAMETER Experiment Name: At_Roots__P Parameter: Age (day) Value: 7 vs. 21
  misc_feature: MA Experiment 20000185 PARAMETER Experiment Name: At_Roots__P Parameter: Organism Value: A. thaliana
  misc_feature: MA Experiment 20000185 PARAMETER Experiment Name: At_Roots__P Parameter: Tissue Value: Roots vs. Whole Plant
  misc_feature: MA Experiment ID: 20000264 Result: Down-regulated in Transcription
  misc_feature: MA Experiment 20000264 PARAMETER Experiment Name: At_Open_Flower_P Parameter: Age (day) Value: 21
  misc_feature: MA Experiment 20000264 PARAMETER Experiment Name: At_Open_Flower_P Parameter: Plant Line Value: WS
  misc_feature: MA Experiment 20000264 PARAMETER Experiment Name: At_Open_Flower_P Parameter: Tissue Value: Open Flower vs. Whole Plant
  misc_feature: MA Experiment ID: 20000308 Result: Down-regulated in Transcription
  misc_feature: MA Experiment 20000308 PARAMETER Experiment Name: At_100mM_NaCl__P Parameter: Age (day) Value: 17
  misc_feature: MA Experiment 20000308 PARAMETER Experiment Name: At_100mM_NaCl__P Parameter: Organism Value: A. thaliana
  misc_feature: MA Experiment 20000308 PARAMETER Experiment Name: At_100mM_NaCl__P Parameter: Plant Line Value: WS
  misc_feature: MA Experiment 20000308 PARAMETER Experiment Name: At_100mM_NaCl__P Parameter: Timepoint (hr) Value: 72
  misc_feature: MA Experiment 20000308 PARAMETER Experiment Name: At_100mM_NaCl__P Parameter: Tissue Value: Whole Plant
  misc_feature: MA Experiment 20000308 PARAMETER Experiment Name: At_100mM_NaCl__P Parameter: Treatment Value: 100mM NaCl vs. No Treatment
  misc_feature: MA Experiment ID: 20000438 Result: Up-regulated in Transcription
  misc_feature: MA Experiment 20000438 PARAMETER Experiment Name: At_Shoots__P Parameter: Age (day) Value: 14
  misc_feature: MA Experiment 20000438 PARAMETER Experiment Name: At_Shoots__P Parameter: Tissue Value: Shoots vs. Whole Plant
  misc_feature: MA Experiment ID: 20000439 Result: Down-regulated in Transcription
  misc_feature: MA Experiment 20000439 PARAMETER Experiment Name: At_Roots__P Parameter: Age (day) Value: 14 vs. 21
  misc_feature: MA Experiment 20000439 PARAMETER Experiment Name: At_Roots__P Parameter: Organism Value: A. thaliana
  misc_feature: MA Experiment 20000439 PARAMETER Experiment Name: At_Roots__P Parameter: Tissue Value: Roots vs. Whole Plant
  misc_feature: MA Experiment ID: 20000460 Result: Down-regulated in Transcription
  misc_feature: MA Experiment 20000460 PARAMETER Experiment Name: At_10percent_PEG_P Parameter: Age (day) Value: 12
  misc_feature: MA Experiment 20000460 PARAMETER Experiment Name: At_10percent_PEG_P Parameter: Organism Value: A. thaliana
  misc_feature: MA Experiment 20000460 PARAMETER Experiment Name: At_10percent_PEG_P Parameter: Plant Line Value: WS
  misc_feature: MA Experiment 20000460 PARAMETER Experiment Name: At_10percent_PEG_P Parameter: Timepoint (day) Value: 12
  misc_feature: MA Experiment 20000460 PARAMETER Experiment Name: At_10percent_PEG_P Parameter: Tissue Value: Whole Plant
  misc_feature: MA Experiment 20000460 PARAMETER Experiment Name: At_10percent_PEG_P Parameter: Treatment Value: 10percent PEG vs. No Treatment
  misc_feature: MA Experiment ID: 20000794 Result: Down-regulated in Transcription
  misc_feature: MA Experiment 20000794 PARAMETER Experiment Name: At_Petals_P Parameter: Age (day) Value: 23-25 days
  misc_feature: MA Experiment 20000794 PARAMETER Experiment Name: At_Petals_P Parameter: Plant Line Value: WS
  misc_feature: MA Experiment 20000794 PARAMETER Experiment Name: At_Petals_P Parameter: Tissue Value: Petals vs. Whole plant
  misc_feature: MA Experiment ID: 20001450 Result: Down-regulated in Transcription
  misc_feature: MA Experiment 20001450 PARAMETER Experiment Name: At_Far-red-induction_P Parameter: Age (day) Value: 7
  misc_feature: MA Experiment 20001450 PARAMETER Experiment Name: At_Far-red-induction_P Parameter: Light Value: Far-red vs. White
  misc_feature: MA Experiment 20001450 PARAMETER Experiment Name: At_Far-red-induction_P Parameter: Organism Value: A. thaliana
  misc_feature: MA Experiment 20001450 PARAMETER Experiment Name: At_Far-red-induction_P Parameter: Plant Line Value: Columbia
  misc_feature: MA Experiment 20001450 PARAMETER Experiment Name: At_Far-red-induction_P Parameter: Timepoint (hr) Value: 8
  misc_feature: MA Experiment 20001450 PARAMETER Experiment Name: At_Far-red-induction_P Parameter: Tissue Value: Whole Plant
  misc_feature: MA Experiment ID: 20001451 Result: Down-regulated in Transcription
  misc_feature: MA Experiment 20001451 PARAMETER Experiment Name: At_Far-red-induction_P Parameter: Age (day) Value: 7
  misc_feature: MA Experiment 20001451 PARAMETER Experiment Name: At_Far-red-induction_P Parameter: Light Value: Far-red vs. White
  misc_feature: MA Experiment 20001451 PARAMETER Experiment Name: At_Far-red-induction_P Parameter: Organism Value: A. thaliana
  misc_feature: MA Experiment 20001451 PARAMETER Experiment Name: At_Far-red-induction_P Parameter: Plant Line Value: Columbia
  misc_feature: MA Experiment 20001451 PARAMETER Experiment Name: At_Far-red-induction_P Parameter: Timepoint (hr) Value: 24
  misc_feature: MA Experiment 20001451 PARAMETER Experiment Name: At_Far-red-induction_P Parameter: Tissue Value: Whole Plant
  misc_feature: MA Experiment ID: 20001555 Result: Down-regulated in Transcription
  misc_feature: MA Experiment 20001555 PARAMETER Experiment Name: At_Drought_Soil_Dry_P Parameter: Age (day) Value: 24
  misc_feature: MA Experiment 20001555 PARAMETER Experiment Name: At_Drought_Soil_Dry_P Parameter: Organism Value: A. thaliana
  misc_feature: MA Experiment 20001555 PARAMETER Experiment Name: At_Drought_Soil_Dry_P Parameter: Plant Line Value: WS
  misc_feature: MA Experiment 20001555 PARAMETER Experiment Name: At_Drought_Soil_Dry_P Parameter: Post Timepoint (hr) Value: None
  misc_feature: MA Experiment 20001555 PARAMETER Experiment Name: At_Drought_Soil_Dry_P Parameter: Post-Treatment Value: None
  misc_feature: MA Experiment 20001555 PARAMETER Experiment Name: At_Drought_Soil_Dry_P Parameter: Timepoint (day) Value: 10
  misc_feature: MA Experiment 20001555 PARAMETER Experiment Name: At_Drought_Soil_Dry_P Parameter: Treatment Value: Drought vs. No Drought
  misc_feature: MA Experiment ID: 20001557 Result: Down-regulated in Transcription
  misc_feature: MA Experiment 20001557 PARAMETER Experiment Name: At_Drought_Soil_Dry_P Parameter: Age (day) Value: 27
  misc_feature: MA Experiment 20001557 PARAMETER Experiment Name: At_Drought_Soil_Dry_P Parameter: Organism Value: A. thaliana
  misc_feature: MA Experiment 20001557 PARAMETER Experiment Name: At_Drought_Soil_Dry_P Parameter: Plant Line Value: WS
  misc_feature: MA Experiment 20001557 PARAMETER Experiment Name: At_Drought_Soil_Dry_P Parameter: Post Timepoint (hr) Value: 3
  misc_feature: MA Experiment 20001557 PARAMETER Experiment Name: At_Drought_Soil_Dry_P Parameter: Post-Treatment Value: Re-Water vs. No Drought
  misc_feature: MA Experiment 20001557 PARAMETER Experiment Name: At_Drought_Soil_Dry_P Parameter: Timepoint (day) Value: 13
  misc_feature: MA Experiment 20001557 PARAMETER Experiment Name: At_Drought_Soil_Dry_P Parameter: Treatment Value: Drought vs. No Drought
  misc_feature: MA Experiment ID: 20001559 Result: Down-regulated in Transcription
  misc_feature: MA Experiment 20001559 PARAMETER Experiment Name: At_Drought_Soil_Dry_P Parameter: Age (day) Value: 28
  misc_feature: MA Experiment 20001559 PARAMETER Experiment Name: At_Drought_Soil_Dry_P Parameter: Organism Value: A. thaliana
  misc_feature: MA Experiment 20001559 PARAMETER Experiment Name: At_Drought_Soil_Dry_P Parameter: Plant Line Value: WS
  misc_feature: MA Experiment 20001559 PARAMETER Experiment Name: At_Drought_Soil_Dry_P Parameter: Post Timepoint (hr) Value: 29
  misc_feature: MA Experiment 20001559 PARAMETER Experiment Name: At_Drought_Soil_Dry_P Parameter: Post-Treatment Value: Re-Water vs. No Drought
  misc_feature: MA Experiment 20001559 PARAMETER Experiment Name: At_Drought_Soil_Dry_P Parameter: Timepoint (day) Value: 14
  misc_feature: MA Experiment 20001559 PARAMETER Experiment Name: At_Drought_Soil_Dry_P Parameter: Treatment Value: Drought vs. No Drought
  misc_feature: MA Experiment ID: 20001560 Result: Down-regulated in Transcription
  misc_feature: MA Experiment 20001560 PARAMETER Experiment Name: At_Drought_Soil_Dry_P Parameter: Age (day) Value: 28
  misc_feature: MA Experiment 20001560 PARAMETER Experiment Name: At_Drought_Soil_Dry_P Parameter: Organism Value: A. thaliana
  misc_feature: MA Experiment 20001560 PARAMETER Experiment Name: At_Drought_Soil_Dry_P Parameter: Plant Line Value: WS
  misc_feature: MA Experiment 20001560 PARAMETER Experiment Name: At_Drought_Soil_Dry_P Parameter: Post Timepoint (hr) Value: None
  misc_feature: MA Experiment 20001560 PARAMETER Experiment Name: At_Drought_Soil_Dry_P Parameter: Post-Treatment Value: None
  misc_feature: MA Experiment 20001560 PARAMETER Experiment Name: At_Drought_Soil_Dry_P Parameter: Timepoint (day) Value: 14
  misc_feature: MA Experiment 20001560 PARAMETER Experiment Name: At_Drought_Soil_Dry_P Parameter: Treatment Value: Drought vs. No Drought
  misc_feature: MA Experiment ID: 20001757 Result: Up-regulated in Transcription
  misc_feature: MA Experiment 20001757 PARAMETER Experiment Name: At_50mM_NH4NO3_L-to-H_P Parameter: Timepoint (hr) Value: 6
  misc_feature: MA Experiment 20001757 PARAMETER Experiment Name: At_50mM_NH4NO3_L-to-H_P Parameter: Tissue Value: Leaf
  misc_feature: MA Experiment 20001757 PARAMETER Experiment Name: At_50mM_NH4NO3_L-to-H_P Parameter: Treatment Value: 50mM NH4NO3 vs 100mM Mannitol
  misc_feature: MA Experiment ID: 20001905 Result: Down-regulated in Transcription
  misc_feature: MA Experiment 20001905 PARAMETER Experiment Name: At_Drought_Reproduction_P Parameter: Age (day) Value: 40
  misc_feature: MA Experiment 20001905 PARAMETER Experiment Name: At_Drought_Reproduction_P Parameter: Organism Value: A. thaliana
  misc_feature: MA Experiment 20001905 PARAMETER Experiment Name: At_Drought_Reproduction_P Parameter: Plant Line Value: WS
  misc_feature: MA Experiment 20001905 PARAMETER Experiment Name: At_Drought_Reproduction_P Parameter: Timepoint (day) Value: 10
  misc_feature: MA Experiment 20001905 PARAMETER Experiment Name: At_Drought_Reproduction_P Parameter: Tissue Value: Rosettes
  misc_feature: MA Experiment 20001905 PARAMETER Experiment Name: At_Drought_Reproduction_P Parameter: Treatment Value: Drought vs. No Drought
  misc_feature: MA Experiment ID: 20001906 Result: Down-regulated in Transcription
  misc_feature: MA Experiment 20001906 PARAMETER Experiment Name: At_Drought_Reproduction_P Parameter: Age (day) Value: 35
  misc_feature: MA Experiment 20001906 PARAMETER Experiment Name: At_Drought_Reproduction_P Parameter: Organism Value: A. thaliana
  misc_feature: MA Experiment 20001906 PARAMETER Experiment Name: At_Drought_Reproduction_P Parameter: Plant Line Value: WS
  misc_feature: MA Experiment 20001906 PARAMETER Experiment Name: At_Drought_Reproduction_P Parameter: Timepoint (day) Value: 5
  misc_feature: MA Experiment 20001906 PARAMETER Experiment Name: At_Drought_Reproduction_P Parameter: Tissue Value: Siliques
  misc_feature: MA Experiment 20001906 PARAMETER Experiment Name: At_Drought_Reproduction_P Parameter: Treatment Value: Drought vs. No Drought
cattattcacttaagtatatagtagcttccataagagtcttagttctaactataaatacacatatctcactctctctgatctccgcttctcttcgccaacaaatgtcgaccgctcctctctccggcttctttctcacttcactttctccttctcaatcttctctccagaaactctctcttcgtacttcttccaccgtcgcttgcctcccacccgcctcttcttcttcctcatcttcctcctcctcgtcttcccgttccgttccaacgcttatccgtaacgagccagtttttgccgctcctgctcctatcattgccccttattggagtgaagagatgggaaccgaagcatacgacgaggctattgaagctctcaagaagcttctcatcgagaaggaagagctaaagacggttgcagcggcaaaggtggagcagatcacagcggctcttcagacaggtacttcatccgacaagaaagctttcgaccccgtcgaaaccattaagcagggcttcatcaaattcaagaaggagaaatacgaaaccaaccctgctttgtacggtgagctcgcaaagggtcaaagtcctaagtacatggtgtttgcttgttcagactcacgtgtgtgtccatcacacgttctggactttcagccaggagatgccttcgtggtccgtaacatagccaacatggttcctcctttcgacaaggtcaaatacggtggcgttggagcagccattgaatacgcggtcttgcaccttaaggtggagaacattgtggtgataggacacagtgcatgtggtgggatcaaagggcttatgtctttccccttagatggaaacaactccactgactttatagaggactgggtcaaaatctgtttaccagccaagtcaaaggttatatcagaacttggagattcagcctttgaagatcaatgtggccgatgtgaaagggaggcagtgaatgtttcactagcaaacctattgacatatccatttgtgagagaaggacttgtgaagggaacacttgctttgaagggaggctactatgacttcgtcaagggtgcttttgagctttggggacttgaatttggcctctccgaaactagctctgtatgaaccaatccatcatcatcatcatcatcatgaccatccatcatcatcatcattattatcatcgtatataatatatatctaccccatatgtaatttgtaatgtgcctttgactgtgatgagttatctctccctctctaccaactttcttcatatatataaaacaaaaaggaaaagcagatgatatagaccaaaaaaaaaaaaaaaaaatatcga

SEQ ID NO: 35084 - protein, 370 aa, Arabidopsis thaliana
  peptide (1)..(370): Ceres Seq. ID no. 13645935
  misc_feature (35)..(370): Homolog of NCBI NO: 1168746 NR Description: CARBONIC ANHYDRASE (CARBONATE DEHYDRATASE)
  misc_feature (35)..(370): Homolog of NCBI NO: 1168738 NR Description: CARBONIC ANHYDRASE 1 (CARBONATE DEHYDRATASE 1)
  misc_feature (112)..(370): Homolog of NCBI NO: 438449 NR Description: carbonic anhydrase
  misc_feature (112)..(370): Homolog of NCBI NO: 30685030 NR Description: CARBONIC ANHYDRASE 2 [Arabidopsis thaliana]
  misc_feature (112)..(370): Homolog of NCBI NO: 21903379 NR Description: Carbonic anhydrase 2 (Carbonate dehydratase 2)
  misc_feature (35)..(370): Homolog of NCBI NO: 7436819 NR Description: carbonate dehydratase (EC 4.2.1.1) 1a - Populus
  misc_feature (35)..(370): Homolog of NCBI NO: 7436820 NR Description: carbonate dehydratase (EC 4.2.1.1) 1b - Populus
  misc_feature (112)..(370): Homolog of NCBI NO: 30678347 NR Description: carbonic anhydrase, chloroplast precursor
  misc_feature (35)..(370): Homolog of NCBI NO: 30678353 NR Description: carbonic anhydrase, chloroplast precursor
  misc_feature (35)..(370): Homolog of NCBI NO: 30678350 NR Description: carbonic anhydrase, chloroplast precursor
HYSLKYIVASIRVLVLTINTHISLSLISASLRQQMSTAPLSGFFLTSLSPSQSSLQKLSLRTSSTVACLPPASSSSSSSSSSSSRSVPTLIRNEPVFAAPAPIIAPYWSEEMGTEAYDEAIEALKKLLIEKEELKTVAAAKVEQITAALQTGTSSDKKAFDPVETIKQGFIKFKKEKYETNPALYGELAKGQSPKYMVFACSDSRVCPSHVLDFQPGDAFVVRNIANMVPPFDKVKYGGVGAAIEYAVLHLKVENIVVIGHSACGGIKGLMSFPLDGNNSTDFIEDWVKICLPAKSKVISELGDSAFEDQCGRCEREAVNVSLANLLTYPFVREGLVKGTLALKGGYYDFVKGAFELWGLEFGLSETSSV

SEQ ID NO: 35085 - protein, 336 aa, Arabidopsis thaliana
  peptide (1)..(336): Ceres Seq. ID no. 13645936
  misc_feature (1)..(336): Homolog of NCBI NO: 1168746 NR Description: CARBONIC ANHYDRASE (CARBONATE DEHYDRATASE)
  misc_feature (1)..(336): Homolog of NCBI NO: 1168738 NR Description: CARBONIC ANHYDRASE 1 (CARBONATE DEHYDRATASE 1)
  misc_feature (78)..(336): Homolog of NCBI NO: 438449 NR Description: carbonic anhydrase
  misc_feature (78)..(336): Homolog of NCBI NO: 30685030 NR Description: CARBONIC ANHYDRASE 2 [Arabidopsis thaliana]
  misc_feature (78)..(336): Homolog of NCBI NO: 21903379 NR Description: Carbonic anhydrase 2 (Carbonate dehydratase 2)
  misc_feature (1)..(336): Homolog of NCBI NO: 7436819 NR Description: carbonate dehydratase (EC 4.2.1.1) 1a - Populus
  misc_feature (1)..(336): Homolog of NCBI NO: 7436820 NR Description: carbonate dehydratase (EC 4.2.1.1) 1b - Populus
  misc_feature (78)..(336): Homolog of NCBI NO: 30678347 NR Description: carbonic anhydrase, chloroplast precursor
  misc_feature (1)..(336): Homolog of NCBI NO: 30678353 NR Description: carbonic anhydrase, chloroplast precursor
  misc_feature (1)..(336): Homolog of NCBI NO: 30678350 NR Description: carbonic anhydrase, chloroplast precursor
MSTAPLSGFFLTSLSPSQSSLQKLSLRTSSTVACLPPASSSSSSSSSSSSRSVPTLIRNEPVFAAPAPIIAPYWSEEMGTEAYDEAIEALKKLLIEKEELKTVAAAKVEQITAALQTGTSSDKKAFDPVETIKQGFIKFKKEKYETNPALYGELAKGQSPKYMVFACSDSRVCPSHVLDFQPGDAFVVRNIANMVPPFDKVKYGGVGAAIEYAVLHLKVENIVVIGHSACGGIKGLMSFPLDGNNSTDFIEDWVKICLPAKSKVISELGDSAFEDQCGRCEREAVNVSLANLLTYPFVREGLVKGTLALKGGYYDFVKGAFELWGLEFGLSETSSV

SEQ ID NO: 35086 - protein, 259 aa, Arabidopsis thaliana
  peptide (1)..(259): Ceres Seq. ID no. 13645937
  misc_feature (1)..(259): Homolog of NCBI NO: 1168746 NR Description: CARBONIC ANHYDRASE (CARBONATE DEHYDRATASE)
  misc_feature (1)..(259): Homolog of NCBI NO: 1168738 NR Description: CARBONIC ANHYDRASE 1 (CARBONATE DEHYDRATASE 1)
  misc_feature (1)..(259): Homolog of NCBI NO: 438449 NR Description: carbonic anhydrase
  misc_feature (1)..(259): Homolog of NCBI NO: 30685030 NR Description: CARBONIC ANHYDRASE 2 [Arabidopsis thaliana]
  misc_feature (1)..(259): Homolog of NCBI NO: 21903379 NR Description: Carbonic anhydrase 2 (Carbonate dehydratase 2)
  misc_feature (1)..(259): Homolog of NCBI NO: 7436819 NR Description: carbonate dehydratase (EC 4.2.1.1) 1a - Populus
  misc_feature (1)..(259): Homolog of NCBI NO: 7436820 NR Description: carbonate dehydratase (EC 4.2.1.1) 1b - Populus
  misc_feature (1)..(259): Homolog of NCBI NO: 30678347 NR Description: carbonic anhydrase, chloroplast precursor
  misc_feature (1)..(259): Homolog of NCBI NO: 30678353 NR Description: carbonic anhydrase, chloroplast precursor
  misc_feature (1)..(259): Homolog of NCBI NO: 30678350 NR Description: carbonic anhydrase, chloroplast precursor
MGTEAYDEAIEALKKLLIEKEELKTVAAAKVEQITAALQTGTSSDKKAFDPVETIKQGFIKFKKEKYETNPALYGELAKGQSPKYMVFACSDSRVCPSHVLDFQPGDAFVVRNIANMVPPFDKVKYGGVGAAIEYAVLHLKVENIVVIGHSACGGIKGLMSFPLDGNNSTDFIEDWVKICLPAKSKVISELGDSAFEDQCGRCEREAVNVSLANLLTYPFVREGLVKGTLALKGGYYDFVKGAFELWGLEFGLSETSSV

SEQ ID NO: 35087 - DNA, 1202 bp, Arabidopsis thaliana
  misc_feature (1)..(1202): Ceres Seq. ID no. 12325085
  misc_feature: MA Experiment ID: 20000180 Result: Down-regulated in Transcription
  misc_feature: MA Experiment 20000180 PARAMETER Experiment Name: At_Germinating_Seeds_P Parameter: Age (hr) Value: 24 vs. 0
  misc_feature: MA Experiment 20000180 PARAMETER Experiment Name: At_Germinating_Seeds_P Parameter: Tissue Value: Germinating Seeds
  misc_feature: MA Experiment ID: 20000185 Result: Up-regulated in Transcription
  misc_feature: MA Experiment 20000185 PARAMETER Experiment Name: At_Roots__P Parameter: Age (day) Value: 7 vs. 21
  misc_feature: MA Experiment 20000185 PARAMETER Experiment Name: At_Roots__P Parameter: Organism Value: A. thaliana
  misc_feature: MA Experiment 20000185 PARAMETER Experiment Name: At_Roots__P Parameter: Tissue Value: Roots vs. Whole Plant
  misc_feature: MA Experiment ID: 20000234 Result: Up-regulated in Transcription
  misc_feature: MA Experiment 20000234 PARAMETER Experiment Name: At_Siliques_P Parameter: Age (day) Value: 21
  misc_feature: MA Experiment 20000234 PARAMETER Experiment Name: At_Siliques_P Parameter: Organism Value: A. thaliana
  misc_feature: MA Experiment 20000234 PARAMETER Experiment Name: At_Siliques_P Parameter: Plant Line Value: WS
  misc_feature: MA Experiment 20000234 PARAMETER Experiment Name: At_Siliques_P Parameter: Tissue Value: Less Than 5mm Siliques vs. Whole Plant
  misc_feature: MA Experiment ID: 20000235 Result: Up-regulated in Transcription
  misc_feature: MA Experiment 20000235 PARAMETER Experiment Name: At_Siliques_P Parameter: Age (day) Value: 21
  misc_feature: MA Experiment 20000235 PARAMETER Experiment Name: At_Siliques_P Parameter: Organism Value: A. thaliana
  misc_feature: MA Experiment 20000235 PARAMETER Experiment Name: At_Siliques_P Parameter: Plant Line Value: WS
  misc_feature: MA Experiment 20000235 PARAMETER Experiment Name: At_Siliques_P Parameter: Tissue Value: 5-10mm Siliques vs. Whole Plant
  misc_feature: MA Experiment ID: 20000264 Result: Up-regulated in Transcription
  misc_feature: MA Experiment 20000264 PARAMETER Experiment Name: At_Open_Flower_P Parameter: Age (day) Value: 21
  misc_feature: MA Experiment 20000264 PARAMETER Experiment Name: At_Open_Flower_P Parameter: Plant Line Value: WS
  misc_feature: MA Experiment 20000264 PARAMETER Experiment Name: At_Open_Flower_P Parameter: Tissue Value: Open Flower vs. Whole Plant
  misc_feature: MA Experiment ID: 20000265 Result: Up-regulated in Transcription
  misc_feature: MA Experiment 20000265 PARAMETER Experiment Name: At_Open_Flower_P Parameter: Age (day) Value: 21
  misc_feature: MA Experiment 20000265 PARAMETER Experiment Name: At_Open_Flower_P Parameter: Plant Line Value: WS
  misc_feature: MA Experiment 20000265 PARAMETER Experiment Name: At_Open_Flower_P Parameter: Tissue Value: Closed Flower vs. Whole Plant
  misc_feature: MA Experiment ID: 20000269 Result: Up-regulated in Transcription
  misc_feature: MA Experiment 20000269 PARAMETER Experiment Name: At_1mM_KNO3_L-vs-H_Roots_P Parameter: Age (day) Value: 7,10,12
  misc_feature: MA Experiment 20000269 PARAMETER Experiment Name: At_1mM_KNO3_L-vs-H_Roots_P Parameter: Organism Value: A. thaliana
  misc_feature: MA Experiment 20000269 PARAMETER Experiment Name: At_1mM_KNO3_L-vs-H_Roots_P Parameter: Plant Line Value: WS
  misc_feature: MA Experiment 20000269 PARAMETER Experiment Name: At_1mM_KNO3_L-vs-H_Roots_P Parameter: Timepoint (day) Value: 7,10,12
  misc_feature: MA Experiment 20000269 PARAMETER Experiment Name: At_1mM_KNO3_L-vs-H_Roots_P Parameter: Tissue Value: Roots
  misc_feature: MA Experiment 20000269 PARAMETER Experiment Name: At_1mM_KNO3_L-vs-H_Roots_P Parameter: Treatment Value: 1mM KNO3 vs. 50mM KNO3
  misc_feature: MA Experiment ID: 20000286 Result: Up-regulated in Transcription
  misc_feature: MA Experiment 20000286 PARAMETER Experiment Name: At_Open_Flower_P Parameter: Age (day) Value: 21
  misc_feature: MA Experiment 20000286 PARAMETER Experiment Name: At_Open_Flower_P Parameter: Plant Line Value: WS
  misc_feature: MA Experiment 20000286 PARAMETER Experiment Name: At_Open_Flower_P Parameter: Tissue Value: Half Open vs. Whole Plant
  misc_feature: MA Experiment ID: 20000438 Result: Up-regulated in Transcription
  misc_feature: MA Experiment 20000438 PARAMETER Experiment Name: At_Shoots__P Parameter: Age (day) Value: 14
  misc_feature: MA Experiment 20000438 PARAMETER Experiment Name: At_Shoots__P Parameter: Tissue Value: Shoots vs. Whole Plant
  misc_feature: MA Experiment ID: 20000453 Result: Down-regulated in Transcription
  misc_feature: MA Experiment 20000453 PARAMETER Experiment Name: At_100uM_ABA_P Parameter: Age (day) Value: 15
  misc_feature: MA Experiment 20000453 PARAMETER Experiment Name: At_100uM_ABA_P Parameter: Organism Value: A. thaliana
  misc_feature: MA Experiment 20000453 PARAMETER Experiment Name: At_100uM_ABA_P Parameter: Plant Line Value: WS
  misc_feature: MA Experiment 20000453 PARAMETER Experiment Name: At_100uM_ABA_P Parameter: Timepoint (hr) Value: 24
  misc_feature: MA Experiment 20000453 PARAMETER Experiment Name: At_100uM_ABA_P Parameter: Tissue Value: Aerial
  misc_feature: MA Experiment 20000453 PARAMETER Experiment Name: At_100uM_ABA_P Parameter: Treatment Value: 100uM ABA vs. No Treatment
  misc_feature: MA Experiment ID: 20001458 Result: Down-regulated in Transcription
  misc_feature: MA Experiment 20001458 PARAMETER Experiment Name: At_50mM_NH4NO3_L-to-H_P Parameter: Age (day) Value: Undefined
  misc_feature: MA Experiment 20001458 PARAMETER Experiment Name: At_50mM_NH4NO3_L-to-H_P Parameter: Organism Value: Undefined
  misc_feature: MA Experiment 20001458 PARAMETER Experiment Name: At_50mM_NH4NO3_L-to-H_P Parameter: Plant Line Value: Undefined
  misc_feature: MA Experiment 20001458 PARAMETER Experiment Name: At_50mM_NH4NO3_L-to-H_P Parameter: Timepoint (hr) Value: 2
  misc_feature: MA Experiment 20001458 PARAMETER Experiment Name: At_50mM_NH4NO3_L-to-H_P Parameter: Tissue Value: Siliques
  misc_feature: MA Experiment 20001458 PARAMETER Experiment Name: At_50mM_NH4NO3_L-to-H_P Parameter: Treatment Value: 50mM NH4NO3 vs. 100mM Manitol
  misc_feature: MA Experiment ID: 20001557 Result: Up-regulated in Transcription
  misc_feature: MA Experiment 20001557 PARAMETER Experiment Name: At_Drought_Soil_Dry_P Parameter: Age (day) Value: 27
  misc_feature: MA Experiment 20001557 PARAMETER Experiment Name: At_Drought_Soil_Dry_P Parameter: Organism Value: A. thaliana
  misc_feature: MA Experiment 20001557 PARAMETER Experiment Name: At_Drought_Soil_Dry_P Parameter: Plant Line Value: WS
  misc_feature: MA Experiment 20001557 PARAMETER Experiment Name: At_Drought_Soil_Dry_P Parameter: Post Timepoint (hr) Value: 3
  misc_feature: MA Experiment 20001557 PARAMETER Experiment Name: At_Drought_Soil_Dry_P Parameter: Post-Treatment Value: Re-Water vs. No Drought
  misc_feature: MA Experiment 20001557 PARAMETER Experiment Name: At_Drought_Soil_Dry_P Parameter: Timepoint (day) Value: 13
  misc_feature: MA Experiment 20001557 PARAMETER Experiment Name: At_Drought_Soil_Dry_P Parameter: Treatment Value: Drought vs. No Drought
  misc_feature: MA Experiment ID: 20001761 Result: Down-regulated in Transcription
  misc_feature: MA Experiment 20001761 PARAMETER Experiment Name: At_50mM_NH4NO3_L-to-H_P Parameter: Timepoint (hr) Value: 4
  misc_feature: MA Experiment 20001761 PARAMETER Experiment Name: At_50mM_NH4NO3_L-to-H_P Parameter: Tissue Value: Siliques
  misc_feature: MA Experiment 20001761 PARAMETER Experiment Name: At_50mM_NH4NO3_L-to-H_P Parameter: Treatment Value: 50mM NH4NO3 vs 100mM Mannitol
atcattctcggtttaactgtgaaacacataataaaacaaagagaaagagatataatatgggtgggtgggcaatcgcagtacacggtggtgccggtatcgaccctaatcttccggcagagagacaagaagaggcgaaacagcttttaactcgttgtctcaacctcggcataatagctttgcgttccaatgtttccgccattgacgtcgttgagctcgtcattagagaattggagacggatcctctgtttaattcaggccgtggatctgctttgacggagaaaggaacggttgagatggaagctagcattatggacggtacgaagagacgatgcggtgccgtttcggggataaccaccgtgaaaaatcctatatctcttgctcgtctcgtcatggacaaatctccccactcttaccttgctttctcaggtgcagaggatttcgcccgcaaacagggagttgaaattgtggacaacgagtactttgtcacggacgacaacgtaggaatgctcaagttggccaaggaagctaactccatcttgtttgattaccggattccgccgatgggatgtgccggcgcagctgcgaccgacagtccaatccaaatgaacggtcttccgatcagcatttacgcaccggagacagtcgggtgcgttgtggttgacgggaaaggacattgtgccgccgggacatccacgggtggtttaatgaacaagatgatgggaaggattggtgactcgccgctgataggagccgggacgtatgcgtcggagttttgtggtgtgtcgtgtaccggagaaggagaagccattataagagcaaccctagctcgtgatgtgtcagctgttatggagtataaaggacttaacctccaagaagcggttgattacgtcatcaagcatcgacttgacgaagggttcgctggactcattgctgtctcgaataaaggagaggtggtttgtggttttaactctaatgggatgttcaggggatgtgcaactgaggatggattcatggaggttgctatttgggagtgagaaatattttagattaagaaaatgtcttactagtatttaatcagtcatcgctctattaatttggttattcattatcataaagctggagtagtaaatttagttctgtcgttatcaccagtcctatattgatttgtgtttaatgcggtttcaaatggttagttcgtgttt

SEQ ID NO: 35088 - protein, 343 aa, Arabidopsis thaliana
  peptide (1)..(343): Ceres Seq. ID no. 12325086
  misc_feature (20)..(343): Pfam Name: Asparaginase Pfam Description: Asparaginase
  misc_feature (19)..(343): Homolog of NCBI NO: 18401029 NR Description: putative L-asparaginase
HSRFNCETHNKTKRKRYNMGGWAIAVHGGAGIDPNLPAERQEEAKQLLTRCLNLGIIALRSNVSAIDVVELVIRELETDPLFNSGRGSALTEKGTVEMEASIMDGTKRRCGAVSGITTVKNPISLARLVMDKSPHSYLAFSGAEDFARKQGVEIVDNEYFVTDDNVGMLKLAKEANSILFDYRIPPMGCAGAAATDSPIQMNGLPISIYAPETVGCVVVDGKGHCAAGTSTGGLMNKMMGRIGDSPLIGAGTYASEFCGVSCTGEGEAIIRATLARDVSAVMEYKGLNLQEAVDYVIKHRLDEGFAGLIAVSNKGEVVCGFNSNGMFRGCATEDGFMEVAIWE

SEQ ID NO: 35089 - protein, 325 aa, Arabidopsis thaliana
  peptide (1)..(325): Ceres Seq. ID no. 12325087
  misc_feature (2)..(325): Pfam Name: Asparaginase Pfam Description: Asparaginase
  misc_feature (1)..(325): Homolog of NCBI NO: 18401029 NR Description: putative L-asparaginase
MGGWAIAVHGGAGIDPNLPAERQEEAKQLLTRCLNLGIIALRSNVSAIDVVELVIRELETDPLFNSGRGSALTEKGTVEMEASIMDGTKRRCGAVSGITTVKNPISLARLVMDKSPHSYLAFSGAEDFARKQGVEIVDNEYFVTDDNVGMLKLAKEANSILFDYRIPPMGCAGAAATDSPIQMNGLPISIYAPETVGCVVVDGKGHCAAGTSTGGLMNKMMGRIGDSPLIGAGTYASEFCGVSCTGEGEAIIRATLARDVSAVMEYKGLNLQEAVDYVIKHRLDEGFAGLIAVSNKGEVVCGFNSNGMFRGCATEDGFMEVAIWE

SEQ ID NO: 35090 - protein, 246 aa, Arabidopsis thaliana
  peptide (1)..(246): Ceres Seq. ID no. 12325088
  misc_feature (1)..(246): Pfam Name: Asparaginase Pfam Description: Asparaginase
  misc_feature (1)..(246): Homolog of NCBI NO: 18401029 NR Description: putative L-asparaginase
MEASIMDGTKRRCGAVSGITTVKNPISLARLVMDKSPHSYLAFSGAEDFARKQGVEIVDNEYFVTDDNVGMLKLAKEANSILFDYRIPPMGCAGAAATDSPIQMNGLPISIYAPETVGCVVVDGKGHCAAGTSTGGLMNKMMGRIGDSPLIGAGTYASEFCGVSCTGEGEAIIRATLARDVSAVMEYKGLNLQEAVDYVIKHRLDEGFAGLIAVSNKGEVVCGFNSNGMFRGCATEDGFMEVAIWE

SEQ ID NO: 35091 - DNA, 1100 bp, Arabidopsis thaliana
  misc_feature (1)..(1100): Ceres Seq. ID no. 12327631
  misc_feature: MA Experiment ID: 108434 Result: Up-regulated in Transcription
  misc_feature: MA Experiment 108434 PARAMETER Experiment Name: At_Root_Tips_cDNA_P Parameter: Tissue Value: Root Tips
  misc_feature: MA Experiment ID: 108577 Result: Up-regulated in Transcription
  misc_feature: MA Experiment 108577 PARAMETER Experiment Name: At_42deg_Heat_cDNA_P Parameter: Temperature (deg C) Value: 42 vs. 22
  misc_feature: MA Experiment 108577 PARAMETER Experiment Name: At_42deg_Heat_cDNA_P Parameter: Timepoint (hr) Value: 6
  misc_feature: MA Experiment 108577 PARAMETER Experiment Name: At_42deg_Heat_cDNA_P Parameter: Tissue Value: Aerial
  misc_feature: MA Experiment ID: 108579 Result: Down-regulated in Transcription
  misc_feature: MA Experiment 108579 PARAMETER Experiment Name: At_4deg_Cold_cDNA_P Parameter: Temperature (deg C) Value: 4 vs. 22
  misc_feature: MA Experiment 108579 PARAMETER Experiment Name: At_4deg_Cold_cDNA_P Parameter: Timepoint (hr) Value: 6
  misc_feature: MA Experiment 108579 PARAMETER Experiment Name: At_4deg_Cold_cDNA_P Parameter: Tissue Value: Aerial
  misc_feature: MA Experiment ID: 20000224 Result: Down-regulated in Transcription
  misc_feature: MA Experiment ID: 20000437 Result: Up-regulated in Transcription
  misc_feature: MA Experiment 20000437 PARAMETER Experiment Name: At_Drought_P Parameter: Age (day) Value: 8
  misc_feature: MA Experiment 20000437 PARAMETER Experiment Name: At_Drought_P Parameter: Organism Value: A. thaliana
  misc_feature: MA Experiment 20000437 PARAMETER Experiment Name: At_Drought_P Parameter: Plant Line Value: WS
  misc_feature: MA Experiment 20000437 PARAMETER Experiment Name: At_Drought_P Parameter: Timepoint (hr) Value: 24
  misc_feature: MA Experiment 20000437 PARAMETER Experiment Name: At_Drought_P Parameter: Tissue Value: Whole Plant
  misc_feature: MA Experiment 20000437 PARAMETER Experiment Name: At_Drought_P Parameter: Treatment Value: Drought vs. No Drought
  misc_feature: MA Experiment ID: 20001905 Result: Down-regulated in Transcription
  misc_feature: MA Experiment 20001905 PARAMETER Experiment Name: At_Drought_Reproduction_P Parameter: Age (day) Value: 40
  misc_feature: MA Experiment 20001905 PARAMETER Experiment Name: At_Drought_Reproduction_P Parameter: Organism Value: A. thaliana
  misc_feature: MA Experiment 20001905 PARAMETER Experiment Name: At_Drought_Reproduction_P Parameter: Plant Line Value: WS
  misc_feature: MA Experiment 20001905 PARAMETER Experiment Name: At_Drought_Reproduction_P Parameter: Timepoint (day) Value: 10
  misc_feature: MA Experiment 20001905 PARAMETER Experiment Name: At_Drought_Reproduction_P Parameter: Tissue Value: Rosettes
  misc_feature: MA Experiment 20001905 PARAMETER Experiment Name: At_Drought_Reproduction_P Parameter: Treatment Value: Drought vs. No Drought
ataagaagggcttagggttcacttcagatctgtctttgaacattgctactctcaagtgatcaaattaactccgtcgcaggtgatgaggagatacagtccgccttattacagtcctccgaggagaggatacggtggtcgaggtagaagtcctcctcctcctcctcctcgacgtggatatggtggtggtggtggtggtggtggacgtagaggatctagccatggaagtctcttggttcgtaacattcctcttgattgcagaccagaagagcttcgtgagccctttgagaggtttggacctgtgagagatgtctatatccccagagactattactcagggcaaccgcgggggtttgcgtttgtggagtttgttgatgcatatgatgctggggaggctcaaagaagcatgaacaggagaagctttgctggaagagagataacggtggttgttgcttcagagtctaggaaaaggcctgaagagatgcgtgtgaagactaggactcgtagtagggaaccttcaggctccagggatcgttctcatggacggtctcgttcacgttcaatctctcgatcacgttctccacgtcgtccgtcagattctagaagcagataccgatcaaggtcttactctcctgcaccaagacgaagaggaggtcctcctcgtggggaagaagatgaaaattacagtcgtaggtcctactcccctggctatgaaggtgctgctgctgctgctccagatcgggacagaaatggagacaatgagattagagaaaaaccgggctatgaagcagaggatagacgtcgtggtggaagagcagtttcaaggtcgccatcaggatccaggtccaggtctgtggaggtatctccaagatgaaacttatgtgaagaagtggccgaccaaaactttgtgcaacgctttatgggttttgcatttctctagtagtgcgtctctgtgtctttaaaaactccttactctggcttgtcaaagatattttgtcttgtgatgtgatgttacttgaaatcggtttcggtttatgggtcttattataaaattgtatgaagaagattggttatgcttttgatgtgagacaggtttaaaaccc

SEQ ID NO: 35092 - protein, 262 aa, Arabidopsis thaliana
  peptide (1)..(262): Ceres Seq. ID no. 12327632
  misc_feature (49)..(120): Pfam Name: RNA recognition motif. (a.k.a. RRM, RBD, or RNP domain) Pfam Description: RNA recognition motif. (a.k.a. RRM, RBD, or RNP
  misc_feature (2)..(262): Homolog of NCBI NO: 9843661 NR Description: SC35-like splicing factor SCL30a, 30a kD
  misc_feature (2)..(212): Homolog of NCBI NO: 18405316 NR Description: arginine/serine-rich protein
  misc_feature (2)..(262): Homolog of NCBI NO: 15231285 NR Description: arginine/serine-rich splicing factor SCL30a
  misc_feature (2)..(256): Homolog of NCBI NO: 15293081 NR Description: unknown protein [Arabidopsis thaliana]
  misc_feature (2)..(262): Homolog of NCBI NO: 11358835 NR Description: serine/arginine-rich protein [imported] -
  misc_feature (1)..(140): Homolog of NCBI NO: 12002297 NR Description: unknown [Oryza sativa]
  misc_feature (42)..(261): Homolog of NCBI NO: 32352198 NR Description: pre-mRNA splicing factor [Oryza sativa (japonica
  misc_feature (1)..(262): Homolog of NCBI NO: 11358671 NR Description: probable RNA binding protein - Arabidopsis
  misc_feature (1)..(262): Homolog of NCBI NO: 9843657 NR Description: SC35-like splicing factor SCL30, 30 kD
  misc_feature (1)..(262): Homolog of NCBI NO: 18410283 NR Description: arginine/serine-rich protein SCL30
MRRYSPPYYSPPRRGYGGRGRSPPPPPPRRGYGGGGGGGGRRGSSHGSLLVRNIPLDCRPEELREPFERFGPVRDVYIPRDYYSGQPRGFAFVEFVDAYDAGEAQRSMNRRSFAGREITVVVASESRKRPEEMRVKTRTRSREPSGSRDRSHGRSRSRSISRSRSPRRPSDSRSRYRSRSYSPAPRRRGGPPRGEEDENYSRRSYSPGYEGAAAAAPDRDRNGDNEIREKPGYEAEDRRRGGRAVSRSPSGSRSRSVEVSPR

SEQ ID NO: 35093 - protein, 155 aa, Arabidopsis thaliana
  peptide (1)..(155): Ceres Seq. ID no. 12327633
  misc_feature (45)..(99): Pfam Name: Protamine P1 Pfam Description: Protamine P1
  misc_feature (1)..(155): Homolog of NCBI NO: 9843661 NR Description: SC35-like splicing factor SCL30a, 30a kD
  misc_feature (1)..(105): Homolog of NCBI NO: 18405316 NR Description: arginine/serine-rich protein
  misc_feature (1)..(155): Homolog of NCBI NO: 15231285 NR Description: arginine/serine-rich splicing factor SCL30a
  misc_feature (1)..(149): Homolog of NCBI NO: 15293081 NR Description: unknown protein [Arabidopsis thaliana]
  misc_feature (1)..(155): Homolog of NCBI NO: 11358835 NR Description: serine/arginine-rich protein [imported] -
  misc_feature (1)..(33): Homolog of NCBI NO: 12002297 NR Description: unknown [Oryza sativa]
  misc_feature (1)..(154): Homolog of NCBI NO: 32352198 NR Description: pre-mRNA splicing factor [Oryza sativa (japonica
  misc_feature (1)..(155): Homolog of NCBI NO: 11358671 NR Description: probable RNA binding protein - Arabidopsis
  misc_feature (1)..(155): Homolog of NCBI NO: 9843657 NR Description: SC35-like splicing factor SCL30, 30 kD
  misc_feature (1)..(155): Homolog of NCBI NO: 18410283 NR Description: arginine/serine-rich protein SCL30
MNRRSFAGREITVVVASESRKRPEEMRVKTRTRSREPSGSRDRSHGRSRSRSISRSRSPRRPSDSRSRYRSRSYSPAPRRRGGPPRGEEDENYSRRSYSPGYEGAAAAAPDRDRNGDNEIREKPGYEAEDRRRGGRAVSRSPSGSRSRSVEVSPR

SEQ ID NO: 35094 - protein, 140 aa, Arabidopsis thaliana
  peptide (1)..(140): Ceres Seq. ID no. 12327634
MDGLVHVQSLDHVLHVVRQILEADTDQGLTLLHQDEEEVLLVGKKMKITVVGPTPLAMKVLLLLLQIGTEMETMRLEKNRAMKQRIDVVVEEQFQGRHQDPGPGLWRYLQDETYVKKWPTKTLCNALWVLHFSSSASLCL

SEQ ID NO: 35095 - DNA, 1170 bp, Arabidopsis thaliana
  misc_feature (1)..(1170): Ceres Seq. ID no. 12335601
  misc_feature: MA Experiment ID: 108461 Result: Up-regulated in Transcription
  misc_feature: MA Experiment 108461 PARAMETER Experiment Name: At_Germinating_Seeds_cDNA_P Parameter: Age (day) Value: 1 vs. 0
  misc_feature: MA Experiment 108461 PARAMETER Experiment Name: At_Germinating_Seeds_cDNA_P Parameter: Tissue Value: Germinating Seeds
  misc_feature: MA Experiment ID: 108488 Result: Down-regulated in Transcription
  misc_feature: MA Experiment ID: 20000069 Result: Down-regulated in Transcription
  misc_feature: MA Experiment 20000069 PARAMETER Experiment Name: At_100uM_ABA_Mutants_cDNA_P Parameter: Plant Line Value: CS23
  misc_feature: MA Experiment 20000069 PARAMETER Experiment Name: At_100uM_ABA_Mutants_cDNA_P Parameter: Timepoint (hr) Value: 6
  misc_feature: MA Experiment 20000069 PARAMETER Experiment Name: At_100uM_ABA_Mutants_cDNA_P Parameter: Tissue Value: Aerial
  misc_feature: MA Experiment 20000069 PARAMETER Experiment Name: At_100uM_ABA_Mutants_cDNA_P Parameter: Treatment Value: 100uM ABA vs. No Treatment
  misc_feature: MA Experiment ID: 20000070 Result: Down-regulated in Transcription
  misc_feature: MA Experiment 20000070 PARAMETER Experiment Name: At_100uM_ABA_Mutants_cDNA_P Parameter: Plant Line Value: CS24
  misc_feature: MA Experiment 20000070 PARAMETER Experiment Name: At_100uM_ABA_Mutants_cDNA_P Parameter: Timepoint (hr) Value: 6
  misc_feature: MA Experiment 20000070 PARAMETER Experiment Name: At_100uM_ABA_Mutants_cDNA_P Parameter: Tissue Value: Aerial
  misc_feature: MA Experiment 20000070 PARAMETER Experiment Name: At_100uM_ABA_Mutants_cDNA_P Parameter: Treatment Value: 100uM ABA vs. No Treatment
  misc_feature: MA Experiment ID: 20000071 Result: Down-regulated in Transcription
  misc_feature: MA Experiment 20000071 PARAMETER Experiment Name: At_100uM_ABA_Mutants_cDNA_P Parameter: Plant Line Value: CS8104
  misc_feature: MA Experiment 20000071 PARAMETER Experiment Name: At_100uM_ABA_Mutants_cDNA_P Parameter: Timepoint (hr) Value: 6
  misc_feature: MA Experiment 20000071 PARAMETER Experiment Name: At_100uM_ABA_Mutants_cDNA_P Parameter: Tissue Value: Aerial
  misc_feature: MA Experiment 20000071 PARAMETER Experiment Name: At_100uM_ABA_Mutants_cDNA_P Parameter: Treatment Value: 100uM ABA vs. No Treatment
  misc_feature: MA Experiment ID: 20000086 Result: Down-regulated in Transcription
  misc_feature: MA Experiment 20000086 PARAMETER Experiment Name: At_100uM_ABA_Mutants_cDNA_P Parameter: Plant Line Value: CS22
  misc_feature: MA Experiment 20000086 PARAMETER Experiment Name: At_100uM_ABA_Mutants_cDNA_P Parameter: Timepoint (hr) Value: 6
  misc_feature: MA Experiment 20000086 PARAMETER Experiment Name: At_100uM_ABA_Mutants_cDNA_P Parameter: Tissue Value: Aerial
  misc_feature: MA Experiment 20000086 PARAMETER Experiment Name: At_100uM_ABA_Mutants_cDNA_P Parameter: Treatment Value: 100uM ABA vs. No Treatment
  misc_feature: MA Experiment ID: 20000088 Result: Down-regulated in Transcription
  misc_feature: MA Experiment 20000088 PARAMETER Experiment Name: At_100uM_ABA_Mutants_cDNA_P Parameter: Plant Line Value: Landsberg
  misc_feature: MA Experiment 20000088 PARAMETER Experiment Name: At_100uM_ABA_Mutants_cDNA_P Parameter: Timepoint (hr) Value: 6
  misc_feature: MA Experiment 20000088 PARAMETER Experiment Name: At_100uM_ABA_Mutants_cDNA_P Parameter: Tissue Value: Aerial
  misc_feature: MA Experiment 20000088 PARAMETER Experiment Name: At_100uM_ABA_Mutants_cDNA_P Parameter: Treatment Value: 100uM ABA vs. No Treatment
  misc_feature: MA Experiment ID: 20000090 Result: Down-regulated in Transcription
  misc_feature: MA Experiment ID: 20000117 Result: Down-regulated in Transcription
  misc_feature: MA Experiment 20000117 PARAMETER Experiment Name: At_100uM_ABA_Mutants_cDNA_P Parameter: Plant Line Value: Columbia
  misc_feature: MA Experiment 20000117 PARAMETER Experiment Name: At_100uM_ABA_Mutants_cDNA_P Parameter: Timepoint (hr) Value: 6
  misc_feature: MA Experiment 20000117 PARAMETER Experiment Name: At_100uM_ABA_Mutants_cDNA_P Parameter: Tissue Value: Aerial
  misc_feature: MA Experiment 20000117 PARAMETER Experiment Name: At_100uM_ABA_Mutants_cDNA_P Parameter: Treatment Value: 100uM ABA vs. No Treatment
  misc_feature: MA Experiment ID: 20000171 Result: Down-regulated in Transcription
  misc_feature: MA Experiment 20000171 PARAMETER Experiment Name: At_42deg_Heat_P Parameter: Age (day) Value: 14
  misc_feature: MA Experiment 20000171 PARAMETER Experiment Name: At_42deg_Heat_P Parameter: Organism Value: A. thaliana
  misc_feature: MA Experiment 20000171 PARAMETER Experiment Name: At_42deg_Heat_P Parameter: Plant Line Value: WS
  misc_feature: MA Experiment 20000171 PARAMETER Experiment Name: At_42deg_Heat_P Parameter: Temperature (deg C) Value: 42 vs. 22
  misc_feature: MA Experiment 20000171 PARAMETER Experiment Name: At_42deg_Heat_P Parameter: Timepoint (hr) Value: 1
  misc_feature: MA Experiment 20000171 PARAMETER Experiment Name: At_42deg_Heat_P Parameter: Tissue Value: Aerial
  misc_feature: MA Experiment ID: 20000179 Result: Up-regulated in Transcription
  misc_feature: MA Experiment 20000179 PARAMETER Experiment Name: At_Germinating_Seeds_P Parameter: Age (hr) Value: 6 vs. 0
  misc_feature: MA Experiment 20000179 PARAMETER Experiment Name: At_Germinating_Seeds_P Parameter: Tissue Value: Germinating Seeds
  misc_feature: MA Experiment ID: 20000180 Result: Up-regulated in Transcription
  misc_feature: MA Experiment 20000180 PARAMETER Experiment Name: At_Germinating_Seeds_P Parameter: Age (hr) Value: 24 vs. 0
  misc_feature: MA Experiment 20000180 PARAMETER Experiment Name: At_Germinating_Seeds_P Parameter: Tissue Value: Germinating Seeds
  misc_feature: MA Experiment ID: 20000185 Result: Up-regulated in Transcription
  misc_feature: MA Experiment 20000185 PARAMETER Experiment Name: At_Roots__P Parameter: Age (day) Value: 7 vs. 21
  misc_feature: MA Experiment 20000185 PARAMETER Experiment Name: At_Roots__P Parameter: Organism Value: A. thaliana
  misc_feature: MA Experiment 20000185 PARAMETER Experiment Name: At_Roots__P Parameter: Tissue Value: Roots vs. Whole Plant
  misc_feature: MA Experiment ID: 20000227 Result: Up-regulated in Transcription
  misc_feature: MA Experiment 20000227 PARAMETER Experiment Name: At_Root-Tips-vs-Tops_P Parameter: Tissue Value: Root Tips vs. Root Tops
  misc_feature: MA Experiment ID: 20000234 Result: Up-regulated in Transcription
  misc_feature: MA Experiment 20000234 PARAMETER Experiment Name: At_Siliques_P Parameter: Age (day) Value: 21
  misc_feature: MA Experiment 20000234 PARAMETER Experiment Name: At_Siliques_P Parameter: Organism Value: A. thaliana
  misc_feature: MA Experiment 20000234 PARAMETER Experiment Name: At_Siliques_P Parameter: Plant Line Value: WS
  misc_feature: MA Experiment 20000234 PARAMETER Experiment Name: At_Siliques_P Parameter: Tissue Value: Less Than 5mm Siliques vs. Whole Plant
  misc_feature: MA Experiment ID: 20000264 Result: Up-regulated in Transcription
  misc_feature: MA Experiment 20000264 PARAMETER Experiment Name: At_Open_Flower_P Parameter: Age (day) Value: 21
  misc_feature: MA Experiment 20000264 PARAMETER Experiment Name: At_Open_Flower_P Parameter: Plant Line Value: WS
  misc_feature: MA Experiment 20000264 PARAMETER Experiment Name: At_Open_Flower_P Parameter: Tissue Value: Open Flower vs. Whole Plant
  misc_feature: MA Experiment ID: 20000265 Result: Up-regulated in Transcription
  misc_feature: MA Experiment 20000265 PARAMETER Experiment Name: At_Open_Flower_P Parameter: Age (day) Value: 21
  misc_feature: MA Experiment 20000265 PARAMETER Experiment Name: At_Open_Flower_P Parameter: Plant Line Value: WS
  misc_feature: MA Experiment 20000265 PARAMETER Experiment Name: At_Open_Flower_P Parameter: Tissue Value: Closed Flower vs. Whole Plant
  misc_feature: MA Experiment ID: 20000437 Result: Down-regulated in Transcription
  misc_feature: MA Experiment 20000437 PARAMETER Experiment Name: At_Drought_P Parameter: Age (day) Value: 8
  misc_feature: MA Experiment 20000437 PARAMETER Experiment Name: At_Drought_P Parameter: Organism Value: A. thaliana
  misc_feature: MA Experiment 20000437 PARAMETER Experiment Name: At_Drought_P Parameter: Plant Line Value: WS
  misc_feature: MA Experiment 20000437 PARAMETER Experiment Name: At_Drought_P Parameter: Timepoint (hr) Value: 24
  misc_feature: MA Experiment 20000437 PARAMETER Experiment Name: At_Drought_P Parameter: Tissue Value: Whole Plant
  misc_feature: MA Experiment 20000437 PARAMETER Experiment Name: At_Drought_P Parameter: Treatment Value: Drought vs. No Drought
  misc_feature: MA Experiment ID: 20000439 Result: Up-regulated in Transcription
  misc_feature: MA Experiment 20000439 PARAMETER Experiment Name: At_Roots__P Parameter: Age (day) Value: 14 vs. 21
  misc_feature: MA Experiment 20000439 PARAMETER Experiment Name: At_Roots__P Parameter: Organism Value: A. thaliana
  misc_feature: MA Experiment 20000439 PARAMETER Experiment Name: At_Roots__P Parameter: Tissue Value: Roots vs. Whole Plant
  misc_feature: MA Experiment ID: 20000794 Result: Up-regulated in Transcription
  misc_feature: MA Experiment 20000794 PARAMETER Experiment Name: At_Petals_P Parameter: Age (day) Value: 23-25 days
  misc_feature: MA Experiment 20000794 PARAMETER Experiment Name: At_Petals_P Parameter: Plant Line Value: WS
  misc_feature: MA Experiment 20000794 PARAMETER Experiment Name: At_Petals_P Parameter: Tissue Value: Petals vs. Whole plant
  misc_feature: MA Experiment ID: 20001450 Result: Down-regulated in Transcription
  misc_feature: MA Experiment 20001450 PARAMETER Experiment Name: At_Far-red-induction_P Parameter: Age (day) Value: 7
  misc_feature: MA Experiment 20001450 PARAMETER Experiment Name: At_Far-red-induction_P Parameter: Light Value: Far-red vs. White
  misc_feature: MA Experiment 20001450 PARAMETER Experiment Name: At_Far-red-induction_P Parameter: Organism Value: A. thaliana
  misc_feature: MA Experiment 20001450 PARAMETER Experiment Name: At_Far-red-induction_P Parameter: Plant Line Value: Columbia
  misc_feature: MA Experiment 20001450 PARAMETER Experiment Name: At_Far-red-induction_P Parameter: Timepoint (hr) Value: 8
  misc_feature: MA Experiment 20001450 PARAMETER Experiment Name: At_Far-red-induction_P Parameter: Tissue Value: Whole Plant
  misc_feature: MA Experiment ID: 20001560 Result: Up-regulated in Transcription
  misc_feature: MA Experiment 20001560 PARAMETER Experiment Name: At_Drought_Soil_Dry_P Parameter: Age (day) Value: 28
  misc_feature: MA Experiment 20001560 PARAMETER Experiment Name: At_Drought_Soil_Dry_P Parameter: Organism Value: A. thaliana
  misc_feature: MA Experiment 20001560 PARAMETER Experiment Name: At_Drought_Soil_Dry_P Parameter: Plant Line Value: WS
  misc_feature: MA Experiment 20001560 PARAMETER Experiment Name: At_Drought_Soil_Dry_P Parameter: Post Timepoint (hr) Value: None
  misc_feature: MA Experiment 20001560 PARAMETER Experiment Name: At_Drought_Soil_Dry_P Parameter: Post-Treatment Value: None
  misc_feature: MA Experiment 20001560 PARAMETER Experiment Name: At_Drought_Soil_Dry_P Parameter: Timepoint (day) Value: 14
  misc_feature: MA Experiment 20001560 PARAMETER Experiment Name: At_Drought_Soil_Dry_P Parameter: Treatment Value: Drought vs. No Drought
  misc_feature: MA Experiment ID: 20001757 Result: Down-regulated in Transcription
  misc_feature: MA Experiment 20001757 PARAMETER Experiment Name: At_50mM_NH4NO3_L-to-H_P Parameter: Timepoint (hr) Value: 6
  misc_feature: MA Experiment 20001757 PARAMETER Experiment Name: At_50mM_NH4NO3_L-to-H_P Parameter: Tissue Value: Leaf
  misc_feature: MA Experiment 20001757 PARAMETER Experiment Name: At_50mM_NH4NO3_L-to-H_P Parameter: Treatment Value: 50mM NH4NO3 vs 100mM Mannitol
  misc_feature: MA Experiment ID: 20001905 Result: Up-regulated in Transcription
  misc_feature: MA Experiment 20001905 PARAMETER Experiment Name: At_Drought_Reproduction_P Parameter: Age (day) Value: 40
  misc_feature: MA Experiment 20001905 PARAMETER Experiment Name: At_Drought_Reproduction_P Parameter: Organism Value: A. thaliana
  misc_feature: MA Experiment 20001905 PARAMETER Experiment Name: At_Drought_Reproduction_P Parameter: Plant Line Value: WS
  misc_feature: MA Experiment 20001905 PARAMETER Experiment Name: At_Drought_Reproduction_P Parameter: Timepoint (day) Value: 10
  misc_feature: MA Experiment 20001905 PARAMETER Experiment Name: At_Drought_Reproduction_P Parameter: Tissue Value: Rosettes
  misc_feature: MA Experiment 20001905 PARAMETER Experiment Name: At_Drought_Reproduction_P Parameter: Treatment Value: Drought vs. No Drought
aagtaaagcagagagaagagcaagggagaggtactaaaaatggcggtgacggaggaggagaagaagcggaattcaacggttgagatctccggattacgtttcacgtatcctggaatcgacggtcatccaccaccgggatcgaaaccacttattgaagatttctcaatcacgcttaattccagcgatcggtgtctcctcgtcggatctaatggcgctgggaaaacgacgattctgaagatattgggagggaaacacatggtggagccgcatatggttagggttctgggtcgctcggcgtttcatgatactggattgacctcttctggtgatctctgttatctcggtggcgagtggaggcgtgatgttgcatttgcaggatttgaagttccgatacaaatggacatttcggcggagaagatgatatttggagtggctggtattgatcctcagagaagagatgagttgatcaaggtgttggatatcgacatctcatggagactgcacaaggtatccgatggccaaagaagacgtgtacagatctgtatgggactcctgaagccattcaaggttctccttttggatgaaataactgttgatcttgacgttctcgctagagcagaccttttgaagtttctgagaaaggaatgtgaagaacgaggagcaaccataatctacgctactcatatattcgatggcttagaggactggccaacacacattgtgtatgtagcaaacggaaaattgcagttagcattgccaatggagaaagtgaaggagacaagcaagaagtcattgatgagaacagttgagagttggctgaggaaagaaagagatgaagagagaaagagaaggaaagagaggaaagctaatgggcttccagagtttgaaacacggactgaagaaagccgtgtgactggtgatccagcacggatgctgaacaatggctgggctgccgggagacttcactctacggttgcaggtggtgaggataatttcgtcttaagctcaaacagagttctaagataaattaagcaagagagacgttggagcaaaagtggaatagtaatatttttacgttatttgtttttaaccacgaataatatttctttttctttttttgaactatttgttactctgaaatatgattttttataatttatattttagttg

SEQ ID NO: 35096 - protein, 328 aa, Arabidopsis thaliana
  peptide (1)..(328): Ceres Seq. ID no. 12335602
  misc_feature (48)..(233): Pfam Name: ABC transporter Pfam Description: ABC transporter
  misc_feature (38)..(235): Homolog of NCBI NO: 23483625 NR Description: NBD-like protein [Plasmodium yoelii yoelii]
  misc_feature (100)..(263): Homolog of NCBI NO: 40738662 NR Description: hypothetical protein AN6512.2 [Aspergillus
  misc_feature (34)..(249): Homolog of NCBI NO: 14318491 NR Description: CCR4 associated factor; Caf16p [Saccharomyces
  misc_feature (38)..(279): Homolog of NCBI NO: 32405648 NR Description: hypothetical protein [Neurospora crassa]
  misc_feature (45)..(276): Homolog of NCBI NO: 19115648 NR Description: probable ATP-dependent transporter
  misc_feature (1)..(272): Homolog of NCBI NO: 25406749 NR Description: hypothetical protein [imported] - Arabidopsis
  misc_feature (1)..(272): Homolog of NCBI NO: 18379174 NR Description: ABC transporter family protein; protein id:
  misc_feature (11)..(271): Homolog of NCBI NO: 21592901 NR Description: NBD-like protein [Arabidopsis thaliana]
  misc_feature (11)..(273): Homolog of NCBI NO: 15240093 NR Description: ABC transporter family protein
  misc_feature (1)..(328): Homolog of NCBI NO: 15241744 NR Description: ABC transporter family protein
MAVTEEEKKRNSTVEISGLRFTYPGIDGHPPPGSKPLIEDFSITLNSSDRCLLVGSNGAGKTTILKILGGKHMVEPHMVRVLGRSAFHDTGLTSSGDLCYLGGEWRRDVAFAGFEVPIQMDISAEKMIFGVAGIDPQRRDELIKVLDIDISWRLHKVSDGQRRRVQICMGLLKPFKVLLLDEITVDLDVLARADLLKFLRKECEERGATIIYATHIFDGLEDWPTHIVYVANGKLQLALPMEKVKETSKKSLMRTVESWLRKERDEERKRRKERKANGLPEFETRTEESRVTGDPARMLNNGWAAGRLHSTVAGGEDNFVLSSNRVLR

SEQ ID NO: 35097 - protein, 256 aa, Arabidopsis thaliana
  peptide (1)..(256): Ceres Seq. ID no. 12335603
  misc_feature (1)..(161): Pfam Name: ABC transporter Pfam Description: ABC transporter
  misc_feature (1)..(163): Homolog of NCBI NO: 23483625 NR Description: NBD-like protein [Plasmodium yoelii yoelii]
  misc_feature (28)..(191): Homolog of NCBI NO: 40738662 NR Description: hypothetical protein AN6512.2 [Aspergillus
  misc_feature (1)..(177): Homolog of NCBI NO: 14318491 NR Description: CCR4 associated factor; Caf16p [Saccharomyces
  misc_feature (1)..(207): Homolog of NCBI NO: 32405648 NR Description: hypothetical protein [Neurospora crassa]
  misc_feature (1)..(204): Homolog of NCBI NO: 19115648 NR Description: probable ATP-dependent transporter
  misc_feature (1)..(200): Homolog of NCBI NO: 25406749 NR Description: hypothetical protein [imported] - Arabidopsis
  misc_feature (1)..(200): Homolog of NCBI NO: 18379174 NR Description: ABC transporter family protein; protein id:
  misc_feature (1)..(199): Homolog of NCBI NO: 21592901 NR Description: NBD-like protein [Arabidopsis thaliana]
  misc_feature (1)..(201): Homolog of NCBI NO: 15240093 NR Description: ABC transporter family protein
  misc_feature (1)..(256): Homolog of NCBI NO: 15241744 NR Description: ABC transporter family protein
MVEPHMVRVLGRSAFHDTGLTSSGDLCYLGGEWRRDVAFAGFEVPIQMDISAEKMIFGVAGIDPQRRDELIKVLDIDISWRLHKVSDGQRRRVQICMGLLKPFKVLLLDEITVDLDVLARADLLKFLRKECEERGATIIYATHIFDGLEDWPTHIVYVANGKLQLALPMEKVKETSKKSLMRTVESWLRKERDEERKRRKERKANGLPEFETRTEESRVTGDPARMLNNGWAAGRLHSTVAGGEDNFVLSSNRVLR

SEQ ID NO: 35098 - protein, 251 aa, Arabidopsis thaliana
  peptide (1)..(251): Ceres Seq. ID no. 12335604
  misc_feature (1)..(156): Pfam Name: ABC transporter Pfam Description: ABC transporter
  misc_feature (1)..(158): Homolog of NCBI NO: 23483625 NR Description: NBD-like protein [Plasmodium yoelii yoelii]
  misc_feature (23)..(186): Homolog of NCBI NO: 40738662 NR Description: hypothetical protein AN6512.2 [Aspergillus
  misc_feature (1)..(172): Homolog of NCBI NO: 14318491 NR Description: CCR4 associated factor; Caf16p [Saccharomyces
  misc_feature (1)..(202): Homolog of NCBI NO: 32405648 NR Description: hypothetical protein [Neurospora crassa]
  misc_feature (1)..(199): Homolog of NCBI NO: 19115648 NR Description: probable ATP-dependent transporter
  misc_feature (1)..(195): Homolog of NCBI NO: 25406749 NR Description: hypothetical protein [imported] - Arabidopsis
  misc_feature (1)..(195): Homolog of NCBI NO: 18379174 NR Description: ABC transporter family protein; protein id:
  misc_feature (1)..(194): Homolog of NCBI NO: 21592901 NR Description: NBD-like protein [Arabidopsis thaliana]
  misc_feature (1)..(196): Homolog of NCBI NO: 15240093 NR Description: ABC transporter family protein
  misc_feature (1)..(251): Homolog of NCBI NO: 15241744 NR Description: ABC transporter family protein
MVRVLGRSAFHDTGLTSSGDLCYLGGEWRRDVAFAGFEVPIQMDISAEKMIFGVAGIDPQRRDELIKVLDIDISWRLHKVSDGQRRRVQICMGLLKPFKVLLLDEITVDLDVLARADLLKFLRKECEERGATIIYATHIFDGLEDWPTHIVYVANGKLQLALPMEKVKETSKKSLMRTVESWLRKERDEERKRRKERKANGLPEFETRTEESRVTGDPARMLNNGWAAGRLHSTVAGGEDNFVLSSNRVLR

SEQ ID NO: 35099 - DNA, 1353 bp, Arabidopsis thaliana
  misc_feature (1)..(1353): Ceres Seq. ID no. 13490251
  misc_feature: MA Experiment ID: 108435 Result: Down-regulated in Transcription
  misc_feature: MA Experiment 108435 PARAMETER Experiment Name: At_stm_Mutants_cDNA_P Parameter: Plant Line Value: wt Landsburg vs stm
  misc_feature: MA Experiment 108435 PARAMETER Experiment Name: At_stm_Mutants_cDNA_P Parameter: Tissue Value: Shoot Apical Meristem Region
  misc_feature: MA Experiment ID: 108461 Result: Down-regulated in Transcription
  misc_feature: MA Experiment 108461 PARAMETER Experiment Name: At_Germinating_Seeds_cDNA_P Parameter: Age (day) Value: 1 vs. 0
  misc_feature: MA Experiment 108461 PARAMETER Experiment Name: At_Germinating_Seeds_cDNA_P Parameter: Tissue Value: Germinating Seeds
  misc_feature: MA Experiment ID: 108462 Result: Down-regulated in Transcription
  misc_feature: MA Experiment 108462 PARAMETER Experiment Name: At_Germinating_Seeds_cDNA_P Parameter: Age (day) Value: 2 vs. 0
  misc_feature: MA Experiment 108462 PARAMETER Experiment Name: At_Germinating_Seeds_cDNA_P Parameter: Tissue Value: Germinating Seeds
  misc_feature: MA Experiment ID: 108463 Result: Down-regulated in Transcription
  misc_feature: MA Experiment 108463 PARAMETER Experiment Name: At_Germinating_Seeds_cDNA_P Parameter: Age (day) Value: 3 vs. 0
  misc_feature: MA Experiment 108463 PARAMETER Experiment Name: At_Germinating_Seeds_cDNA_P Parameter: Tissue Value: Germinating Seeds
  misc_feature: MA Experiment ID: 108464 Result: Down-regulated in Transcription
  misc_feature: MA Experiment 108464 PARAMETER Experiment Name: At_Germinating_Seeds_cDNA_P Parameter: Age (day) Value: 4 vs. 0
  misc_feature: MA Experiment 108464 PARAMETER Experiment Name: At_Germinating_Seeds_cDNA_P Parameter: Tissue Value: Germinating Seeds
  misc_feature: MA Experiment ID: 108668 Result: Up-regulated in Transcription
  misc_feature: MA Experiment 108668 PARAMETER Experiment Name: At_2mM_SA_cDNA_P Parameter: Plant Line Value: WS
  misc_feature: MA Experiment 108668 PARAMETER Experiment Name: At_2mM_SA_cDNA_P Parameter: Timepoint (hr) Value: 6
  misc_feature: MA Experiment 108668 PARAMETER Experiment Name: At_2mM_SA_cDNA_P Parameter: Treatment Value: 2mM SA vs. No Treatment
  misc_feature: MA Experiment ID: 20000068 Result: Down-regulated in Transcription
  misc_feature: MA Experiment ID: 20000111 Result: Down-regulated in Transcription
  misc_feature: MA Experiment 20000111 PARAMETER Experiment Name: At_42deg_Heat_cDNA_P Parameter: Temperature (deg C) Value: 42 vs. 22
  misc_feature: MA Experiment 20000111 PARAMETER Experiment Name: At_42deg_Heat_cDNA_P Parameter: Timepoint (hr) Value: 6
  misc_feature: MA Experiment 20000111 PARAMETER Experiment Name: At_42deg_Heat_cDNA_P Parameter: Tissue Value: Aerial
  misc_feature: MA Experiment ID: 20000180 Result: Down-regulated in Transcription
  misc_feature: MA Experiment 20000180 PARAMETER Experiment Name: At_Germinating_Seeds_P Parameter: Age (hr) Value: 24 vs. 0
  misc_feature: MA Experiment 20000180 PARAMETER Experiment Name: At_Germinating_Seeds_P Parameter: Tissue Value: Germinating Seeds
  misc_feature: MA Experiment ID: 20000182 Result: Up-regulated in Transcription
  misc_feature: MA Experiment 20000182 PARAMETER Experiment Name: At_2mM_SA_P Parameter: Age (day) Value: 14
  misc_feature: MA Experiment 20000182 PARAMETER Experiment Name: At_2mM_SA_P Parameter: Organism Value: A. thaliana
  misc_feature: MA Experiment 20000182 PARAMETER Experiment Name: At_2mM_SA_P Parameter: Plant Line Value: WS
  misc_feature: MA Experiment 20000182 PARAMETER Experiment Name: At_2mM_SA_P Parameter: Timepoint (hr) Value: 6
  misc_feature: MA Experiment 20000182 PARAMETER Experiment Name: At_2mM_SA_P Parameter: Tissue Value: Aerial
  misc_feature: MA Experiment 20000182 PARAMETER Experiment Name: At_2mM_SA_P Parameter: Treatment Value: 2mM SA vs. No Treatment
  misc_feature: MA Experiment ID: 20000185 Result: Up-regulated in Transcription
  misc_feature: MA Experiment 20000185 PARAMETER Experiment Name: At_Roots__P Parameter: Age (day) Value: 7 vs. 21
  misc_feature: MA Experiment 20000185 PARAMETER Experiment Name: At_Roots__P Parameter: Organism Value: A. thaliana
  misc_feature: MA Experiment 20000185 PARAMETER Experiment Name: At_Roots__P Parameter: Tissue Value: Roots vs. Whole Plant
  misc_feature: MA Experiment ID: 20000234 Result: Down-regulated in Transcription
  misc_feature: MA Experiment 20000234 PARAMETER Experiment Name: At_Siliques_P Parameter: Age (day) Value: 21
  misc_feature: MA Experiment 20000234 PARAMETER Experiment Name: At_Siliques_P Parameter: Organism Value: A. thaliana
  misc_feature: MA Experiment 20000234 PARAMETER Experiment Name: At_Siliques_P Parameter: Plant Line Value: WS
  misc_feature: MA Experiment 20000234 PARAMETER Experiment Name: At_Siliques_P Parameter: Tissue Value: Less Than 5mm Siliques vs. Whole Plant
  misc_feature: MA Experiment ID: 20000235 Result: Down-regulated in Transcription
  misc_feature: MA Experiment 20000235 PARAMETER Experiment Name: At_Siliques_P Parameter: Age (day) Value: 21
  misc_feature: MA Experiment 20000235 PARAMETER Experiment Name: At_Siliques_P Parameter: Organism Value: A. thaliana
  misc_feature: MA Experiment 20000235 PARAMETER Experiment Name: At_Siliques_P Parameter: Plant Line Value: WS
  misc_feature: MA Experiment 20000235 PARAMETER Experiment Name: At_Siliques_P Parameter: Tissue Value: 5-10mm Siliques vs. Whole Plant
  misc_feature: MA Experiment ID: 20000265 Result: Down-regulated in Transcription
  misc_feature: MA Experiment 20000265 PARAMETER Experiment Name: At_Open_Flower_P Parameter: Age (day) Value: 21
  misc_feature: MA Experiment 20000265 PARAMETER Experiment Name: At_Open_Flower_P Parameter: Plant Line Value: WS
  misc_feature: MA Experiment 20000265 PARAMETER Experiment Name: At_Open_Flower_P Parameter: Tissue Value: Closed Flower vs. Whole Plant
  misc_feature: MA Experiment ID: 20000437 Result: Down-regulated in Transcription
  misc_feature: MA Experiment 20000437 PARAMETER Experiment Name: At_Drought_P Parameter: Age (day) Value: 8
  misc_feature: MA Experiment 20000437 PARAMETER Experiment Name: At_Drought_P Parameter: Organism Value: A. thaliana
  misc_feature: MA Experiment 20000437 PARAMETER Experiment Name: At_Drought_P Parameter: Plant Line Value: WS
  misc_feature: MA Experiment 20000437 PARAMETER Experiment Name: At_Drought_P Parameter: Timepoint (hr) Value: 24
  misc_feature: MA Experiment 20000437 PARAMETER Experiment Name: At_Drought_P Parameter: Tissue Value: Whole Plant
  misc_feature: MA Experiment 20000437 PARAMETER Experiment Name: At_Drought_P Parameter: Treatment Value: Drought vs. No Drought
  misc_feature: MA Experiment ID: 20000495 Result: Down-regulated in Transcription
  misc_feature: MA Experiment 20000495 PARAMETER Experiment Name: At_Guard_Cells_P Parameter: Harvest Date Value: 8/2/2002
  misc_feature: MA Experiment 20000495 PARAMETER Experiment Name: At_Guard_Cells_P Parameter: Organism Value: A. thaliana
  misc_feature: MA Experiment 20000495 PARAMETER Experiment Name: At_Guard_Cells_P Parameter: Tissue Value: Guard Cells vs. Leaves
  misc_feature: MA Experiment ID: 20000527 Result: Down-regulated in Transcription
  misc_feature: MA Experiment 20000527 PARAMETER Experiment Name: At_10percent_PEG_P Parameter: Age (day) Value: 20
  misc_feature: MA Experiment 20000527 PARAMETER Experiment Name: At_10percent_PEG_P Parameter: Organism Value: A. thaliana
  misc_feature: MA Experiment 20000527 PARAMETER Experiment Name: At_10percent_PEG_P Parameter: Plant Line Value: WS
  misc_feature: MA Experiment 20000527 PARAMETER Experiment Name: At_10percent_PEG_P Parameter: Timepoint (day) Value: 20
  misc_feature: MA Experiment 20000527 PARAMETER Experiment Name: At_10percent_PEG_P Parameter: Tissue Value: Whole Plant
  misc_feature: MA Experiment 20000527 PARAMETER Experiment Name: At_10percent_PEG_P Parameter: Treatment Value: 10percent PEG vs. No Treatment
  misc_feature: MA Experiment ID: 20000794 Result: Up-regulated in Transcription
  misc_feature: MA Experiment 20000794 PARAMETER Experiment Name: At_Petals_P Parameter: Age (day) Value: 23-25 days
  misc_feature: MA Experiment 20000794 PARAMETER Experiment Name: At_Petals_P Parameter: Plant Line Value: WS
  misc_feature: MA Experiment 20000794 PARAMETER Experiment Name: At_Petals_P Parameter: Tissue Value: Petals vs. Whole plant
  misc_feature: MA Experiment ID: 20001247 Result: Up-regulated in Transcription
  misc_feature: MA Experiment 20001247 PARAMETER Experiment Name: At_Far-red-induction_P Parameter: Age (day) Value: 7
  misc_feature: MA Experiment 20001247 PARAMETER Experiment Name: At_Far-red-induction_P Parameter: Light Value: Far-red vs. White
  misc_feature: MA Experiment 20001247 PARAMETER Experiment Name: At_Far-red-induction_P Parameter: Organism Value: A. thaliana
  misc_feature: MA Experiment 20001247 PARAMETER Experiment Name: At_Far-red-induction_P Parameter: Plant Line Value: Columbia
  misc_feature: MA Experiment 20001247 PARAMETER Experiment Name: At_Far-red-induction_P Parameter: Timepoint (hr) Value: 1
  misc_feature: MA Experiment 20001247 PARAMETER Experiment Name: At_Far-red-induction_P Parameter: Tissue Value: Whole Plant
  misc_feature: MA Experiment ID: 20001248 Result: Down-regulated in Transcription
  misc_feature: MA Experiment 20001248 PARAMETER Experiment Name: At_Far-red-induction_P Parameter: Age (day) Value: 7
  misc_feature: MA Experiment 20001248 PARAMETER Experiment Name: At_Far-red-induction_P Parameter: Light Value: Far-red vs. White
  misc_feature: MA Experiment 20001248 PARAMETER Experiment Name: At_Far-red-induction_P Parameter: Organism Value: A. thaliana
  misc_feature: MA Experiment 20001248 PARAMETER Experiment Name: At_Far-red-induction_P Parameter: Plant Line Value: Columbia
  misc_feature: MA Experiment 20001248 PARAMETER Experiment Name: At_Far-red-induction_P Parameter: Timepoint (hr) Value: 4
  misc_feature: MA Experiment 20001248 PARAMETER Experiment Name: At_Far-red-induction_P Parameter: Tissue Value: Whole Plant
  misc_feature: MA Experiment ID: 20001555 Result: Down-regulated in Transcription
  misc_feature: MA Experiment 20001555 PARAMETER Experiment Name: At_Drought_Soil_Dry_P Parameter: Age (day) Value: 24
  misc_feature: MA Experiment 20001555 PARAMETER Experiment Name: At_Drought_Soil_Dry_P Parameter: Organism Value: A. thaliana
  misc_feature: MA Experiment 20001555 PARAMETER Experiment Name: At_Drought_Soil_Dry_P Parameter: Plant Line Value: WS
  misc_feature: MA Experiment 20001555 PARAMETER Experiment Name: At_Drought_Soil_Dry_P Parameter: Post Timepoint (hr) Value: None
  misc_feature: MA Experiment 20001555 PARAMETER Experiment Name: At_Drought_Soil_Dry_P Parameter: Post-Treatment Value: None
  misc_feature: MA Experiment 20001555 PARAMETER Experiment Name: At_Drought_Soil_Dry_P Parameter: Timepoint (day) Value: 10
  misc_feature: MA Experiment 20001555 PARAMETER Experiment Name: At_Drought_Soil_Dry_P Parameter: Treatment Value: Drought vs. No Drought
  misc_feature: MA Experiment ID: 20001556 Result: Down-regulated in Transcription
  misc_feature: MA Experiment 20001556 PARAMETER Experiment Name: At_Drought_Soil_Dry_P Parameter: Age (day) Value: 26
  misc_feature: MA Experiment 20001556 PARAMETER Experiment Name: At_Drought_Soil_Dry_P Parameter: Organism Value: A. thaliana
  misc_feature: MA Experiment 20001556 PARAMETER Experiment Name: At_Drought_Soil_Dry_P Parameter: Plant Line Value: WS
  misc_feature: MA Experiment 20001556 PARAMETER Experiment Name: At_Drought_Soil_Dry_P Parameter: Post Timepoint (hr) Value: None
  misc_feature: MA Experiment 20001556 PARAMETER Experiment Name: At_Drought_Soil_Dry_P Parameter: Post-Treatment Value: None
  misc_feature: MA Experiment 20001556 PARAMETER Experiment Name: At_Drought_Soil_Dry_P Parameter: Timepoint (day) Value: 12
  misc_feature: MA Experiment 20001556 PARAMETER Experiment Name: At_Drought_Soil_Dry_P Parameter: Treatment Value: Drought vs. No Drought
  misc_feature: MA Experiment ID: 20001557 Result: Down-regulated in Transcription
  misc_feature: MA Experiment 20001557 PARAMETER Experiment Name: At_Drought_Soil_Dry_P Parameter: Age (day) Value: 27
  misc_feature: MA Experiment 20001557 PARAMETER Experiment Name: At_Drought_Soil_Dry_P Parameter: Organism Value: A. thaliana
  misc_feature: MA Experiment 20001557 PARAMETER Experiment Name: At_Drought_Soil_Dry_P Parameter: Plant Line Value: WS
  misc_feature: MA Experiment 20001557 PARAMETER Experiment Name: At_Drought_Soil_Dry_P Parameter: Post Timepoint (hr) Value: 3
  misc_feature: MA Experiment 20001557 PARAMETER Experiment Name: At_Drought_Soil_Dry_P Parameter: Post-Treatment Value: Re-Water vs. No Drought
  misc_feature: MA Experiment 20001557 PARAMETER Experiment Name: At_Drought_Soil_Dry_P Parameter: Timepoint (day) Value: 13
  misc_feature: MA Experiment 20001557 PARAMETER Experiment Name: At_Drought_Soil_Dry_P Parameter: Treatment Value: Drought vs. No Drought
  misc_feature: MA Experiment ID: 20001558 Result: Down-regulated in Transcription
  misc_feature: MA Experiment 20001558 PARAMETER Experiment Name: At_Drought_Soil_Dry_P Parameter: Age (day) Value: 27
  misc_feature: MA Experiment 20001558 PARAMETER Experiment Name: At_Drought_Soil_Dry_P Parameter: Organism Value: A. thaliana
  misc_feature: MA Experiment 20001558 PARAMETER Experiment Name: At_Drought_Soil_Dry_P Parameter: Plant Line Value: WS
  misc_feature: MA Experiment 20001558 PARAMETER Experiment Name: At_Drought_Soil_Dry_P Parameter: Post Timepoint (hr) Value: 6
  misc_feature: MA Experiment 20001558 PARAMETER Experiment Name: At_Drought_Soil_Dry_P Parameter: Post-Treatment Value: Re-Water vs. No Drought
  misc_feature: MA Experiment 20001558 PARAMETER Experiment Name: At_Drought_Soil_Dry_P Parameter: Timepoint (day) Value: 13
  misc_feature: MA Experiment 20001558 PARAMETER Experiment Name: At_Drought_Soil_Dry_P Parameter: Treatment Value: Drought vs. No Drought
  misc_feature: MA Experiment ID: 20001560 Result: Down-regulated in Transcription
  misc_feature: MA Experiment 20001560 PARAMETER Experiment Name: At_Drought_Soil_Dry_P Parameter: Age (day) Value: 28
  misc_feature: MA Experiment 20001560 PARAMETER Experiment Name: At_Drought_Soil_Dry_P Parameter: Organism Value: A. thaliana
  misc_feature: MA Experiment 20001560 PARAMETER Experiment Name: At_Drought_Soil_Dry_P Parameter: Plant Line Value: WS
  misc_feature: MA Experiment 20001560 PARAMETER Experiment Name: At_Drought_Soil_Dry_P Parameter: Post Timepoint (hr) Value: None
  misc_feature: MA Experiment 20001560 PARAMETER Experiment Name: At_Drought_Soil_Dry_P Parameter: Post-Treatment Value: None
  misc_feature: MA Experiment 20001560 PARAMETER Experiment Name: At_Drought_Soil_Dry_P Parameter: Timepoint (day) Value: 14
  misc_feature: MA Experiment 20001560 PARAMETER Experiment Name: At_Drought_Soil_Dry_P Parameter: Treatment Value: Drought vs. No Drought
  misc_feature: MA Experiment ID: 20001904 Result: Down-regulated in Transcription
  misc_feature: MA Experiment 20001904 PARAMETER Experiment Name: At_Drought_Reproduction_P Parameter: Age (day) Value: 37
  misc_feature: MA Experiment 20001904 PARAMETER Experiment Name: At_Drought_Reproduction_P Parameter: Organism Value: A. thaliana
  misc_feature: MA Experiment 20001904 PARAMETER Experiment Name: At_Drought_Reproduction_P Parameter: Plant Line Value: WS
  misc_feature: MA Experiment 20001904 PARAMETER Experiment Name: At_Drought_Reproduction_P Parameter: Timepoint (day) Value: 7
  misc_feature: MA Experiment 20001904 PARAMETER Experiment Name: At_Drought_Reproduction_P Parameter: Tissue Value: Rosettes
  misc_feature: MA Experiment 20001904 PARAMETER Experiment Name: At_Drought_Reproduction_P Parameter: Treatment Value: Drought vs. No Drought
  misc_feature: MA Experiment ID: 20001905 Result: Down-regulated in Transcription
  misc_feature: MA Experiment 20001905 PARAMETER Experiment Name: At_Drought_Reproduction_P Parameter: Age (day) Value: 40
  misc_feature: MA Experiment 20001905 PARAMETER Experiment Name: At_Drought_Reproduction_P Parameter: Organism Value: A. thaliana
  misc_feature: MA Experiment 20001905 PARAMETER Experiment Name: At_Drought_Reproduction_P Parameter: Plant Line Value: WS
  misc_feature: MA Experiment 20001905 PARAMETER Experiment Name: At_Drought_Reproduction_P Parameter: Timepoint (day) Value: 10
  misc_feature: MA Experiment 20001905 PARAMETER Experiment Name: At_Drought_Reproduction_P Parameter: Tissue Value: Rosettes
  misc_feature: MA Experiment 20001905 PARAMETER Experiment Name: At_Drought_Reproduction_P Parameter: Treatment Value: Drought vs. No Drought
  misc_feature: MA Experiment ID: 20001911 Result: Down-regulated in Transcription
  misc_feature: MA Experiment 20001911 PARAMETER Experiment Name: At_Drought_Reproduction_P Parameter: Age (day) Value: 40
  misc_feature: MA Experiment 20001911 PARAMETER Experiment Name: At_Drought_Reproduction_P Parameter: Organism Value: A. thaliana
  misc_feature: MA Experiment 20001911 PARAMETER Experiment Name: At_Drought_Reproduction_P Parameter: Plant Line Value: WS
  misc_feature: MA Experiment 20001911 PARAMETER Experiment Name: At_Drought_Reproduction_P Parameter: Timepoint (day) Value: 10
  misc_feature: MA Experiment 20001911 PARAMETER Experiment Name: At_Drought_Reproduction_P Parameter: Tissue Value: Flowers
  misc_feature: MA Experiment 20001911 PARAMETER Experiment Name: At_Drought_Reproduction_P Parameter: Treatment Value: Drought vs. No Drought
accagaaaaacacacaccaaacaaaacaaaacaaaaaacagagagatggaaaacggaaactcctccagcgacaacaaatcttcacataaaccgatccgatgcaaagcggcggttagtaggaaggctggagagccgttggtgatggaagaaatcatggtggcgccgccgcagcctttcgaggttcggattcgaatcatctgcaccgcgttatgtcacagtgacgtcactttctggaaactccaagttcctccagcctgctttccgaggatactaggccacgaggcaataggcgtagtggaaagtgttggtgaaaatgtgaaggaagtggtagaaggagacaccgtactaccaacgttcatgcctgactgtggtgactgtgttgattgcaaatctcacaaaagcaacttatgtagcaaatttcctttcaaggtatccccttggatgccaagatacgataattccagcagattcaccgacctcaatggcgaaactctctttcatttcttgaacgtctccagcttcagcgaatacacggttcttgatgtcgctaacgttgttaagattgattcttcgattcctcctagtcgtgcttgcctcctaagctgcggagtctccaccggtgttggtgctgcttgggagaccgccaaagttgaaaaaggatcaaccgttgtgattttcggacttggttctatcggattagcggttgcagagggtgcgagactttgtggtgcctctagaatcattggtgtggatataaaccctaccaaattccaagttggccagaaatttggagttaccgagtttgtaaactctatgacatgtgagaaaaaccgtgttagcgaggtgatcaatgagatgactgatgggggagcggactattgcttcgaatgtgttggaagtagttctttggttcaagaagcttatgcttgctgtagacagggatggggaaagacaataactttaggggtggacaagccgggttcacaaatatgtttagattcgtttgatgttcttcaccatgggaagattctgatgggttcgttgtttggaggtttaaaggctaaaacacacattccaattcttcttaaacgctacttgagcaatgaacttgaattggataagtttgtgacacatgagatgaaattcgaggagatcaacgacgcattccagctacttcttgaagggaaatgcatcaggtgtgtcttatggatgggctaagtgaattgacttattttatctttccatcttttgcatcaatttcatatgtttcatgtttaactatttttattggtttgtaatcaaaacaagcaaatgccaaagtgacagcaaaataaaaagtcaatgaattgtaac

SEQ ID NO: 35100 - protein, 405 aa, Arabidopsis thaliana
  peptide (1)..(405): Ceres Seq. ID no. 13490252
  misc_feature (28)..(404): Homolog of NCBI NO: 113409 NR Description: Alcohol dehydrogenase class III (Alcohol
  misc_feature (30)..(404): Homolog of NCBI NO: 15219884 NR Description: alcohol dehydrogenase (ADH), putative
  misc_feature (30)..(404): Homolog of NCBI NO: 15219882 NR Description: alcohol dehydrogenase (ADH), putative
  misc_feature (30)..(404): Homolog of NCBI NO: 21618210 NR Description: alcohol dehydrogenase like protein [Arabidopsis
  misc_feature (30)..(404): Homolog of NCBI NO: 18415840 NR Description: alcohol dehydrogenase (ADH), putative
  misc_feature (22)..(404): Homolog of NCBI NO: 1076580 NR Description: probable alcohol dehydrogenase (EC 1.1.1.1) ADH3b
  misc_feature (22)..(404): Homolog of NCBI NO: 7705215 NR Description: alcohol dehydrogenase ADH [Lycopersicon
  misc_feature (30)..(404): Homolog of NCBI NO: 1076579 NR Description: probable alcohol dehydrogenase (EC 1.1.1.1) ADH3a
  misc_feature (30)..(404): Homolog of NCBI NO: 7705214 NR Description: alcohol dehydrogenase ADH [Lycopersicon
  misc_feature (16)..(405): Homolog of NCBI NO: 15238330 NR Description: alcohol dehydrogenase (ADH), putative
TRKTHTKQNKTKNREMENGNSSSDNKSSHKPIRCKAAVSRKAGEPLVMEEIMVAPPQPFEVRIRIICTALCHSDVTFWKLQVPPACFPRILGHEAIGVVESVGENVKEVVEGDTVLPTFMPDCGDCVDCKSHKSNLCSKFPFKVSPWMPRYDNSSRFTDLNGETLFHFLNVSSFSEYTVLDVANVVKIDSSIPPSRACLLSCGVSTGVGAAWETAKVEKGSTVVIFGLGSIGLAVAEGARLCGASRIIGVDINPTKFQVGQKFGVTEFVNSMTCEKNRVSEVINEMTDGGADYCFECVGSSSLVQEAYACCRQGWGKTITLGVDKPGSQICLDSFDVLHHGKILMGSLFGGLKAKTHIPILLKRYLSNELELDKFVTHEMKFEEINDAFQLLLEGKCIRCVLWMG

SEQ ID NO: 35101 - protein, 390 aa, Arabidopsis thaliana
  peptide (1)..(390): Ceres Seq. ID no. 13490253
  misc_feature (13)..(389): Homolog of NCBI NO: 113409 NR Description: Alcohol dehydrogenase class III (Alcohol
  misc_feature (15)..(389): Homolog of NCBI NO: 15219884 NR Description: alcohol dehydrogenase (ADH), putative
  misc_feature (15)..(389): Homolog of NCBI NO: 15219882 NR Description: alcohol dehydrogenase (ADH), putative
  misc_feature (15)..(389): Homolog of NCBI NO: 21618210 NR Description: alcohol dehydrogenase like protein [Arabidopsis
  misc_feature (15)..(389): Homolog of NCBI NO: 18415840 NR Description: alcohol dehydrogenase (ADH), putative
  misc_feature (7)..(389): Homolog of NCBI NO: 1076580 NR Description: probable alcohol dehydrogenase (EC 1.1.1.1) ADH3b
  misc_feature (7)..(389): Homolog of NCBI NO: 7705215 NR Description: alcohol dehydrogenase ADH [Lycopersicon
  misc_feature (15)..(389): Homolog of NCBI NO: 1076579 NR Description: probable alcohol dehydrogenase (EC 1.1.1.1) ADH3a
  misc_feature (15)..(389): Homolog of NCBI NO: 7705214 NR Description: alcohol dehydrogenase ADH [Lycopersicon
  misc_feature (1)..(390): Homolog of NCBI NO: 15238330 NR Description: alcohol dehydrogenase (ADH), putative
MENGNSSSDNKSSHKPIRCKAAVSRKAGEPLVMEEIMVAPPQPFEVRIRIICTALCHSDVTFWKLQVPPACFPRILGHEAIGVVESVGENVKEVVEGDTVLPTFMPDCGDCVDCKSHKSNLCSKFPFKVSPWMPRYDNSSRFTDLNGETLFHFLNVSSFSEYTVLDVANVVKIDSSIPPSRACLLSCGVSTGVGAAWETAKVEKGSTVVIFGLGSIGLAVAEGARLCGASRIIGVDINPTKFQVGQKFGVTEFVNSMTCEKNRVSEVINEMTDGGADYCFECVGSSSLVQEAYACCRQGWGKTITLGVDKPGSQICLDSFDVLHHGKILMGSLFGGLKAKTHIPILLKRYLSNELELDKFVTHEMKFEEINDAFQLLLEGKCIRCVLWMG

SEQ ID NO: 35102 - protein, 358 aa, Arabidopsis thaliana
  peptide (1)..(358): Ceres Seq. ID no. 13490254
  misc_feature (1)..(357): Homolog of NCBI NO: 113409 NR Description: Alcohol dehydrogenase class III (Alcohol
  misc_feature (1)..(357): Homolog of NCBI NO: 15219884 NR Description: alcohol dehydrogenase (ADH), putative
  misc_feature (1)..(357): Homolog of NCBI NO: 15219882 NR Description: alcohol dehydrogenase (ADH), putative
  misc_feature (1)..(357): Homolog of NCBI NO: 21618210 NR Description: alcohol dehydrogenase like protein [Arabidopsis
  misc_feature (1)..(357): Homolog of NCBI NO: 18415840 NR Description: alcohol dehydrogenase (ADH), putative
  misc_feature (1)..(357): Homolog of NCBI NO: 1076580 NR Description: probable alcohol dehydrogenase (EC 1.1.1.1) ADH3b
  misc_feature (1)..(357): Homolog of NCBI NO: 7705215 NR Description: alcohol dehydrogenase ADH [Lycopersicon
  misc_feature (1)..(357): Homolog of NCBI NO: 1076579 NR Description: probable alcohol dehydrogenase (EC 1.1.1.1) ADH3a
  misc_feature (1)..(357): Homolog of NCBI NO: 7705214 NR Description: alcohol dehydrogenase ADH [Lycopersicon
  misc_feature (1)..(358): Homolog of NCBI NO: 15238330 NR Description: alcohol dehydrogenase (ADH), putative
MEEIMVAPPQPFEVRIRIICTALCHSDVTFWKLQVPPACFPRILGHEAIGVVESVGENVKEVVEGDTVLPTFMPDCGDCVDCKSHKSNLCSKFPFKVSPWMPRYDNSSRFTDLNGETLFHFLNVSSFSEYTVLDVANVVKIDSSIPPSRACLLSCGVSTGVGAAWETAKVEKGSTVVIFGLGSIGLAVAEGARLCGASRIIGVDINPTKFQVGQKFGVTEFVNSMTCEKNRVSEVINEMTDGGADYCFECVGSSSLVQEAYACCRQGWGKTITLGVDKPGSQICLDSFDVLHHGKILMGSLFGGLKAKTHIPILLKRYLSNELELDKFVTHEMKFEEINDAFQLLLEGKCIRCVLWMG

SEQ ID NO: 35103 - DNA, 1200 bp, Arabidopsis thaliana
  misc_feature (1)..(1200): Ceres Seq. ID no. 12421496
  misc_feature: MA Experiment ID: 108488 Result: Down-regulated in Transcription
  misc_feature: MA Experiment ID: 108489 Result: Down-regulated in Transcription
  misc_feature: MA Experiment ID: 20000068 Result: Down-regulated in Transcription
  misc_feature: MA Experiment ID: 20000090 Result: Up-regulated in Transcription
  misc_feature: MA Experiment ID: 20000111 Result: Down-regulated in Transcription
  misc_feature: MA Experiment 20000111 PARAMETER Experiment Name: At_42deg_Heat_cDNA_P Parameter: Temperature (deg C) Value: 42 vs. 22
  misc_feature: MA Experiment 20000111 PARAMETER Experiment Name: At_42deg_Heat_cDNA_P Parameter: Timepoint (hr) Value: 6
  misc_feature: MA Experiment 20000111 PARAMETER Experiment Name: At_42deg_Heat_cDNA_P Parameter: Tissue Value: Aerial
  misc_feature: MA Experiment ID: 20000113 Result: Down-regulated in Transcription
  misc_feature: MA Experiment 20000113 PARAMETER Experiment Name: At_42deg_Heat_cDNA_P Parameter: Temperature (deg C) Value: 42 vs. 22
  misc_feature: MA Experiment 20000113 PARAMETER Experiment Name: At_42deg_Heat_cDNA_P Parameter: Timepoint (hr) Value: 8
  misc_feature: MA Experiment 20000113 PARAMETER Experiment Name: At_42deg_Heat_cDNA_P Parameter: Tissue Value: Aerial
  misc_feature: MA Experiment ID: 20000144 Result: Down-regulated in Transcription
  misc_feature: MA Experiment 20000144 PARAMETER Experiment Name: At_42deg_Heat_cDNA_P Parameter: Temperature (deg C) Value: 42 vs. 22
  misc_feature: MA Experiment 20000144 PARAMETER Experiment Name: At_42deg_Heat_cDNA_P Parameter: Timepoint (hr) Value: 1
  misc_feature: MA Experiment 20000144 PARAMETER Experiment Name: At_42deg_Heat_cDNA_P Parameter: Tissue Value: Aerial
  misc_feature: MA Experiment ID: 20000171 Result: Down-regulated in Transcription
  misc_feature: MA Experiment 20000171 PARAMETER Experiment Name: At_42deg_Heat_P Parameter: Age (day) Value: 14
  misc_feature: MA Experiment 20000171 PARAMETER Experiment Name: At_42deg_Heat_P Parameter: Organism Value: A. thaliana
  misc_feature: MA Experiment 20000171 PARAMETER Experiment Name: At_42deg_Heat_P Parameter: Plant Line Value: WS
  misc_feature: MA Experiment 20000171 PARAMETER Experiment Name: At_42deg_Heat_P Parameter: Temperature (deg C) Value: 42 vs. 22
  misc_feature: MA Experiment 20000171 PARAMETER Experiment Name: At_42deg_Heat_P Parameter: Timepoint (hr) Value: 1
  misc_feature: MA Experiment 20000171 PARAMETER Experiment Name: At_42deg_Heat_P Parameter: Tissue Value: Aerial
  misc_feature: MA Experiment ID: 20000173 Result: Down-regulated in Transcription
  misc_feature: MA Experiment 20000173 PARAMETER Experiment Name: At_42deg_Heat_P Parameter: Age (day) Value: 14
  misc_feature: MA Experiment 20000173 PARAMETER Experiment Name: At_42deg_Heat_P Parameter: Organism Value: A. thaliana
  misc_feature: MA Experiment 20000173 PARAMETER Experiment Name: At_42deg_Heat_P Parameter: Plant Line Value: WS
  misc_feature: MA Experiment 20000173 PARAMETER Experiment Name: At_42deg_Heat_P Parameter: Temperature (deg C) Value: 42 vs. 22
  misc_feature: MA Experiment 20000173 PARAMETER Experiment Name: At_42deg_Heat_P Parameter: Timepoint (hr) Value: 6
  misc_feature: MA Experiment 20000173 PARAMETER Experiment Name: At_42deg_Heat_P Parameter: Tissue Value: Aerial
  misc_feature: MA Experiment ID: 20000184 Result: Down-regulated in Transcription
  misc_feature: MA Experiment 20000184 PARAMETER Experiment Name: At_Shoots__P Parameter: Age (day) Value: 7
  misc_feature: MA Experiment 20000184 PARAMETER Experiment Name: At_Shoots__P Parameter: Tissue Value: Shoots vs. Whole Plant
  misc_feature: MA Experiment ID: 20000185 Result: Down-regulated in Transcription
  misc_feature: MA Experiment 20000185 PARAMETER Experiment Name: At_Roots__P Parameter: Age (day) Value: 7 vs. 21
  misc_feature: MA Experiment 20000185 PARAMETER Experiment Name: At_Roots__P Parameter: Organism Value: A. thaliana
  misc_feature: MA Experiment 20000185 PARAMETER Experiment Name: At_Roots__P Parameter: Tissue Value: Roots vs. Whole Plant
  misc_feature: MA Experiment ID: 20000224 Result: Up-regulated in Transcription
  misc_feature: MA Experiment ID: 20000234 Result: Down-regulated in Transcription
  misc_feature: MA Experiment 20000234 PARAMETER Experiment Name: At_Siliques_P Parameter: Age (day) Value: 21
  misc_feature: MA Experiment 20000234 PARAMETER Experiment Name: At_Siliques_P Parameter: Organism Value: A. thaliana
  misc_feature: MA Experiment 20000234 PARAMETER Experiment Name: At_Siliques_P Parameter: Plant Line Value: WS
  misc_feature: MA Experiment 20000234 PARAMETER Experiment Name: At_Siliques_P Parameter: Tissue Value: Less Than 5mm Siliques vs. Whole Plant
  misc_feature: MA Experiment ID: 20000264 Result: Down-regulated in Transcription
  misc_feature: MA Experiment 20000264 PARAMETER Experiment Name: At_Open_Flower_P Parameter: Age (day) Value: 21
  misc_feature: MA Experiment 20000264 PARAMETER Experiment Name: At_Open_Flower_P Parameter: Plant Line Value: WS
  misc_feature: MA Experiment 20000264 PARAMETER Experiment Name: At_Open_Flower_P Parameter: Tissue Value: Open Flower vs. Whole Plant
  misc_feature: MA Experiment ID: 20000286 Result: Down-regulated in Transcription
  misc_feature: MA Experiment 20000286 PARAMETER Experiment Name: At_Open_Flower_P Parameter: Age (day) Value: 21
  misc_feature: MA Experiment 20000286 PARAMETER Experiment Name: At_Open_Flower_P Parameter: Plant Line Value: WS
  misc_feature: MA Experiment 20000286 PARAMETER Experiment Name: At_Open_Flower_P Parameter: Tissue Value: Half Open vs. Whole Plant
  misc_feature: MA Experiment ID: 20000438 Result: Down-regulated in Transcription
  misc_feature: MA Experiment 20000438 PARAMETER Experiment Name: At_Shoots__P Parameter: Age (day) Value: 14
  misc_feature: MA Experiment 20000438 PARAMETER Experiment Name: At_Shoots__P Parameter: Tissue Value: Shoots vs. Whole Plant
  misc_feature: MA Experiment ID: 20000439 Result: Down-regulated in Transcription
  misc_feature: MA Experiment 20000439 PARAMETER Experiment Name: At_Roots__P Parameter: Age (day) Value: 14 vs. 21
  misc_feature: MA Experiment 20000439 PARAMETER Experiment Name: At_Roots__P Parameter: Organism Value: A. thaliana
  misc_feature: MA Experiment 20000439 PARAMETER Experiment Name: At_Roots__P Parameter: Tissue Value: Roots vs. Whole Plant
  misc_feature: MA Experiment ID: 20000445 Result: Up-regulated in Transcription
  misc_feature: MA Experiment 20000445 PARAMETER Experiment Name: At_100uM_NAA__P Parameter: Age (day) Value: 14
  misc_feature: MA Experiment 20000445 PARAMETER Experiment Name: At_100uM_NAA__P Parameter: Organism Value: A. thaliana
  misc_feature: MA Experiment 20000445 PARAMETER Experiment Name: At_100uM_NAA__P Parameter: Plant Line Value: WS
  misc_feature: MA Experiment 20000445 PARAMETER Experiment Name: At_100uM_NAA__P Parameter: Timepoint (hr) Value: 6
  misc_feature: MA Experiment 20000445 PARAMETER Experiment Name: At_100uM_NAA__P Parameter: Tissue Value: Aerial
  misc_feature: MA Experiment 20000445 PARAMETER Experiment Name: At_100uM_NAA__P Parameter: Treatment Value: 100uM NAA vs. No Treatment
  misc_feature: MA Experiment ID: 20000527 Result: Down-regulated in Transcription
  misc_feature: MA Experiment 20000527 PARAMETER Experiment Name: At_10percent_PEG_P Parameter: Age (day) Value: 20
  misc_feature: MA Experiment 20000527 PARAMETER Experiment Name: At_10percent_PEG_P Parameter: Organism Value: A. thaliana
  misc_feature: MA Experiment 20000527 PARAMETER Experiment Name: At_10percent_PEG_P Parameter: Plant Line Value: WS
  misc_feature: MA Experiment 20000527 PARAMETER Experiment Name: At_10percent_PEG_P Parameter: Timepoint (day) Value: 20
  misc_feature: MA Experiment 20000527 PARAMETER Experiment Name: At_10percent_PEG_P Parameter: Tissue Value: Whole Plant
  misc_feature: MA Experiment 20000527 PARAMETER Experiment Name: At_10percent_PEG_P Parameter: Treatment Value: 10percent PEG vs. No Treatment
  misc_feature: MA Experiment ID: 20000573 Result: Down-regulated in Transcription
  misc_feature: MA Experiment 20000573 PARAMETER Experiment Name: At_100uM_ABA_Mutants__P Parameter: Organism Value: A. thaliana
  misc_feature: MA Experiment 20000573 PARAMETER Experiment Name: At_100uM_ABA_Mutants__P Parameter: Plant Line Value: CS22 vs. Ler wt
  misc_feature: MA Experiment 20000573 PARAMETER Experiment Name: At_100uM_ABA_Mutants__P Parameter: Timepoint (hr) Value: N/A
  misc_feature: MA Experiment 20000573 PARAMETER Experiment Name: At_100uM_ABA_Mutants__P Parameter: Tissue Value: Whole Plant
  misc_feature: MA Experiment 20000573 PARAMETER Experiment Name: At_100uM_ABA_Mutants__P Parameter: Treatment Value: None
  misc_feature: MA Experiment ID: 20000709 Result: Down-regulated in Transcription
  misc_feature: MA Experiment 20000709 PARAMETER Experiment Name: At_15mM_NH4NO3_L-to-H_P Parameter: Age (hr) Value: 14
  misc_feature: MA Experiment 20000709 PARAMETER Experiment Name: At_15mM_NH4NO3_L-to-H_P Parameter: Organism Value: A. thaliana
  misc_feature: MA Experiment 20000709 PARAMETER Experiment Name: At_15mM_NH4NO3_L-to-H_P Parameter: Plant Line Value: WS
  misc_feature: MA Experiment 20000709 PARAMETER Experiment Name: At_15mM_NH4NO3_L-to-H_P Parameter: Timepoint (hr) Value: 4
  misc_feature: MA Experiment 20000709 PARAMETER Experiment Name: At_15mM_NH4NO3_L-to-H_P Parameter: Tissue Value: Aerial
  misc_feature: MA Experiment 20000709 PARAMETER Experiment Name: At_15mM_NH4NO3_L-to-H_P Parameter: Treatment Value: 15mM NH4NO3 vs. 30mM Mannitol
  misc_feature: MA Experiment ID: 20000794 Result: Down-regulated in Transcription
  misc_feature: MA Experiment 20000794 PARAMETER Experiment Name: At_Petals_P Parameter: Age (day) Value: 23-25 days
  misc_feature: MA Experiment 20000794 PARAMETER Experiment Name: At_Petals_P Parameter: Plant Line Value: WS
  misc_feature: MA Experiment 20000794 PARAMETER Experiment Name: At_Petals_P Parameter: Tissue Value: Petals vs. Whole plant
  misc_feature: MA Experiment ID: 20001451 Result: Down-regulated in Transcription
  misc_feature: MA Experiment 20001451 PARAMETER Experiment Name: At_Far-red-induction_P Parameter: Age (day) Value: 7
  misc_feature: MA Experiment 20001451 PARAMETER Experiment Name: At_Far-red-induction_P Parameter: Light Value: Far-red vs. White
  misc_feature: MA Experiment 20001451 PARAMETER Experiment Name: At_Far-red-induction_P Parameter: Organism Value: A. thaliana
  misc_feature: MA Experiment 20001451 PARAMETER Experiment Name: At_Far-red-induction_P Parameter: Plant Line Value: Columbia
  misc_feature: MA Experiment 20001451 PARAMETER Experiment Name: At_Far-red-induction_P Parameter: Timepoint (hr) Value: 24
  misc_feature: MA Experiment 20001451 PARAMETER Experiment Name: At_Far-red-induction_P Parameter: Tissue Value: Whole Plant
  misc_feature: MA Experiment ID: 20001554 Result: Down-regulated in Transcription
  misc_feature: MA Experiment 20001554 PARAMETER Experiment Name: At_Drought_Soil_Dry_P Parameter: Age (day) Value: 21
  misc_feature: MA Experiment 20001554 PARAMETER Experiment Name: At_Drought_Soil_Dry_P Parameter: Organism Value: A. thaliana
  misc_feature: MA Experiment 20001554 PARAMETER Experiment Name: At_Drought_Soil_Dry_P Parameter: Plant Line Value: WS
  misc_feature: MA Experiment 20001554 PARAMETER Experiment Name: At_Drought_Soil_Dry_P Parameter: Post Timepoint (hr) Value: None
  misc_feature: MA Experiment 20001554 PARAMETER Experiment Name: At_Drought_Soil_Dry_P Parameter: Post-Treatment Value: None
  misc_feature: MA Experiment 20001554 PARAMETER Experiment Name: At_Drought_Soil_Dry_P Parameter: Timepoint (day) Value: 7
  misc_feature: MA Experiment 20001554 PARAMETER Experiment Name: At_Drought_Soil_Dry_P Parameter: Treatment Value: Drought vs. No Drought
  misc_feature: MA Experiment ID: 20001555 Result: Down-regulated in Transcription
  misc_feature: MA Experiment 20001555 PARAMETER Experiment Name: At_Drought_Soil_Dry_P Parameter: Age (day) Value: 24
  misc_feature: MA Experiment 20001555 PARAMETER Experiment Name: At_Drought_Soil_Dry_P Parameter: Organism Value: A. thaliana
  misc_feature: MA Experiment 20001555 PARAMETER Experiment Name: At_Drought_Soil_Dry_P Parameter: Plant Line Value: WS
  misc_feature: MA Experiment 20001555 PARAMETER Experiment Name: At_Drought_Soil_Dry_P Parameter: Post Timepoint (hr) Value: None
  misc_feature: MA Experiment 20001555 PARAMETER Experiment Name: At_Drought_Soil_Dry_P Parameter: Post-Treatment Value: None
  misc_feature: MA Experiment 20001555 PARAMETER Experiment Name: At_Drought_Soil_Dry_P Parameter: Timepoint (day) Value: 10
  misc_feature: MA Experiment 20001555 PARAMETER Experiment Name: At_Drought_Soil_Dry_P Parameter: Treatment Value: Drought vs. No Drought
  misc_feature: MA Experiment ID: 20001556 Result: Down-regulated in Transcription
  misc_feature: MA Experiment 20001556 PARAMETER Experiment Name: At_Drought_Soil_Dry_P Parameter: Age (day) Value: 26
  misc_feature: MA Experiment 20001556 PARAMETER Experiment Name: At_Drought_Soil_Dry_P Parameter: Organism Value: A. thaliana
  misc_feature: MA Experiment 20001556 PARAMETER Experiment Name: At_Drought_Soil_Dry_P Parameter: Plant Line Value: WS
  misc_feature: MA Experiment 20001556 PARAMETER Experiment Name: At_Drought_Soil_Dry_P Parameter: Post Timepoint (hr) Value: None
  misc_feature: MA Experiment 20001556 PARAMETER Experiment Name: At_Drought_Soil_Dry_P Parameter: Post-Treatment Value: None
  misc_feature: MA Experiment 20001556 PARAMETER Experiment Name: At_Drought_Soil_Dry_P Parameter: Timepoint (day) Value: 12
  misc_feature: MA Experiment 20001556 PARAMETER Experiment Name: At_Drought_Soil_Dry_P Parameter: Treatment Value: Drought vs. No Drought
  misc_feature: MA Experiment ID: 20001557 Result: Down-regulated in Transcription
  misc_feature: MA Experiment 20001557 PARAMETER Experiment Name: At_Drought_Soil_Dry_P Parameter: Age (day) Value: 27
  misc_feature: MA Experiment 20001557 PARAMETER Experiment Name: At_Drought_Soil_Dry_P Parameter: Organism Value: A. thaliana
  misc_feature: MA Experiment 20001557 PARAMETER Experiment Name: At_Drought_Soil_Dry_P Parameter: Plant Line Value: WS
  misc_feature: MA Experiment 20001557 PARAMETER Experiment Name: At_Drought_Soil_Dry_P Parameter: Post Timepoint (hr) Value: 3
  misc_feature: MA Experiment 20001557 PARAMETER Experiment Name: At_Drought_Soil_Dry_P Parameter: Post-Treatment Value: Re-Water vs. No Drought
  misc_feature: MA Experiment 20001557 PARAMETER Experiment Name: At_Drought_Soil_Dry_P Parameter: Timepoint (day) Value: 13
  misc_feature: MA Experiment 20001557 PARAMETER Experiment Name: At_Drought_Soil_Dry_P Parameter: Treatment Value: Drought vs. No Drought
  misc_feature: MA Experiment ID: 20001558 Result: Down-regulated in Transcription
  misc_feature: MA Experiment 20001558 PARAMETER Experiment Name: At_Drought_Soil_Dry_P Parameter: Age (day) Value: 27
  misc_feature: MA Experiment 20001558 PARAMETER Experiment Name: At_Drought_Soil_Dry_P Parameter: Organism Value: A. thaliana
  misc_feature: MA Experiment 20001558 PARAMETER Experiment Name: At_Drought_Soil_Dry_P Parameter: Plant Line Value: WS
  misc_feature: MA Experiment 20001558 PARAMETER Experiment Name: At_Drought_Soil_Dry_P Parameter: Post Timepoint (hr) Value: 6
  misc_feature: MA Experiment 20001558 PARAMETER Experiment Name: At_Drought_Soil_Dry_P Parameter: Post-Treatment Value: Re-Water vs. No Drought
  misc_feature: MA Experiment 20001558 PARAMETER Experiment Name: At_Drought_Soil_Dry_P Parameter: Timepoint (day) Value: 13
  misc_feature: MA Experiment 20001558 PARAMETER Experiment Name: At_Drought_Soil_Dry_P Parameter: Treatment Value: Drought vs. No Drought
  misc_feature: MA Experiment ID: 20001559 Result: Down-regulated in Transcription
  misc_feature: MA Experiment 20001559 PARAMETER Experiment Name: At_Drought_Soil_Dry_P Parameter: Age (day) Value: 28
  misc_feature: MA Experiment 20001559 PARAMETER Experiment Name: At_Drought_Soil_Dry_P Parameter: Organism Value: A. thaliana
  misc_feature: MA Experiment 20001559 PARAMETER Experiment Name: At_Drought_Soil_Dry_P Parameter: Plant Line Value: WS
  misc_feature: MA Experiment 20001559 PARAMETER Experiment Name: At_Drought_Soil_Dry_P Parameter: Post Timepoint (hr) Value: 29
  misc_feature: MA Experiment 20001559 PARAMETER Experiment Name: At_Drought_Soil_Dry_P Parameter: Post-Treatment Value: Re-Water vs. No Drought
  misc_feature: MA Experiment 20001559 PARAMETER Experiment Name: At_Drought_Soil_Dry_P Parameter: Timepoint (day) Value: 14
  misc_feature: MA Experiment 20001559 PARAMETER Experiment Name: At_Drought_Soil_Dry_P Parameter: Treatment Value: Drought vs. No Drought
  misc_feature: MA Experiment ID: 20001560 Result: Down-regulated in Transcription
  misc_feature: MA Experiment 20001560 PARAMETER Experiment Name: At_Drought_Soil_Dry_P Parameter: Age (day) Value: 28
  misc_feature: MA Experiment 20001560 PARAMETER Experiment Name: At_Drought_Soil_Dry_P Parameter: Organism Value: A. thaliana
  misc_feature: MA Experiment 20001560 PARAMETER Experiment Name: At_Drought_Soil_Dry_P Parameter: Plant Line Value: WS
  misc_feature: MA Experiment 20001560 PARAMETER Experiment Name: At_Drought_Soil_Dry_P Parameter: Post Timepoint (hr) Value: None
  misc_feature: MA Experiment 20001560 PARAMETER Experiment Name: At_Drought_Soil_Dry_P Parameter: Post-Treatment Value: None
  misc_feature: MA Experiment 20001560 PARAMETER Experiment Name: At_Drought_Soil_Dry_P Parameter: Timepoint (day) Value: 14
  misc_feature: MA Experiment 20001560 PARAMETER Experiment Name: At_Drought_Soil_Dry_P Parameter: Treatment Value: Drought vs. No Drought
  misc_feature: MA Experiment ID: 20001768 Result: Up-regulated in Transcription
  misc_feature: MA Experiment 20001768 PARAMETER Experiment Name: At_Far-red-enriched-adult_P Parameter: Age (day) Value: 28
  misc_feature: MA Experiment 20001768 PARAMETER Experiment Name: At_Far-red-enriched-adult_P Parameter: Light Value: Far-red enriched vs. White
  misc_feature: MA Experiment 20001768 PARAMETER Experiment Name: At_Far-red-enriched-adult_P Parameter: Organism Value: A. thaliana
  misc_feature: MA Experiment 20001768 PARAMETER Experiment Name: At_Far-red-enriched-adult_P Parameter: Plant Line Value: Columbia
  misc_feature: MA Experiment 20001768 PARAMETER Experiment Name: At_Far-red-enriched-adult_P Parameter: Timepoint (hr) Value: 1
  misc_feature: MA Experiment 20001768 PARAMETER Experiment Name: At_Far-red-enriched-adult_P Parameter: Tissue Value: Aerial
  misc_feature: MA Experiment ID: 20001773 Result: Down-regulated in Transcription
  misc_feature: MA Experiment 20001773 PARAMETER Experiment Name: At_Far-red-enriched-adult_P Parameter: Age (day) Value: 30
  misc_feature: MA Experiment 20001773 PARAMETER Experiment Name: At_Far-red-enriched-adult_P Parameter: Light Value: Far-red enriched vs. White
  misc_feature: MA Experiment 20001773 PARAMETER Experiment Name: At_Far-red-enriched-adult_P Parameter: Organism Value: A. thaliana
  misc_feature: MA Experiment 20001773 PARAMETER Experiment Name: At_Far-red-enriched-adult_P Parameter: Plant Line Value: Columbia
  misc_feature: MA Experiment 20001773 PARAMETER Experiment Name: At_Far-red-enriched-adult_P Parameter: Timepoint (hr) Value: 48
  misc_feature: MA Experiment 20001773 PARAMETER Experiment Name: At_Far-red-enriched-adult_P Parameter: Tissue Value: Aerial
  misc_feature: MA Experiment ID: 20001909 Result: Down-regulated in Transcription
  misc_feature: MA Experiment 20001909 PARAMETER Experiment Name: At_Drought_Reproduction_P Parameter: Age (day) Value: 35
  misc_feature: MA Experiment 20001909 PARAMETER Experiment Name: At_Drought_Reproduction_P Parameter: Organism Value: A. thaliana
  misc_feature: MA Experiment 20001909 PARAMETER Experiment Name: At_Drought_Reproduction_P Parameter: Plant Line Value: WS
  misc_feature: MA Experiment 20001909 PARAMETER Experiment Name: At_Drought_Reproduction_P Parameter: Timepoint (day) Value: 5
  misc_feature: MA Experiment 20001909 PARAMETER Experiment Name: At_Drought_Reproduction_P Parameter: Tissue Value: Flowers
  misc_feature: MA Experiment 20001909 PARAMETER Experiment Name: At_Drought_Reproduction_P Parameter: Treatment Value: Drought vs. No Drought
atatcatttttcacagaatcatagaaaaatcaagaaaatgtctgaatcaaggagcttagcctcaccaccaatgttgatgattcttctcagccttgtaatagcttccttcttcaaccacacagctggacaaatcggagtatgctacgggatgctaggcgataccttgccaagtccatcggacgttgtggctctttacaaacaacaaaacatccagcgaatgcggctctacggccctgacccaggcgctcttgccgctctccgtggctctgacatcgagctcatcctcgacgttcccagttcagatcttgaacgtctcgcctccagtcaaacggaggccgacaagtgggttcaagaaaacgttcagagctacagagatggtgtcagattccggtacatcaacgttggaaatgaggtgaaaccctcagttggggggtttctcttacaagcaatgcagaacatcgagaacgcggtttctggagcagggcttgaagtcaaggtctcaacagctatagccactgacaccaccactgatacgtctcctccgtctcaaggaaggttcagggatgagtataagagctttctcgaaccagtgataggtttcttggcaagcaagcaatctcccttgctcgtgaatctctacccttacttcagctacatgggagacacggccaacatccatctagactacgctctgttcaccgcccagtccactgttgataacgatccagggtactcataccaaaacctattcgacgcaaatctcgactcggtttatgcagcattggagaaatcagggggcggatcgttggaaatcgtggtgtcggagaccggttggcccacagagggagcagtcgggacgagtgtggaaaacgcaaagacttatgttaacaatttgatacaacatgtgaagaatggatcaccgagaaggccagggaaagctatagagacttatatattcgctatgttcgatgagaataagaaggaaccaacgtatgagaagttttggggactgtttcatccagatcgacagtctaagtatgaagttaatttcaactaatccttagagacttgtgggctttttatgtaagcgtatttaaaaattgggaacttgttgtagtaataaggaataattaatgcgctttcagcgtgtagtatgttgttatttttaaggttataaatgagctgcaagcataaataagg

SEQ ID NO: 35104 - protein, 351 aa, Arabidopsis thaliana
  peptide (1)..(351): Ceres Seq. ID no. 12421497
  misc_feature (21)..(349): Homolog of NCBI NO: 11279332 NR Description: beta-1,3 glucanase (EC 3.2.1.-)
  misc_feature (29)..(350): Homolog of NCBI NO: 15230263 NR Description: glycosyl hydrolase family 17
  misc_feature (9)..(351): Homolog of NCBI NO: 1706548 NR Description: Glucan endo-1,3-beta-glucosidase, basic isoform
  misc_feature (19)..(351): Homolog of NCBI NO: 1352326 NR Description: GLUCAN ENDO-1,3-BETA-GLUCOSIDASE PRECURSOR ((1-
  misc_feature (9)..(351): Homolog of NCBI NO: 16903142 NR Description: beta-1,3-glucanase [Prunus persica]
  misc_feature (13)..(351): Homolog of NCBI NO: 16903144 NR Description: beta-1,3-glucanase [Prunus persica]
  misc_feature (75)..(351): Homolog of NCBI NO: 322558 NR Description: glucan endo-1,3-beta-D-glucosidase (EC 3.2.1.39)
  misc_feature (13)..(330): Homolog of NCBI NO: 24417410 NR Description: unknown [Arabidopsis thaliana]
  misc_feature (13)..(351): Homolog of NCBI NO: 21554264 NR Description: beta-1,3-glucanase 2 (BG2) (PR-2) [Arabidopsis
  misc_feature (13)..(351): Homolog of NCBI NO: 15230262 NR Description: glycosyl hydrolase family 17
YHFSQNHRKIKKMSESRSLASPPMLMILLSLVIASFFNHTAGQIGVCYGMLGDTLPSPSDVVALYKQQNIQRMRLYGPDPGALAALRGSDIELILDVPSSDLERLASSQTEADKWVQENVQSYRDGVRFRYINVGNEVKPSVGGFLLQAMQNIENAVSGAGLEVKVSTAIATDTTTDTSPPSQGRFRDEYKSFLEPVIGFLASKQSPLLVNLYPYFSYMGDTANIHLDYALFTAQSTVDNDPGYSYQNLFDANLDSVYAALEKSGGGSLEIVVSETGWPTEGAVGTSVENAKTYVNNLIQHVKNGSPRRPGKAIETYIFAMFDENKKEPTYEKFWGLFHPDRQSKYEVNFN

SEQ ID NO: 35105 - protein, 339 aa, Arabidopsis thaliana
  peptide (1)..(339): Ceres Seq. ID no. 12421498
  misc_feature (9)..(337): Homolog of NCBI NO: 11279332 NR Description: beta-1,3 glucanase (EC 3.2.1.-)
  misc_feature (17)..(338): Homolog of NCBI NO: 15230263 NR Description: glycosyl hydrolase family 17
  misc_feature (1)..(339): Homolog of NCBI NO: 1706548 NR Description: Glucan endo-1,3-beta-glucosidase, basic isoform
  misc_feature (7)..(339): Homolog of NCBI NO: 1352326 NR Description: GLUCAN ENDO-1,3-BETA-GLUCOSIDASE PRECURSOR ((1-
  misc_feature (1)..(339): Homolog of NCBI NO: 16903142 NR Description: beta-1,3-glucanase [Prunus persica]
  misc_feature (1)..(339): Homolog of NCBI NO: 16903144 NR Description: beta-1,3-glucanase [Prunus persica]
  misc_feature (63)..(339): Homolog of NCBI NO: 322558 NR Description: glucan endo-1,3-beta-D-glucosidase (EC 3.2.1.39)
  misc_feature (1)..(318): Homolog of NCBI NO: 24417410 NR Description: unknown [Arabidopsis thaliana]
  misc_feature (1)..(339): Homolog of NCBI NO: 21554264 NR Description: beta-1,3-glucanase 2 (BG2) (PR-2) [Arabidopsis
  misc_feature (1)..(339): Homolog of NCBI NO: 15230262 NR Description: glycosyl hydrolase family 17
MSESRSLASPPMLMILLSLVIASFFNHTAGQIGVCYGMLGDTLPSPSDVVALYKQQNIQRMRLYGPDPGALAALRGSDIELILDVPSSDLERLASSQTEADKWVQENVQSYRDGVRFRYINVGNEVKPSVGGFLLQAMQNIENAVSGAGLEVKVSTAIATDTTTDTSPPSQGRFRDEYKSFLEPVIGFLASKQSPLLVNLYPYFSYMGDTANIHLDYALFTAQSTVDNDPGYSYQNLFDANLDSVYAALEKSGGGSLEIVVSETGWPTEGAVGTSVENAKTYVNNLIQHVKNGSPRRPGKAIETYIFAMFDENKKEPTYEKFWGLFHPDRQSKYEVNFN

SEQ ID NO: 35106 - protein, 328 aa, Arabidopsis thaliana
  peptide (1)..(328): Ceres Seq. ID no. 12421499
  misc_feature (1)..(326): Homolog of NCBI NO: 11279332 NR Description: beta-1,3 glucanase (EC 3.2.1.-)
  misc_feature (6)..(327): Homolog of NCBI NO: 15230263 NR Description: glycosyl hydrolase family 17
  misc_feature (1)..(328): Homolog of NCBI NO: 1706548 NR Description: Glucan endo-1,3-beta-glucosidase, basic isoform
  misc_feature (1)..(328): Homolog of NCBI NO: 1352326 NR Description: GLUCAN ENDO-1,3-BETA-GLUCOSIDASE PRECURSOR ((1-
  misc_feature (1)..(328): Homolog of NCBI NO: 16903142 NR Description: beta-1,3-glucanase [Prunus persica]
  misc_feature (1)..(328): Homolog of NCBI NO: 16903144 NR Description: beta-1,3-glucanase [Prunus persica]
  misc_feature (52)..(328): Homolog of NCBI NO: 322558 NR Description: glucan endo-1,3-beta-D-glucosidase (EC 3.2.1.39)
  misc_feature (1)..(307): Homolog of NCBI NO: 24417410 NR Description: unknown [Arabidopsis thaliana]
  misc_feature (1)..(328): Homolog of NCBI NO: 21554264 NR Description: beta-1,3-glucanase 2 (BG2) (PR-2) [Arabidopsis
  misc_feature (1)..(328): Homolog of NCBI NO: 15230262 NR Description: glycosyl hydrolase family 17
MLMILLSLVIASFFNHTAGQIGVCYGMLGDTLPSPSDVVALYKQQNIQRMRLYGPDPGALAALRGSDIELILDVPSSDLERLASSQTEADKWVQENVQSYRDGVRFRYINVGNEVKPSVGGFLLQAMQNIENAVSGAGLEVKVSTAIATDTTTDTSPPSQGRFRDEYKSFLEPVIGFLASKQSPLLVNLYPYFSYMGDTANIHLDYALFTAQSTVDNDPGYSYQNLFDANLDSVYAALEKSGGGSLEIVVSETGWPTEGAVGTSVENAKTYVNNLIQHVKNGSPRRPGKAIETYIFAMFDENKKEPTYEKFWGLFHPDRQSKYEVNFN

SEQ ID NO: 35107 - DNA, 1991 bp, Arabidopsis thaliana
  misc_feature (1)..(1991): Ceres Seq. ID no. 13490832
  misc_feature: MA Experiment ID: 108434 Result: Up-regulated in Transcription
  misc_feature: MA Experiment 108434 PARAMETER Experiment Name: At_Root_Tips_cDNA_P Parameter: Tissue Value: Root Tips
  misc_feature: MA Experiment ID: 20000495 Result: Up-regulated in Transcription
  misc_feature: MA Experiment 20000495 PARAMETER Experiment Name: At_Guard_Cells_P Parameter: Harvest Date Value: 8/2/2002
  misc_feature: MA Experiment 20000495 PARAMETER Experiment Name: At_Guard_Cells_P Parameter: Organism Value: A. thaliana
  misc_feature: MA Experiment 20000495 PARAMETER Experiment Name: At_Guard_Cells_P Parameter: Tissue Value: Guard Cells vs. Leaves
  misc_feature: MA Experiment ID: 20000794 Result: Up-regulated in Transcription
  misc_feature: MA Experiment 20000794 PARAMETER Experiment Name: At_Petals_P Parameter: Age (day) Value: 23-25 days
  misc_feature: MA Experiment 20000794 PARAMETER Experiment Name: At_Petals_P Parameter: Plant Line Value: WS
  misc_feature: MA Experiment 20000794 PARAMETER Experiment Name: At_Petals_P Parameter: Tissue Value: Petals vs. Whole plant
gttgtcgccgtcgtcgtttctctcatttctgctctgttgtgctatcgtagcgtcgcgctcctttaaacgcgacggacgcagccttctctgttcatcgtttcgccggaagttttcttcagcggagatttattttcagctggttagtagttttgagtgactactgaggtaacaatggttgtagaaactatcgagaggtcttgtgagggttcaaagagaagacatgtgaacggtggagatatcgctgttccttgttcgggagaagagtgtagcaatggagatataaatgtagctcctggagtttcagcgaaaagagctagggtttctagagaaatgacgtttgaagatatttacggtgctgatgcattactcaatgatgacgatgatgaggatgatgattgtgattgggaacctgtgcaggcgcctatggagtttgtaaaatggtgttgtgtcaattgcactatgtcgaaccctggtgatatggtccactgttgtatatgcggtgagcacaaggaatctggcattttgaggcatggatatttagcgtctcccttttttaaagacactggtctcattgaagtcgaggagaaatatggaggaagctcatctgcaaccagctcgacagctgttgggttcgacgagagaatgttgctacactcagaatttgaagtgaaggcacaaccacatccagagagacctgatcgtcttcgagctatagctgctagtcttgccacagctggtgtttttcctggaagatgcttgcctatcaatgcaagggaaatcacgaaacaagaactccagatggtccacacttcagagcatgttgatgctgttgatactacaagccagcttctctatagctacttcacctctgacacatatgctaatgagtattcagcacgtgctgctagacttgcagcaggtttgtgcactgatctagctacagatattttcactggccgtgtaaaaaatggttttgctttggttagacctcccggtcatcatgctggcgtcaggcatgctatggggttttgccttcacaataatgcagccgttgctgcattagtagcacaagcagcaggggcaaagaaggtgctgattgtggactgggatgtccatcatggcaacgggacccaagagatattcgaacaaaacaaatctgtattgtacatatccttgcacagacatgagggaggaatcttctatcccggtactggagctgctgatgaggttggttctaatggtggggaaggttattgtgtaaatgttccatggagttgcggtggagttggggataaagactatatctttgcgtttcaacatgtggttctccccatagcttctgcattttctccagattttgtcatcatatctgcgggatttgatgcggctagaggagacccactaggatgctgtgatgtgactccggctggctattctcgaatgacacagatgttgggtgatctgtgtggtgggaaaatgctagttattctcgagggcggctacaatcttcgctccatatctgcttctgcaacagcagtgatcaaggtgcttctgggtgaaaatccggagaacgagttgcccatcgccaccacgccttcagtagccggcctgcaaactgttcttgatgtactgaatatccaactggagttctggccatcacttgctatcagctactccaaattactctcagagttggaagcacgtctgatcgaaaacaaaaaaaatcagatgaaaaggaaggttgttcgggttccgacatggtggaaatggggacgaaagaagcttttgtacaactttctctcggctcgtatgatttcaagatcaaagtgattttagaaagcattcttcctaatccgtcgtaggaattgtctacacttacttgtaaccctaactgatctgggggaatttattgcaattagggagctctgaacaatctttatcacttacatttggtagggttttatagaaagaacccttttaacctgcttacc

SEQ ID NO: 35108 - protein, 552 aa, Arabidopsis thaliana
  peptide (1)..(552): Ceres Seq. ID no. 13490833
  misc_feature (416)..(506): Homolog of NCBI NO: 34899956 NR Description: putative histone deacetylase
  misc_feature (65)..(415): Homolog of NCBI NO: 34899956 NR Description: putative histone deacetylase
  misc_feature (62)..(543): Homolog of NCBI NO: 22135465 NR Description: histone deacetylase HDA110 isoform 2 [Zea mays]
  misc_feature (62)..(543): Homolog of NCBI NO: 22135463 NR Description: histone deacetylase HDA110 isoform 1 [Zea mays]
  misc_feature (1)..(206): Homolog of NCBI NO: 11994115 NR Description: gene_id:MYF24.24~unknown protein [Arabidopsis
  misc_feature (230)..(551): Homolog of NCBI NO: 11994115 NR Description: gene_id:MYF24.24~unknown protein [Arabidopsis
  misc_feature (1)..(552): Homolog of NCBI NO: 30684970 NR Description: histone deacetylase -related [Arabidopsis
  misc_feature (1)..(552): Homolog of NCBI NO: 21554265 NR Description: histone deacetylase, putative [Arabidopsis
  misc_feature (1)..(552): Homolog of NCBI NO: 18401915 NR Description: histone deacetylase -related [Arabidopsis
  misc_feature (1)..(552): Homolog of NCBI NO: 26451468 NR Description: putative histone deacetylase [Arabidopsis
MVVETIERSCEGSKRRHVNGGDIAVPCSGEECSNGDINVAPGVSAKRARVSREMTFEDIYGADALLNDDDDEDDDCDWEPVQAPMEFVKWCCVNCTMSNPGDMVHCCICGEHKESGILRHGYLASPFFKDTGLIEVEEKYGGSSSATSSTAVGFDERMLLHSEFEVKAQPHPERPDRLRAIAASLATAGVFPGRCLPINAREITKQELQMVHTSEHVDAVDTTSQLLYSYFTSDTYANEYSARAARLAAGLCTDLATDIFTGRVKNGFALVRPPGHHAGVRHAMGFCLHNNAAVAALVAQAAGAKKVLIVDWDVHHGNGTQEIFEQNKSVLYISLHRHEGGIFYPGTGAADEVGSNGGEGYCVNVPWSCGGVGDKDYIFAFQHVVLPIASAFSPDFVIISAGFDAARGDPLGCCDVTPAGYSRMTQMLGDLCGGKMLVILEGGYNLRSISASATAVIKVLLGENPENELPIATTPSVAGLQTVLDVLNIQLEFWPSLAISYSKLLSELEARLIENKKNQMKRKVVRVPTWWKWGRKKLLYNFLSARMISRSK

SEQ ID NO: 35109 - protein, 499 aa, Arabidopsis thaliana
  peptide (1)..(499): Ceres Seq. ID no. 13490834
  misc_feature (363)..(453): Homolog of NCBI NO: 34899956 NR Description: putative histone deacetylase
  misc_feature (12)..(362): Homolog of NCBI NO: 34899956 NR Description: putative histone deacetylase
  misc_feature (9)..(490): Homolog of NCBI NO: 22135465 NR Description: histone deacetylase HDA110 isoform 2 [Zea mays]
  misc_feature (9)..(490): Homolog of NCBI NO: 22135463 NR Description: histone deacetylase HDA110 isoform 1 [Zea mays]
  misc_feature (1)..(153): Homolog of NCBI NO: 11994115 NR Description: gene_id:MYF24.24~unknown protein [Arabidopsis
  misc_feature (177)..(498): Homolog of NCBI NO: 11994115 NR Description: gene_id:MYF24.24~unknown protein [Arabidopsis
  misc_feature (1)..(499): Homolog of NCBI NO: 30684970 NR Description: histone deacetylase -related [Arabidopsis
  misc_feature (1)..(499): Homolog of NCBI NO: 21554265 NR Description: histone deacetylase, putative [Arabidopsis
  misc_feature (1)..(499): Homolog of NCBI NO: 18401915 NR Description: histone deacetylase -related [Arabidopsis
  misc_feature (1)..(499): Homolog of NCBI NO: 26451468 NR Description: putative histone deacetylase [Arabidopsis
MTFEDIYGADALLNDDDDEDDDCDWEPVQAPMEFVKWCCVNCTMSNPGDMVHCCICGEHKESGILRHGYLASPFFKDTGLIEVEEKYGGSSSATSSTAVGFDERMLLHSEFEVKAQPHPERPDRLRAIAASLATAGVFPGRCLPINAREITKQELQMVHTSEHVDAVDTTSQLLYSYFTSDTYANEYSARAARLAAGLCTDLATDIFTGRVKNGFALVRPPGHHAGVRHAMGFCLHNNAAVAALVAQAAGAKKVLIVDWDVHHGNGTQEIFEQNKSVLYISLHRHEGGIFYPGTGAADEVGSNGGEGYCVNVPWSCGGVGDKDYIFAFQHVVLPIASAFSPDFVIISAGFDAARGDPLGCCDVTPAGYSRMTQMLGDLCGGKMLVILEGGYNLRSISASATAVIKVLLGENPENELPIATTPSVAGLQTVLDVLNIQLEFWPSLAISYSKLLSELEARLIENKKNQMKRKVVRVPTWWKWGRKKLLYNFLSARMISRSK

SEQ ID NO: 35110 - protein, 468 aa, Arabidopsis thaliana
  peptide (1)..(468): Ceres Seq. ID no. 13490835
  misc_feature (332)..(422): Homolog of NCBI NO: 34899956 NR Description: putative histone deacetylase
  misc_feature (1)..(331): Homolog of NCBI NO: 34899956 NR Description: putative histone deacetylase
  misc_feature (1)..(459): Homolog of NCBI NO: 22135465 NR Description: histone deacetylase HDA110 isoform 2 [Zea mays]
  misc_feature (1)..(459): Homolog of NCBI NO: 22135463 NR Description: histone deacetylase HDA110 isoform 1 [Zea mays]
  misc_feature (1)..(122): Homolog of NCBI NO: 11994115 NR Description: gene_id:MYF24.24~unknown protein [Arabidopsis
  misc_feature (146)..(467): Homolog of NCBI NO: 11994115 NR Description: gene_id:MYF24.24~unknown protein [Arabidopsis
  misc_feature (1)..(468): Homolog of NCBI NO: 30684970 NR Description: histone deacetylase -related [Arabidopsis
  misc_feature (1)..(468): Homolog of NCBI NO: 21554265 NR Description: histone deacetylase, putative [Arabidopsis
  misc_feature (1)..(468): Homolog of NCBI NO: 18401915 NR Description: histone deacetylase -related [Arabidopsis
  misc_feature (1)..(468): Homolog of NCBI NO: 26451468 NR Description: putative histone deacetylase [Arabidopsis
MEFVKWCCVNCTMSNPGDMVHCCICGEHKESGILRHGYLASPFFKDTGLIEVEEKYGGSSSATSSTAVGFDERMLLHSEFEVKAQPHPERPDRLRAIAASLATAGVFPGRCLPINAREITKQELQMVHTSEHVDAVDTTSQLLYSYFTSDTYANEYSARAARLAAGLCTDLATDIFTGRVKNGFALVRPPGHHAGVRHAMGFCLHNNAAVAALVAQAAGAKKVLIVDWDVHHGNGTQEIFEQNKSVLYISLHRHEGGIFYPGTGAADEVGSNGGEGYCVNVPWSCGGVGDKDYIFAFQHVVLPIASAFSPDFVIISAGFDAARGDPLGCCDVTPAGYSRMTQMLGDLCGGKMLVILEGGYNLRSISASATAVIKVLLGENPENELPIATTPSVAGLQTVLDVLNIQLEFWPSLAISYSKLLSELEARLIENKKNQMKRKVVRVPTWWKWGRKKLLYNFLSARMISRSK

SEQ ID NO: 35111 - DNA, 1339 bp, Arabidopsis thaliana
  misc_feature (1)..(1339): Ceres Seq. ID no. 12334128
  misc_feature: MA Experiment ID: 108488 Result: Down-regulated in Transcription
  misc_feature: MA Experiment ID: 108573 Result: Up-regulated in Transcription
  misc_feature: MA Experiment 108573 PARAMETER Experiment Name: At_Drought_cDNA_P Parameter: Timepoint (hr) Value: 6
  misc_feature: MA Experiment 108573 PARAMETER Experiment Name: At_Drought_cDNA_P Parameter: Tissue Value: Aerial
  misc_feature: MA Experiment 108573 PARAMETER Experiment Name: At_Drought_cDNA_P Parameter: Treatment Value: Drought vs. No Drought
  misc_feature: MA Experiment ID: 108574 Result: Down-regulated in Transcription
  misc_feature: MA Experiment 108574 PARAMETER Experiment Name: At_Wounding__cDNA_P Parameter: Timepoint (hr) Value: 1
  misc_feature: MA Experiment 108574 PARAMETER Experiment Name: At_Wounding__cDNA_P Parameter: Tissue Value: Aerial
  misc_feature: MA Experiment 108574 PARAMETER Experiment Name: At_Wounding__cDNA_P Parameter: Treatment Value: Wounding vs. No Wounding
  misc_feature: MA Experiment ID: 108579 Result: Down-regulated in Transcription
  misc_feature: MA Experiment 108579 PARAMETER Experiment Name: At_4deg_Cold_cDNA_P Parameter: Temperature (deg C) Value: 4 vs. 22
  misc_feature: MA Experiment 108579 PARAMETER Experiment Name: At_4deg_Cold_cDNA_P Parameter: Timepoint (hr) Value: 6
  misc_feature: MA Experiment 108579 PARAMETER Experiment Name: At_4deg_Cold_cDNA_P Parameter: Tissue Value: Aerial
  misc_feature: MA Experiment ID: 108594 Result: Up-regulated in Transcription
  misc_feature: MA Experiment 108594 PARAMETER Experiment Name: At_Ler-rhl_Root_cDNA_P Parameter: Plant Line Value: null
  misc_feature: MA Experiment ID: 20000069 Result: Up-regulated in Transcription
  misc_feature: MA Experiment 20000069 PARAMETER Experiment Name: At_100uM_ABA_Mutants_cDNA_P Parameter: Plant Line Value: CS23
  misc_feature: MA Experiment 20000069 PARAMETER Experiment Name: At_100uM_ABA_Mutants_cDNA_P Parameter: Timepoint (hr) Value: 6
  misc_feature: MA Experiment 20000069 PARAMETER Experiment Name: At_100uM_ABA_Mutants_cDNA_P Parameter: Tissue Value: Aerial
  misc_feature: MA Experiment 20000069 PARAMETER Experiment Name: At_100uM_ABA_Mutants_cDNA_P Parameter: Treatment Value: 100uM ABA vs. No Treatment
  misc_feature: MA Experiment ID: 20000071 Result: Up-regulated in Transcription
  misc_feature: MA Experiment 20000071 PARAMETER Experiment Name: At_100uM_ABA_Mutants_cDNA_P Parameter: Plant Line Value: CS8104
  misc_feature: MA Experiment 20000071 PARAMETER Experiment Name: At_100uM_ABA_Mutants_cDNA_P Parameter: Timepoint (hr) Value: 6
  misc_feature: MA Experiment 20000071 PARAMETER Experiment Name: At_100uM_ABA_Mutants_cDNA_P Parameter: Tissue Value: Aerial
  misc_feature: MA Experiment 20000071 PARAMETER Experiment Name: At_100uM_ABA_Mutants_cDNA_P Parameter: Treatment Value: 100uM ABA vs. No Treatment
  misc_feature: MA Experiment ID: 20000179 Result: Up-regulated in Transcription
  misc_feature: MA Experiment 20000179 PARAMETER Experiment Name: At_Germinating_Seeds_P Parameter: Age (hr) Value: 6 vs. 0
  misc_feature: MA Experiment 20000179 PARAMETER Experiment Name: At_Germinating_Seeds_P Parameter: Tissue Value: Germinating Seeds
  misc_feature: MA Experiment ID: 20000184 Result: Down-regulated in Transcription
  misc_feature: MA Experiment 20000184 PARAMETER Experiment Name: At_Shoots__P Parameter: Age (day) Value: 7
  misc_feature: MA Experiment 20000184 PARAMETER Experiment Name: At_Shoots__P Parameter: Tissue Value: Shoots vs. Whole Plant
  misc_feature: MA Experiment ID: 20000213 Result: Down-regulated in Transcription
  misc_feature: MA Experiment 20000213 PARAMETER Experiment Name: At_4deg_Cold_P Parameter: Timepoint (hr) Value: 2
  misc_feature: MA Experiment ID: 20000224 Result: Down-regulated in Transcription
  misc_feature: MA Experiment ID: 20000437 Result: Up-regulated in Transcription
  misc_feature: MA Experiment 20000437 PARAMETER Experiment Name: At_Drought_P Parameter: Age (day) Value: 8
  misc_feature: MA Experiment 20000437 PARAMETER Experiment Name: At_Drought_P Parameter: Organism Value: A. thaliana
  misc_feature: MA Experiment 20000437 PARAMETER Experiment Name: At_Drought_P Parameter: Plant Line Value: WS
  misc_feature: MA Experiment 20000437 PARAMETER Experiment Name: At_Drought_P Parameter: Timepoint (hr) Value: 24
  misc_feature: MA Experiment 20000437 PARAMETER Experiment Name: At_Drought_P Parameter: Tissue Value: Whole Plant
  misc_feature: MA Experiment 20000437 PARAMETER Experiment Name: At_Drought_P Parameter: Treatment Value: Drought vs. No Drought
  misc_feature: MA Experiment ID: 20000573 Result: Up-regulated in Transcription
  misc_feature: MA Experiment 20000573 PARAMETER Experiment Name: At_100uM_ABA_Mutants__P Parameter: Organism Value: A. thaliana
  misc_feature: MA Experiment 20000573 PARAMETER Experiment Name: At_100uM_ABA_Mutants__P Parameter: Plant Line Value: CS22 vs. Ler wt
  misc_feature: MA Experiment 20000573 PARAMETER Experiment Name: At_100uM_ABA_Mutants__P Parameter: Timepoint (hr) Value: N/A
  misc_feature: MA Experiment 20000573 PARAMETER Experiment Name: At_100uM_ABA_Mutants__P Parameter: Tissue Value: Whole Plant
  misc_feature: MA Experiment 20000573 PARAMETER Experiment Name: At_100uM_ABA_Mutants__P Parameter: Treatment Value: None
  misc_feature: MA Experiment ID: 20000794 Result: Up-regulated in Transcription
  misc_feature: MA Experiment 20000794 PARAMETER Experiment Name: At_Petals_P Parameter: Age (day) Value: 23-25 days
  misc_feature: MA Experiment 20000794 PARAMETER Experiment Name: At_Petals_P Parameter: Plant Line Value: WS
  misc_feature: MA Experiment 20000794 PARAMETER Experiment Name: At_Petals_P Parameter: Tissue Value: Petals vs. Whole plant
  misc_feature: MA Experiment ID: 20001248 Result: Up-regulated in Transcription
  misc_feature: MA Experiment 20001248 PARAMETER Experiment Name: At_Far-red-induction_P Parameter: Age (day) Value: 7
  misc_feature: MA Experiment 20001248 PARAMETER Experiment Name: At_Far-red-induction_P Parameter: Light Value: Far-red vs. White
  misc_feature: MA Experiment 20001248 PARAMETER Experiment Name: At_Far-red-induction_P Parameter: Organism Value: A. thaliana
  misc_feature: MA Experiment 20001248 PARAMETER Experiment Name: At_Far-red-induction_P Parameter: Plant Line Value: Columbia
  misc_feature: MA Experiment 20001248 PARAMETER Experiment Name: At_Far-red-induction_P Parameter: Timepoint (hr) Value: 4
  misc_feature: MA Experiment 20001248 PARAMETER Experiment Name: At_Far-red-induction_P Parameter: Tissue Value: Whole Plant
  misc_feature: MA Experiment ID: 20001450 Result: Up-regulated in Transcription
  misc_feature: MA Experiment 20001450 PARAMETER Experiment Name: At_Far-red-induction_P Parameter: Age (day) Value: 7
  misc_feature: MA Experiment 20001450 PARAMETER Experiment Name: At_Far-red-induction_P Parameter: Light Value: Far-red vs. White
  misc_feature: MA Experiment 20001450 PARAMETER Experiment Name: At_Far-red-induction_P Parameter: Organism Value: A. thaliana
  misc_feature: MA Experiment 20001450 PARAMETER Experiment Name: At_Far-red-induction_P Parameter: Plant Line Value: Columbia
  misc_feature: MA Experiment 20001450 PARAMETER Experiment Name: At_Far-red-induction_P Parameter: Timepoint (hr) Value: 8
  misc_feature: MA Experiment 20001450 PARAMETER Experiment Name: At_Far-red-induction_P Parameter: Tissue Value: Whole Plant
  misc_feature: MA Experiment ID: 20001451 Result: Up-regulated in Transcription
  misc_feature: MA Experiment 20001451 PARAMETER Experiment Name: At_Far-red-induction_P Parameter: Age (day) Value: 7
  misc_feature: MA Experiment 20001451 PARAMETER Experiment Name: At_Far-red-induction_P Parameter: Light Value: Far-red vs. White
  misc_feature: MA Experiment 20001451 PARAMETER Experiment Name: At_Far-red-induction_P Parameter: Organism Value: A. thaliana
  misc_feature: MA Experiment 20001451 PARAMETER Experiment Name: At_Far-red-induction_P Parameter: Plant Line Value: Columbia
  misc_feature: MA Experiment 20001451 PARAMETER Experiment Name: At_Far-red-induction_P Parameter: Timepoint (hr) Value: 24
  misc_feature: MA Experiment 20001451 PARAMETER Experiment Name: At_Far-red-induction_P Parameter: Tissue Value: Whole Plant
  misc_feature: MA Experiment ID: 20001904 Result: Up-regulated in Transcription
  misc_feature: MA Experiment 20001904 PARAMETER Experiment Name: At_Drought_Reproduction_P Parameter: Age (day) Value: 37
  misc_feature: MA Experiment 20001904 PARAMETER Experiment Name: At_Drought_Reproduction_P Parameter: Organism Value: A. thaliana
  misc_feature: MA Experiment 20001904 PARAMETER Experiment Name: At_Drought_Reproduction_P Parameter: Plant Line Value: WS
  misc_feature: MA Experiment 20001904 PARAMETER Experiment Name: At_Drought_Reproduction_P Parameter: Timepoint (day) Value: 7
  misc_feature: MA Experiment 20001904 PARAMETER Experiment Name: At_Drought_Reproduction_P Parameter: Tissue Value: Rosettes
  misc_feature: MA Experiment 20001904 PARAMETER Experiment Name: At_Drought_Reproduction_P Parameter: Treatment Value: Drought vs. No Drought
  misc_feature: MA Experiment ID: 20001905 Result: Up-regulated in Transcription
  misc_feature: MA Experiment 20001905 PARAMETER Experiment Name: At_Drought_Reproduction_P Parameter: Age (day) Value: 40
  misc_feature: MA Experiment 20001905 PARAMETER Experiment Name: At_Drought_Reproduction_P Parameter: Organism Value: A. thaliana
  misc_feature: MA Experiment 20001905 PARAMETER Experiment Name: At_Drought_Reproduction_P Parameter: Plant Line Value: WS
  misc_feature: MA Experiment 20001905 PARAMETER Experiment Name: At_Drought_Reproduction_P Parameter: Timepoint (day) Value: 10
  misc_feature: MA Experiment 20001905 PARAMETER Experiment Name: At_Drought_Reproduction_P Parameter: Tissue Value: Rosettes
  misc_feature: MA Experiment 20001905 PARAMETER Experiment Name: At_Drought_Reproduction_P Parameter: Treatment Value: Drought vs. No Drought
  misc_feature: MA Experiment ID: 20001911 Result: Up-regulated in Transcription
  misc_feature: MA Experiment 20001911 PARAMETER Experiment Name: At_Drought_Reproduction_P Parameter: Age (day) Value: 40
  misc_feature: MA Experiment 20001911 PARAMETER Experiment Name: At_Drought_Reproduction_P Parameter: Organism Value: A. thaliana
  misc_feature: MA Experiment 20001911 PARAMETER Experiment Name: At_Drought_Reproduction_P Parameter: Plant Line Value: WS
  misc_feature: MA Experiment 20001911 PARAMETER Experiment Name: At_Drought_Reproduction_P Parameter: Timepoint (day) Value: 10
  misc_feature: MA Experiment 20001911 PARAMETER Experiment Name: At_Drought_Reproduction_P Parameter: Tissue Value: Flowers
  misc_feature: MA Experiment 20001911 PARAMETER Experiment Name: At_Drought_Reproduction_P Parameter: Treatment Value: Drought vs. No Drought
agaatctgtttctttcttcacccaccaaaagtagcaaacctttgccacctaaaaatcttaccagttgggtgaaagttgccaaaatagagcttgcttttgtcgcaatcctatatttttcagattgattgttggtgggtttgtgtaaatggcggctcttttaggcagatcctgccggaaactgagttttccgagcttgactcacggagctaggagggtatcgacggaaactggaaaaccattgaatctatactctgctattaatcaagcgcttcacatcgctttggacaccgatcctcggtcttatgtctttggggaagacgttggctttggtggagtctttcgctgtacaactggtttagctgaacgattcgggaaaaaccgtgtcttcaatactcctctttgtgagcagggcattgttggatttggcattggtctagcagcaatgggtaatcgagcaattgtagagattcagtttgcagattatatatatcctgcttttgatcagattgttaatgaagctgcaaagttcagataccgaagtggtaaccaattcaactgtggaggacttacgataagagcaccatatggagcagttggtcatggtggacattaccattcacaatcccctgaagctttcttttgccatgtccctggtattaaggttgttatccctcggagtccacgagaagcaaagggactgttgttgtcatgtatccgtgatccaaatcccgttgttttcttcgaaccaaagtggctgtatcgtcaagcagtagaagaagtccctgagcatgactatatgatacctttatcagaagcagaggttataagagaaggcaatgacattacactggttggatggggagctcagcttaccgttatggaacaagcttgtctggacgcggaaaaggaaggaatatcatgtgaactgatagatctcaagacactgcttccttgggacaaagaaaccgttgaggcttcagttaaaaagactggcagacttcttataagccatgaagctcctgtaacaggaggttttggagcagagatctctgcaacaattctggaacgttgctttttgaagttagaagctccagtaagcagagtttgtggtctggatactccatttcctcttgtgtttgaaccattctacatgcccaccaagaacaagatattggatgcaatcaaatcgactgtgaattactagccgtactatctgtagtttactgtttacactaggactaatgtaatcgcatgtctttgttatcaattcgtctaatgtaacactaccgattaactttaatgaatttcaagataacgaaaacatgttataataggactg

SEQ ID NO: 35112 - protein, 352 aa, Arabidopsis thaliana
  peptide (1)..(352): Ceres Seq. ID no. 12334129
  misc_feature (222)..(342): Pfam Name: Transketolase, C-terminal domain Pfam Description: Transketolase, C-terminal domain
  misc_feature (27)..(352): Homolog of NCBI NO: 346979 NR Description: 3-methyl-2-oxobutanoate dehydrogenase (lipoamide)
  misc_feature (32)..(352): Homolog of NCBI NO: 40353220 NR Description: branched chain ketoacid dehydrogenase E1, beta
  misc_feature (27)..(352): Homolog of NCBI NO: 162640 NR Description: branched chain alpha-keto acid dehydrogenase
  misc_feature (27)..(352): Homolog of NCBI NO: 481864 NR Description: 3-methyl-2-oxobutanoate dehydrogenase (lipoamide)
  misc_feature (1)..(352): Homolog of NCBI NO: 27806223 NR Description: branched chain keto acid dehydrogenase E1, beta
  misc_feature (27)..(352): Homolog of NCBI NO: 12964600 NR Description: branched-chain alpha-keto acid dehydrogenase
  misc_feature (23)..(352): Homolog of NCBI NO: 34395021 NR Description: putative branched-chain alpha-keto acid
  misc_feature (2)..(352): Homolog of NCBI NO: 15231242 NR Description: branched chain alpha-keto acid dehydrogenase E1
  misc_feature (1)..(352): Homolog of NCBI NO: 15222731 NR Description: branched-chain alpha-keto acid decarboxylase E1
  misc_feature (1)..(352): Homolog of NCBI NO: 11252215 NR Description: 3-methyl-2-oxobutanoate dehydrogenase (lipoamide)
MAALLGRSCRKLSFPSLTHGARRVSTETGKPLNLYSAINQALHIALDTDPRSYVFGEDVGFGGVFRCTTGLAERFGKNRVFNTPLCEQGIVGFGIGLAAMGNRAIVEIQFADYIYPAFDQIVNEAAKFRYRSGNQFNCGGLTIRAPYGAVGHGGHYHSQSPEAFFCHVPGIKVVIPRSPREAKGLLLSCIRDPNPVVFFEPKWLYRQAVEEVPEHDYMIPLSEAEVIREGNDITLVGWGAQLTVMEQACLDAEKEGISCELIDLKTLLPWDKETVEASVKKTGRLLISHEAPVTGGFGAEISATILERCFLKLEAPVSRVCGLDTPFPLVFEPFYMPTKNKILDAIKSTVNY

SEQ ID NO: 35113 - protein, 253 aa, Arabidopsis thaliana
  peptide (1)..(253): Ceres Seq. ID no. 12334130
  misc_feature (123)..(243): Pfam Name: Transketolase, C-terminal domain Pfam Description: Transketolase, C-terminal domain
  misc_feature (1)..(253): Homolog of NCBI NO: 346979 NR Description: 3-methyl-2-oxobutanoate dehydrogenase (lipoamide)
  misc_feature (1)..(253): Homolog of NCBI NO: 40353220 NR Description: branched chain ketoacid dehydrogenase E1, beta
  misc_feature (1)..(253): Homolog of NCBI NO: 162640 NR Description: branched chain alpha-keto acid dehydrogenase
  misc_feature (1)..(253): Homolog of NCBI NO: 481864 NR Description: 3-methyl-2-oxobutanoate dehydrogenase (lipoamide)
  misc_feature (1)..(253): Homolog of NCBI NO: 27806223 NR Description: branched chain keto acid dehydrogenase E1, beta
  misc_feature (1)..(253): Homolog of NCBI NO: 12964600 NR Description: branched-chain alpha-keto acid dehydrogenase
  misc_feature (1)..(253): Homolog of NCBI NO: 34395021 NR Description: putative branched-chain alpha-keto acid
  misc_feature (1)..(253): Homolog of NCBI NO: 15231242 NR Description: branched chain alpha-keto acid dehydrogenase E1
  misc_feature (1)..(253): Homolog of NCBI NO: 15222731 NR Description: branched-chain alpha-keto acid decarboxylase E1
  misc_feature (1)..(253): Homolog of NCBI NO: 11252215 NR Description: 3-methyl-2-oxobutanoate dehydrogenase (lipoamide)
MGNRAIVEIQFADYIYPAFDQIVNEAAKFRYRSGNQFNCGGLTIRAPYGAVGHGGHYHSQSPEAFFCHVPGIKVVIPRSPREAKGLLLSCIRDPNPVVFFEPKWLYRQAVEEVPEHDYMIPLSEAEVIREGNDITLVGWGAQLTVMEQACLDAEKEGISCELIDLKTLLPWDKETVEASVKKTGRLLISHEAPVTGGFGAEISATILERCFLKLEAPVSRVCGLDTPFPLVFEPFYMPTKNKILDAIKSTVNY

SEQ ID NO: 35114 - DNA, 1093 bp, Arabidopsis thaliana
  misc_feature (1)..(1093): Ceres Seq. ID no. 12334332
  misc_feature: MA Experiment ID: 108461 Result: Up-regulated in Transcription
  misc_feature: MA Experiment 108461 PARAMETER Experiment Name: At_Germinating_Seeds_cDNA_P Parameter: Age (day) Value: 1 vs. 0
  misc_feature: MA Experiment 108461 PARAMETER Experiment Name: At_Germinating_Seeds_cDNA_P Parameter: Tissue Value: Germinating Seeds
  misc_feature: MA Experiment ID: 108595 Result: Down-regulated in Transcription
  misc_feature: MA Experiment 108595 PARAMETER Experiment Name: At_Ler-pi_Ovule_cDNA_P Parameter: Plant Line Value: null
  misc_feature: MA Experiment ID: 20000069 Result: Up-regulated in Transcription
  misc_feature: MA Experiment 20000069 PARAMETER Experiment Name: At_100uM_ABA_Mutants_cDNA_P Parameter: Plant Line Value: CS23
  misc_feature: MA Experiment 20000069 PARAMETER Experiment Name: At_100uM_ABA_Mutants_cDNA_P Parameter: Timepoint (hr) Value: 6
  misc_feature: MA Experiment 20000069 PARAMETER Experiment Name: At_100uM_ABA_Mutants_cDNA_P Parameter: Tissue Value: Aerial
  misc_feature: MA Experiment 20000069 PARAMETER Experiment Name: At_100uM_ABA_Mutants_cDNA_P Parameter: Treatment Value: 100uM ABA vs. No Treatment
  misc_feature: MA Experiment ID: 20000070 Result: Up-regulated in Transcription
  misc_feature: MA Experiment 20000070 PARAMETER Experiment Name: At_100uM_ABA_Mutants_cDNA_P Parameter: Plant Line Value: CS24
  misc_feature: MA Experiment 20000070 PARAMETER Experiment Name: At_100uM_ABA_Mutants_cDNA_P Parameter: Timepoint (hr) Value: 6
  misc_feature: MA Experiment 20000070 PARAMETER Experiment Name: At_100uM_ABA_Mutants_cDNA_P Parameter: Tissue Value: Aerial
  misc_feature: MA Experiment 20000070 PARAMETER Experiment Name: At_100uM_ABA_Mutants_cDNA_P Parameter: Treatment Value: 100uM ABA vs. No Treatment
  misc_feature: MA Experiment ID: 20000071 Result: Up-regulated in Transcription
  misc_feature: MA Experiment 20000071 PARAMETER Experiment Name: At_100uM_ABA_Mutants_cDNA_P Parameter: Plant Line Value: CS8104
  misc_feature: MA Experiment 20000071 PARAMETER Experiment Name: At_100uM_ABA_Mutants_cDNA_P Parameter: Timepoint (hr) Value: 6
  misc_feature: MA Experiment 20000071 PARAMETER Experiment Name: At_100uM_ABA_Mutants_cDNA_P Parameter: Tissue Value: Aerial
  misc_feature: MA Experiment 20000071 PARAMETER Experiment Name: At_100uM_ABA_Mutants_cDNA_P Parameter: Treatment Value: 100uM ABA vs. No Treatment
  misc_feature: MA Experiment ID: 20000089 Result: Up-regulated in Transcription
  misc_feature: MA Experiment ID: 20000117 Result: Up-regulated in Transcription
  misc_feature: MA Experiment 20000117 PARAMETER Experiment Name: At_100uM_ABA_Mutants_cDNA_P Parameter: Plant Line Value: Columbia
  misc_feature: MA Experiment 20000117 PARAMETER Experiment Name: At_100uM_ABA_Mutants_cDNA_P Parameter: Timepoint (hr) Value: 6
  misc_feature: MA Experiment 20000117 PARAMETER Experiment Name: At_100uM_ABA_Mutants_cDNA_P Parameter: Tissue Value: Aerial
  misc_feature: MA Experiment 20000117 PARAMETER Experiment Name: At_100uM_ABA_Mutants_cDNA_P Parameter: Treatment Value: 100uM ABA vs. No Treatment
  misc_feature: MA Experiment ID: 20000180 Result: Up-regulated in Transcription
  misc_feature: MA Experiment 20000180 PARAMETER Experiment Name: At_Germinating_Seeds_P Parameter: Age (hr) Value: 24 vs. 0
  misc_feature: MA Experiment 20000180 PARAMETER Experiment Name: At_Germinating_Seeds_P Parameter: Tissue Value: Germinating Seeds
atactgggaaactctcaattctgagcagatatctacccaatcacggattgaggagagaagcaagaagaagaaatggagattacactgaacagtggcttcaaaatgccgatcatcggcttaggagtttggagaatggagaaagaagagcttcgagaccttatcatcgatgccatcaagatcggttatcgtcatctcgactgtgctgctaattataagaacgaagctgaagttggtgaggctcttacagaagcattcacgacaggtcttgtcaagagggaggatctcttcattacgactaagctatggagttcagaccatggccatgttattgaggcatgcaaagacagtctcaagaaacttcaacttgattacctcaaccttttgctcgttcatatacccatagctacaaaacacacgggaataggaacaaccgatagtgccttgggggatgatggggtattggacatagatacaacaatctctctggaaactacatggcacgacatggaaaagcttgtttccatgggtttggtccgcagcattggactcagtaactatgatgtctttctaacgagagattgtttggcttactccaagatcaaacctgcagtgaatcagatcgagacacatccttacttccaacgcgattctctagtcaaattctgccagaaacacaatatctgtgtcactgctcatactcctctgggaggtgccacagccaatgccgaatggtttggcaccgtgtcatgtctggatgacccagttctcaaagatgtggccgagaagtacaaacagacagtggcacagattgtcctgaggtggggaattcagaggaagacggtggtgataccaaagacatcgaagcctgaaagattggaagagaattttcaggttttcgacttccaactatcgaaagaggacatggaagtgatcaaaagcatgaagaggaattaccgcacgcaccaaacagccaagttttggggcattgagctctacgcttgatcacacacacacactctctctctctctatctatctatatgaataaatgaagcttaagaatataatatcagataacttcaacttttttaagg

SEQ ID NO: 35115 - protein, 309 aa, Arabidopsis thaliana
  peptide (1)..(309): Ceres Seq. ID no. 12334333
  misc_feature (45)..(307): Homolog of NCBI NO: 19310922 NR Description: NADP dependent sorbitol 6-phosphate dehydrogenase
  misc_feature (45)..(309): Homolog of NCBI NO: 19310934 NR Description: NADP dependent sorbitol 6-phosphate dehydrogenase
  misc_feature (45)..(309): Homolog of NCBI NO: 19310926 NR Description: NADP dependent sorbitol 6-phosphate dehydrogenase
  misc_feature (3)..(309): Homolog of NCBI NO: 134153 NR Description: NADP-dependent D-sorbitol-6-phosphate
  misc_feature (1)..(309): Homolog of NCBI NO: 1835701 NR Description: NADPH-dependent mannose 6-phosphate reductase
  misc_feature (1)..(309): Homolog of NCBI NO: 10334991 NR Description: NADPH-dependent mannose 6-phosphate reductase
  misc_feature (1)..(309): Homolog of NCBI NO: 21592829 NR Description: putative NADPH dependent mannose 6-phosphate
  misc_feature (1)..(309): Homolog of NCBI NO: 15226489 NR Description: mannose 6-phosphate reductase (NADPH-dependent),
  misc_feature (1)..(309): Homolog of NCBI NO: 15226502 NR Description: mannose 6-phosphate reductase (NADPH-dependent),
  misc_feature (1)..(309): Homolog of NCBI NO: 21554266 NR Description: putative NADPH dependent mannose 6-phosphate
MEITLNSGFKMPIIGLGVWRMEKEELRDLIIDAIKIGYRHLDCAANYKNEAEVGEALTEAFTTGLVKREDLFITTKLWSSDHGHVIEACKDSLKKLQLDYLNLLLVHIPIATKHTGIGTTDSALGDDGVLDIDTTISLETTWHDMEKLVSMGLVRSIGLSNYDVFLTRDCLAYSKIKPAVNQIETHPYFQRDSLVKFCQKHNICVTAHTPLGGATANAEWFGTVSCLDDPVLKDVAEKYKQTVAQIVLRWGIQRKTVVIPKTSKPERLEENFQVFDFQLSKEDMEVIKSMKRNYRTHQTAKFWGIELYA

SEQ ID NO: 35116 - protein, 299 aa, Arabidopsis thaliana
  peptide (1)..(299): Ceres Seq. ID no. 12334334
  misc_feature (35)..(297): Homolog of NCBI NO: 19310922 NR Description: NADP dependent sorbitol 6-phosphate dehydrogenase
  misc_feature (35)..(299): Homolog of NCBI NO: 19310934 NR Description: NADP dependent sorbitol 6-phosphate dehydrogenase
  misc_feature (35)..(299): Homolog of NCBI NO: 19310926 NR Description: NADP dependent sorbitol 6-phosphate dehydrogenase
  misc_feature (1)..(299): Homolog of NCBI NO: 134153 NR Description: NADP-dependent D-sorbitol-6-phosphate
  misc_feature (1)..(299): Homolog of NCBI NO: 1835701 NR Description: NADPH-dependent mannose 6-phosphate reductase
  misc_feature (1)..(299): Homolog of NCBI NO: 10334991 NR Description: NADPH-dependent mannose 6-phosphate reductase
  misc_feature (1)..(299): Homolog of NCBI NO: 21592829 NR Description: putative NADPH dependent mannose 6-phosphate
  misc_feature (1)..(299): Homolog of NCBI NO: 15226489 NR Description: mannose 6-phosphate reductase (NADPH-dependent),
  misc_feature (1)..(299): Homolog of NCBI NO: 15226502 NR Description: mannose 6-phosphate reductase (NADPH-dependent),
  misc_feature (1)..(299): Homolog of NCBI NO: 21554266 NR Description: putative NADPH dependent mannose 6-phosphate
MPIIGLGVWRMEKEELRDLIIDAIKIGYRHLDCAANYKNEAEVGEALTEAFTTGLVKREDLFITTKLWSSDHGHVIEACKDSLKKLQLDYLNLLLVHIPIATKHTGIGTTDSALGDDGVLDIDTTISLETTWHDMEKLVSMGLVRSIGLSNYDVFLTRDCLAYSKIKPAVNQIETHPYFQRDSLVKFCQKHNICVTAHTPLGGATANAEWFGTVSCLDDPVLKDVAEKYKQTVAQIVLRWGIQRKTVVIPKTSKPERLEENFQVFDFQLSKEDMEVIKSMKRNYRTHQTAKFWGIELYA

SEQ ID NO: 35117 - protein, 289 aa, Arabidopsis thaliana
  peptide (1)..(289): Ceres Seq. ID no. 12334335
  misc_feature (25)..(287): Homolog of NCBI NO: 19310922 NR Description: NADP dependent sorbitol 6-phosphate dehydrogenase
  misc_feature (25)..(289): Homolog of NCBI NO: 19310934 NR Description: NADP dependent sorbitol 6-phosphate dehydrogenase
  misc_feature (25)..(289): Homolog of NCBI NO: 19310926 NR Description: NADP dependent sorbitol 6-phosphate dehydrogenase
  misc_feature (1)..(289): Homolog of NCBI NO: 134153 NR Description: NADP-dependent D-sorbitol-6-phosphate
  misc_feature (1)..(289): Homolog of NCBI NO: 1835701 NR Description: NADPH-dependent mannose 6-phosphate reductase
  misc_feature (1)..(289): Homolog of NCBI NO: 10334991 NR Description: NADPH-dependent mannose 6-phosphate reductase
  misc_feature (1)..(289): Homolog of NCBI NO: 21592829 NR Description: putative NADPH dependent mannose 6-phosphate
  misc_feature (1)..(289): Homolog of NCBI NO: 15226489 NR Description: mannose 6-phosphate reductase (NADPH-dependent),
  misc_feature (1)..(289): Homolog of NCBI NO: 15226502 NR Description: mannose 6-phosphate reductase (NADPH-dependent),
  misc_feature (1)..(289): Homolog of NCBI NO: 21554266 NR Description: putative NADPH dependent mannose 6-phosphate
MEKEELRDLIIDAIKIGYRHLDCAANYKNEAEVGEALTEAFTTGLVKREDLFITTKLWSSDHGHVIEACKDSLKKLQLDYLNLLLVHIPIATKHTGIGTTDSALGDDGVLDIDTTISLETTWHDMEKLVSMGLVRSIGLSNYDVFLTRDCLAYSKIKPAVNQIETHPYFQRDSLVKFCQKHNICVTAHTPLGGATANAEWFGTVSCLDDPVLKDVAEKYKQTVAQIVLRWGIQRKTVVIPKTSKPERLEENFQVFDFQLSKEDMEVIKSMKRNYRTHQTAKFWGIELYA

SEQ ID NO: 35118 - DNA, 750 bp, Arabidopsis thaliana
  misc_feature (1)..(750): Ceres Seq. ID no. 12348427
  misc_feature: MA Experiment ID: 108434 Result: Down-regulated in Transcription
  misc_feature: MA Experiment 108434 PARAMETER Experiment Name: At_Root_Tips_cDNA_P Parameter: Tissue Value: Root Tips
  misc_feature: MA Experiment ID: 20000185 Result: Up-regulated in Transcription
  misc_feature: MA Experiment 20000185 PARAMETER Experiment Name: At_Roots__P Parameter: Age (day) Value: 7 vs. 21
  misc_feature: MA Experiment 20000185 PARAMETER Experiment Name: At_Roots__P Parameter: Organism Value: A. thaliana
  misc_feature: MA Experiment 20000185 PARAMETER Experiment Name: At_Roots__P Parameter: Tissue Value: Roots vs. Whole Plant
  misc_feature: MA Experiment ID: 20000439 Result: Up-regulated in Transcription
  misc_feature: MA Experiment 20000439 PARAMETER Experiment Name: At_Roots__P Parameter: Age (day) Value: 14 vs. 21
  misc_feature: MA Experiment 20000439 PARAMETER Experiment Name: At_Roots__P Parameter: Organism Value: A. thaliana
  misc_feature: MA Experiment 20000439 PARAMETER Experiment Name: At_Roots__P Parameter: Tissue Value: Roots vs. Whole Plant
aaaaatcttctctatcctttctcgagagaatatggatcagatcttcaacaaggttggatcctactggttaggccaaaaggctaacaagcagtttgactccgtcggcaacgatctcaactcggtgtcaacgagcattgaaggaggaacaaaatggttggtcaacaaaatcaaagggaaaatgcagaagccgttgcctgagttactaaaagaatatgatttgccgattggaatcttcccgggagatgctacaaactacgagttcgatgaagagacaaagaaactaaccgttttgatcccatcgatatgcgaagttggatacaaggattcatcagtgttgaagttcacaacaacagtaacaggacatcttgagaaaggaaagctaacagatgtggaaggaatcaagacaaaagtaatgatatgggtaaaagtgacaagcatatctacagatgcatcaaaggtctatttcactgcaggaatgaagaagagcagaagcagagatgcttatgaggttcaaagaaatggtctccgagtcgataaattctaacacctgtctgtgttctgtctggttccaaagtttcaagcttttccatttacgttttggttttgatttaaagcctcctactgtgagtatacatcaacttatttataaatctgatcataacttcaatatggccggagcaattctactttgttctttttttttccaattgtaaagaactactattcgtgtgctcaatgatttggtcttac

SEQ ID NO: 35119 - protein, 180 aa, Arabidopsis thaliana
  peptide (1)..(180): Ceres Seq. ID no. 12348428
  misc_feature (42)..(180): Pfam Name: Protein of unknown function, DUF538 Pfam Description: Protein of unknown function, DUF538
  misc_feature (66)..(158): Homolog of NCBI NO: 28273408 NR Description: unknown protein [Oryza sativa (japonica
  misc_feature (67)..(178): Homolog of NCBI NO: 18379014 NR Description: Expressed protein
  misc_feature (17)..(177): Homolog of NCBI NO: 21553803 NR Description: unknown [Arabidopsis thaliana]
  misc_feature (17)..(177): Homolog of NCBI NO: 18395537 NR Description: expressed protein
  misc_feature (11)..(180): Homolog of NCBI NO: 34914210 NR Description: OSJNBb0049O23.18 [Oryza sativa (japonica
  misc_feature (11)..(180): Homolog of NCBI NO: 40642817 NR Description: cp protein [Celosia cristata]
  misc_feature (11)..(180): Homolog of NCBI NO: 15240103 NR Description: putative protein; protein id: At5g37070.1
  misc_feature (11)..(180): Homolog of NCBI NO: 18398279 NR Description: expressed protein
  misc_feature (11)..(180): Homolog of NCBI NO: 28466909 NR Description: At5g01610 [Arabidopsis thaliana]
  misc_feature (11)..(180): Homolog of NCBI NO: 15241019 NR Description: putative protein
KIFSILSRENMDQIFNKVGSYWLGQKANKQFDSVGNDLNSVSTSIEGGTKWLVNKIKGKMQKPLPELLKEYDLPIGIFPGDATNYEFDEETKKLTVLIPSICEVGYKDSSVLKFTTTVTGHLEKGKLTDVEGIKTKVMIWVKVTSISTDASKVYFTAGMKKSRSRDAYEVQRNGLRVDKF

SEQ ID NO: 35120 - protein, 170 aa, Arabidopsis thaliana
  peptide (1)..(170): Ceres Seq. ID no. 12348429
  misc_feature (32)..(170): Pfam Name: Protein of unknown function, DUF538 Pfam Description: Protein of unknown function, DUF538
  misc_feature (56)..(148): Homolog of NCBI NO: 28273408 NR Description: unknown protein [Oryza sativa (japonica
  misc_feature (57)..(168): Homolog of NCBI NO: 18379014 NR Description: Expressed protein
  misc_feature (7)..(167): Homolog of NCBI NO: 21553803 NR Description: unknown [Arabidopsis thaliana]
  misc_feature (7)..(167): Homolog of NCBI NO: 18395537 NR Description: expressed protein
  misc_feature (1)..(170): Homolog of NCBI NO: 34914210 NR Description: OSJNBb0049O23.18 [Oryza sativa (japonica
  misc_feature (1)..(170): Homolog of NCBI NO: 40642817 NR Description: cp protein [Celosia cristata]
  misc_feature (1)..(170): Homolog of NCBI NO: 15240103 NR Description: putative protein; protein id: At5g37070.1
  misc_feature (1)..(170): Homolog of NCBI NO: 18398279 NR Description: expressed protein
  misc_feature (1)..(170): Homolog of NCBI NO: 28466909 NR Description: At5g01610 [Arabidopsis thaliana]
  misc_feature (1)..(170): Homolog of NCBI NO: 15241019 NR Description: putative protein
MDQIFNKVGSYWLGQKANKQFDSVGNDLNSVSTSIEGGTKWLVNKIKGKMQKPLPELLKEYDLPIGIFPGDATNYEFDEETKKLTVLIPSICEVGYKDSSVLKFTTTVTGHLEKGKLTDVEGIKTKVMIWVKVTSISTDASKVYFTAGMKKSRSRDAYEVQRNGLRVDKF

SEQ ID NO: 35121 - protein, 121 aa, Arabidopsis thaliana
  peptide (1)..(121): Ceres Seq. ID no. 12348431
  misc_feature (1)..(121): Pfam Name: Protein of unknown function, DUF538 Pfam Description: Protein of unknown function, DUF538
  misc_feature (7)..(99): Homolog of NCBI NO: 28273408 NR Description: unknown protein [Oryza sativa (japonica
  misc_feature (8)..(119): Homolog of NCBI NO: 18379014 NR Description: Expressed protein
  misc_feature (1)..(118): Homolog of NCBI NO: 21553803 NR Description: unknown [Arabidopsis thaliana]
  misc_feature (1)..(118): Homolog of NCBI NO: 18395537 NR Description: expressed protein
  misc_feature (1)..(121): Homolog of NCBI NO: 34914210 NR Description: OSJNBb0049O23.18 [Oryza sativa (japonica
  misc_feature (1)..(121): Homolog of NCBI NO: 40642817 NR Description: cp protein [Celosia cristata]
  misc_feature (1)..(121): Homolog of NCBI NO: 15240103 NR Description: putative protein; protein id: At5g37070.1
  misc_feature (1)..(121): Homolog of NCBI NO: 18398279 NR Description: expressed protein
  misc_feature (1)..(121): Homolog of NCBI NO: 28466909 NR Description: At5g01610 [Arabidopsis thaliana]
  misc_feature (1)..(121): Homolog of NCBI NO: 15241019 NR Description: putative protein
MQKPLPELLKEYDLPIGIFPGDATNYEFDEETKKLTVLIPSICEVGYKDSSVLKFTTTVTGHLEKGKLTDVEGIKTKVMIWVKVTSISTDASKVYFTAGMKKSRSRDAYEVQRNGLRVDKF

SEQ ID NO: 35122 - DNA, 1259 bp, Arabidopsis thaliana
  misc_feature (1)..(1259): Ceres Seq. ID no. 13489103
  misc_feature: MA Experiment ID: 20001248 Result: Up-regulated in Transcription
  misc_feature: MA Experiment 20001248 PARAMETER Experiment Name: At_Far-red-induction_P Parameter: Age (day) Value: 7
  misc_feature: MA Experiment 20001248 PARAMETER Experiment Name: At_Far-red-induction_P Parameter: Light Value: Far-red vs. White
  misc_feature: MA Experiment 20001248 PARAMETER Experiment Name: At_Far-red-induction_P Parameter: Organism Value: A. thaliana
  misc_feature: MA Experiment 20001248 PARAMETER Experiment Name: At_Far-red-induction_P Parameter: Plant Line Value: Columbia
  misc_feature: MA Experiment 20001248 PARAMETER Experiment Name: At_Far-red-induction_P Parameter: Timepoint (hr) Value: 4
  misc_feature: MA Experiment 20001248 PARAMETER Experiment Name: At_Far-red-induction_P Parameter: Tissue Value: Whole Plant
ttgagaagaagaagacgaagcagaggaatctagggtttatgctacattgaagcaaagatggttacgagcagcgatcaaatccaaaatggttctgaagagcaatcaaaaagatcagagatttacacatacgaagcaccatggcagatctacgcaatgaactggagcattcgtcgagacaagaagtatcggctcgcaatcacaagcctcatcgagcaatatccgaatcgcgtcgaaattgttcagcttgatgaatcaaatggtgagattcgttcagatccaaatctctgcttcgaacatccttacccaccaacgaaaaccagtttcatacccgataaagaatgtcaaagacccgatcttttagctacttctagtgatttccttcgtttatggcgaatctctgatgatgaatctcgtgttgagcttaagtcttgtcttagtagtgataagaatagtgagtttagtggtccaatcacttcatttgattggaatgaagctgagcctagacgaattggtacttctagtattgataccacttgtactatttgggatatagagcgtgaagttgttgatacccagcttattgctcatgataaagaggtttatgacattgcttggggtggtgttggtgtctttgcctctgtctcagaggatggttccgttagagtgtttgatctccgtgataaggagcattcgacgattatctacgagagtggtgagcctagtactcctttggtgcgacttagttggaacaagcaggatccgaggtatatggctactgttatcatgggcagtgctaaaattgttgtgttggatattcggtttccggctcttcctgtcgtggagcttcagcgacatcaggctagtgtcaatgctatagcttgggctcctcatagctcttcccatatctgctccgctggagatgattctcaggcgttgatttgggatatatcttccatgggacagcatgttgaaggtggtctggatccgattctagcttacacagccggcgctgaggttgagcagcttcagtggtcatcttctcagcctgattgggttgccattgccttctctaacaagctgcagattctccgggtctgattatgttttacagatttctgttggatacttggatgtaaaaactcgttgctattgttgattaatgatcttttgatctctgactctaagcctcattgagtttcctttcatagtatggtctgtgtaggaactatgtaccttcaaaattgtgaataactagcttt

SEQ ID NO: 35123 - protein, 346 aa, Arabidopsis thaliana
  peptide (1)..(346): Ceres Seq. ID no. 13489104
  misc_feature (11)..(116): Homolog of NCBI NO: 37719680 NR Description: WD40 repeat protein [Zea mays]
  misc_feature (217)..(346): Homolog of NCBI NO: 37719680 NR Description: WD40 repeat protein [Zea mays]
  misc_feature (33)..(346): Homolog of NCBI NO: 13346196 NR Description: WD1521 [Gossypium hirsutum]
  misc_feature (1)..(346): Homolog of NCBI NO: 22324809 NR Description: WD-repeat protein GhTTG4 [Gossypium hirsutum]
  misc_feature (1)..(346): Homolog of NCBI NO: 22324803 NR Description: WD-repeat protein GhTTG2 [Gossypium hirsutum]
  misc_feature (1)..(346): Homolog of NCBI NO: 21593264 NR Description: flower pigmentation protein ATAN11 [Arabidopsis
  misc_feature (1)..(346): Homolog of NCBI NO: 2290528 NR Description: ATAN11 [Arabidopsis thaliana]
  misc_feature (1)..(346): Homolog of NCBI NO: 15222113 NR Description: flower pigmentation protein ATAN11 [Arabidopsis
  misc_feature (1)..(346): Homolog of NCBI NO: 28393624 NR Description: putative transcriptional regulator protein
  misc_feature (1)..(346): Homolog of NCBI NO: 15231593 NR Description: transducin / WD-40 repeat protein family
  misc_feature (11)..(116): Homolog of NCBI NO: 37719680 NR Description: WD40 repeat protein [Zea mays]
  misc_feature (217)..(346): Homolog of NCBI NO: 37719680 NR Description: WD40 repeat protein [Zea mays]
  misc_feature (33)..(346): Homolog of NCBI NO: 13346196 NR Description: WD1521 [Gossypium hirsutum]
  misc_feature (1)..(346): Homolog of NCBI NO: 22324809 NR Description: WD-repeat protein GhTTG4 [Gossypium hirsutum]
  misc_feature (1)..(346): Homolog of NCBI NO: 22324803 NR Description: WD-repeat protein GhTTG2 [Gossypium hirsutum]
  misc_feature (1)..(346): Homolog of NCBI NO: 21593264 NR Description: flower pigmentation protein ATAN11 [Arabidopsis
  misc_feature (1)..(346): Homolog of NCBI NO: 2290528 NR Description: ATAN11 [Arabidopsis thaliana]
  misc_feature (1)..(346): Homolog of NCBI NO: 15222113 NR Description: flower pigmentation protein ATAN11 [Arabidopsis
  misc_feature (1)..(346): Homolog of NCBI NO: 28393624 NR Description: putative transcriptional regulator protein
  misc_feature (1)..(346): Homolog of NCBI NO: 15231593 NR Description: transducin / WD-40 repeat protein family
MVTSSDQIQNGSEEQSKRSEIYTYEAPWQIYAMNWSIRRDKKYRLAITSLIEQYPNRVEIVQLDESNGEIRSDPNLCFEHPYPPTKTSFIPDKECQRPDLLATSSDFLRLWRISDDESRVELKSCLSSDKNSEFSGPITSFDWNEAEPRRIGTSSIDTTCTIWDIEREVVDTQLIAHDKEVYDIAWGGVGVFASVSEDGSVRVFDLRDKEHSTIIYESGEPSTPLVRLSWNKQDPRYMATVIMGSAKIVVLDIRFPALPVVELQRHQASVNAIAWAPHSSSHICSAGDDSQALIWDISSMGQHVEGGLDPILAYTAGAEVEQLQWSSSQPDWVAIAFSNKLQILRV

SEQ ID NO: 35124 - protein, 314 aa, Arabidopsis thaliana
  peptide (1)..(314): Ceres Seq. ID no. 13489105
  misc_feature (1)..(84): Homolog of NCBI NO: 37719680 NR Description: WD40 repeat protein [Zea mays]
  misc_feature (185)..(314): Homolog of NCBI NO: 37719680 NR Description: WD40 repeat protein [Zea mays]
  misc_feature (1)..(314): Homolog of NCBI NO: 13346196 NR Description: WD1521 [Gossypium hirsutum]
  misc_feature (1)..(314): Homolog of NCBI NO: 22324809 NR Description: WD-repeat protein GhTTG4 [Gossypium hirsutum]
  misc_feature (1)..(314): Homolog of NCBI NO: 22324803 NR Description: WD-repeat protein GhTTG2 [Gossypium hirsutum]
  misc_feature (1)..(314): Homolog of NCBI NO: 21593264 NR Description: flower pigmentation protein ATAN11 [Arabidopsis
  misc_feature (1)..(314): Homolog of NCBI NO: 2290528 NR Description: ATAN11 [Arabidopsis thaliana]
  misc_feature (1)..(314): Homolog of NCBI NO: 15222113 NR Description: flower pigmentation protein ATAN11 [Arabidopsis
  misc_feature (1)..(314): Homolog of NCBI NO: 28393624 NR Description: putative transcriptional regulator protein
  misc_feature (1)..(314): Homolog of NCBI NO: 15231593 NR Description: transducin / WD-40 repeat protein family
  misc_feature (1)..(84): Homolog of NCBI NO: 37719680 NR Description: WD40 repeat protein [Zea mays]
  misc_feature (185)..(314): Homolog of NCBI NO: 37719680 NR Description: WD40 repeat protein [Zea mays]
  misc_feature (1)..(314): Homolog of NCBI NO: 13346196 NR Description: WD1521 [Gossypium hirsutum]
  misc_feature (1)..(314): Homolog of NCBI NO: 22324809 NR Description: WD-repeat protein GhTTG4 [Gossypium hirsutum]
  misc_feature (1)..(314): Homolog of NCBI NO: 22324803 NR Description: WD-repeat protein GhTTG2 [Gossypium hirsutum]
  misc_feature (1)..(314): Homolog of NCBI NO: 21593264 NR Description: flower pigmentation protein ATAN11 [Arabidopsis
  misc_feature (1)..(314): Homolog of NCBI NO: 2290528 NR Description: ATAN11 [Arabidopsis thaliana]
  misc_feature (1)..(314): Homolog of NCBI NO: 15222113 NR Description: flower pigmentation protein ATAN11 [Arabidopsis
  misc_feature (1)..(314): Homolog of NCBI NO: 28393624 NR Description: putative transcriptional regulator protein
  misc_feature (1)..(314): Homolog of NCBI NO: 15231593 NR Description: transducin / WD-40 repeat protein family
MNWSIRRDKKYRLAITSLIEQYPNRVEIVQLDESNGEIRSDPNLCFEHPYPPTKTSFIPDKECQRPDLLATSSDFLRLWRISDDESRVELKSCLSSDKNSEFSGPITSFDWNEAEPRRIGTSSIDTTCTIWDIEREVVDTQLIAHDKEVYDIAWGGVGVFASVSEDGSVRVFDLRDKEHSTIIYESGEPSTPLVRLSWNKQDPRYMATVIMGSAKIVVLDIRFPALPVVELQRHQASVNAIAWAPHSSSHICSAGDDSQALIWDISSMGQHVEGGLDPILAYTAGAEVEQLQWSSSQPDWVAIAFSNKLQILRV

SEQ ID NO: 35125 - DNA, 1876 bp, Arabidopsis thaliana
  misc_feature (1)..(1876): Ceres Seq. ID no. 12600465
  misc_feature: MA Experiment ID: 108434 Result: Down-regulated in Transcription
  misc_feature: MA Experiment 108434 PARAMETER Experiment Name: At_Root_Tips_cDNA_P Parameter: Tissue Value: Root Tips
  misc_feature: MA Experiment ID: 108573 Result: Up-regulated in Transcription
  misc_feature: MA Experiment 108573 PARAMETER Experiment Name: At_Drought_cDNA_P Parameter: Timepoint (hr) Value: 6
  misc_feature: MA Experiment 108573 PARAMETER Experiment Name: At_Drought_cDNA_P Parameter: Tissue Value: Aerial
  misc_feature: MA Experiment 108573 PARAMETER Experiment Name: At_Drought_cDNA_P Parameter: Treatment Value: Drought vs. No Drought
  misc_feature: MA Experiment ID: 108585 Result: Up-regulated in Transcription
  misc_feature: MA Experiment 108585 PARAMETER Experiment Name: At_5mM_NaNP_cDNA_P Parameter: Timepoint (hr) Value: 6
  misc_feature: MA Experiment 108585 PARAMETER Experiment Name: At_5mM_NaNP_cDNA_P Parameter: Tissue Value: Aerial
  misc_feature: MA Experiment 108585 PARAMETER Experiment Name: At_5mM_NaNP_cDNA_P Parameter: Treatment Value: null
  misc_feature: MA Experiment ID: 20000087 Result: Down-regulated in Transcription
  misc_feature: MA Experiment 20000087 PARAMETER Experiment Name: At_100uM_ABA_Mutants_cDNA_P Parameter: Plant Line Value: WS
  misc_feature: MA Experiment 20000087 PARAMETER Experiment Name: At_100uM_ABA_Mutants_cDNA_P Parameter: Timepoint (hr) Value: 6
  misc_feature: MA Experiment 20000087 PARAMETER Experiment Name: At_100uM_ABA_Mutants_cDNA_P Parameter: Tissue Value: Aerial
  misc_feature: MA Experiment 20000087 PARAMETER Experiment Name: At_100uM_ABA_Mutants_cDNA_P Parameter: Treatment Value: 100uM ABA vs. No Treatment
  misc_feature: MA Experiment ID: 20000089 Result: Down-regulated in Transcription
  misc_feature: MA Experiment ID: 20000171 Result: Down-regulated in Transcription
  misc_feature: MA Experiment 20000171 PARAMETER Experiment Name: At_42deg_Heat_P Parameter: Age (day) Value: 14
  misc_feature: MA Experiment 20000171 PARAMETER Experiment Name: At_42deg_Heat_P Parameter: Organism Value: A. thaliana
  misc_feature: MA Experiment 20000171 PARAMETER Experiment Name: At_42deg_Heat_P Parameter: Plant Line Value: WS
  misc_feature: MA Experiment 20000171 PARAMETER Experiment Name: At_42deg_Heat_P Parameter: Temperature (deg C) Value: 42 vs. 22
  misc_feature: MA Experiment 20000171 PARAMETER Experiment Name: At_42deg_Heat_P Parameter: Timepoint (hr) Value: 1
  misc_feature: MA Experiment 20000171 PARAMETER Experiment Name: At_42deg_Heat_P Parameter: Tissue Value: Aerial
  misc_feature: MA Experiment ID: 20000184 Result: Up-regulated in Transcription
  misc_feature: MA Experiment 20000184 PARAMETER Experiment Name: At_Shoots__P Parameter: Age (day) Value: 7
  misc_feature: MA Experiment 20000184 PARAMETER Experiment Name: At_Shoots__P Parameter: Tissue Value: Shoots vs. Whole Plant
  misc_feature: MA Experiment ID: 20000227 Result: Down-regulated in Transcription
  misc_feature: MA Experiment 20000227 PARAMETER Experiment Name: At_Root-Tips-vs-Tops_P Parameter: Tissue Value: Root Tips vs. Root Tops
  misc_feature: MA Experiment ID: 20000794 Result: Up-regulated in Transcription
  misc_feature: MA Experiment 20000794 PARAMETER Experiment Name: At_Petals_P Parameter: Age (day) Value: 23-25 days
  misc_feature: MA Experiment 20000794 PARAMETER Experiment Name: At_Petals_P Parameter: Plant Line Value: WS
  misc_feature: MA Experiment 20000794 PARAMETER Experiment Name: At_Petals_P Parameter: Tissue Value: Petals vs. Whole plant
  misc_feature: MA Experiment ID: 20001557 Result: Up-regulated in Transcription
  misc_feature: MA Experiment 20001557 PARAMETER Experiment Name: At_Drought_Soil_Dry_P Parameter: Age (day) Value: 27
  misc_feature: MA Experiment 20001557 PARAMETER Experiment Name: At_Drought_Soil_Dry_P Parameter: Organism Value: A. thaliana
  misc_feature: MA Experiment 20001557 PARAMETER Experiment Name: At_Drought_Soil_Dry_P Parameter: Plant Line Value: WS
  misc_feature: MA Experiment 20001557 PARAMETER Experiment Name: At_Drought_Soil_Dry_P Parameter: Post Timepoint (hr) Value: 3
  misc_feature: MA Experiment 20001557 PARAMETER Experiment Name: At_Drought_Soil_Dry_P Parameter: Post-Treatment Value: Re-Water vs. No Drought
  misc_feature: MA Experiment 20001557 PARAMETER Experiment Name: At_Drought_Soil_Dry_P Parameter: Timepoint (day) Value: 13
  misc_feature: MA Experiment 20001557 PARAMETER Experiment Name: At_Drought_Soil_Dry_P Parameter: Treatment Value: Drought vs. No Drought
  misc_feature: MA Experiment ID: 20001911 Result: Up-regulated in Transcription
  misc_feature: MA Experiment 20001911 PARAMETER Experiment Name: At_Drought_Reproduction_P Parameter: Age (day) Value: 40
  misc_feature: MA Experiment 20001911 PARAMETER Experiment Name: At_Drought_Reproduction_P Parameter: Organism Value: A. thaliana
  misc_feature: MA Experiment 20001911 PARAMETER Experiment Name: At_Drought_Reproduction_P Parameter: Plant Line Value: WS
  misc_feature: MA Experiment 20001911 PARAMETER Experiment Name: At_Drought_Reproduction_P Parameter: Timepoint (day) Value: 10
  misc_feature: MA Experiment 20001911 PARAMETER Experiment Name: At_Drought_Reproduction_P Parameter: Tissue Value: Flowers
  misc_feature: MA Experiment 20001911 PARAMETER Experiment Name: At_Drought_Reproduction_P Parameter: Treatment Value: Drought vs. No Drought
acgaacgcatctcattgcttcatcattaccaaatcatcaacttaatcgtttctctcaaatttagggttttctcttttctcgaaagtcttgcggttttctgaatcatctctatctggtttgagggtttcgtttgatatctggagaaaggggtttctggaaacaaggagttcataattcgcgatcttgatctatcgatcttcatttatatataaaagcgtgaatgagattatgatggagtcgaaaggtggtaaaaagaagtccagcagtagtagttccttattttacgaagctcccctcggttacagcattgaagacgttcgtccaaacggtggaatcaagaaattcaaatcttctgtctactcaaactgctccaagaggccatcctgagtaccagcgtgcaccgatcttcataatatagttatagctttctttactttccagtttataattttcttctttcaaagctccttttctgctggttcccggatccaatcgttctctcctcctactacaagtcctgtcgctcacacaacaaggcgagatggccttatctgcaatcggtttcgaaggttacgagaaacggctcgaggtgactttctttgagccaagcatctttcaagactccaagggactgggactccgtgctctgaccaagtcccagcttgatgaaattcttacacctgctgcatgcacgatcgtttcatctctctccaacgatcaattggactcttacgtactctctgagtccagcttctttgtctacccctacaaagtcatcatcaagacttgcggtaccactaagctcctcctctctatcccaccacttctaaagctggctggtgagctctctctgagtgtcaagtctgtgaagtacactcgcggctccttcctctgccccggaggccagccttttcctcaccgcagcttctctgaagaagtctctgttcttgatgggcactttactcagctgggcttgaacagcgtagcctacttgatgggcaatgatgatgagactaagaaatggcatgtctatgctgcctctgcccaggactccagcaactgcaacaacaatgtctacactctcgagatgtgcatgactggtctggacagagagaaagctgctgtcttctacaaggatgaagctgacaagactgggtcaatgactgataactctggaatcagaaagatccttcccaagtctgagatctgcgactttgaattcgagccctgcggctactctatgaactcaattgaaggggatgcaatctccacgatccatgtgacccctgaagatgggtttagctacgctagcttcgaagctgtgggttacgacttcaacacccttgaccttagccagctggtgacaagggttctctcttgcttcgagcccaagcaattctctgtagctgtgcactcgagcgttggagcgaactcatacaagccagagattactgtagacttggaagactatgggtgcagagagaggacatttgagtctctaggagaagagagtggaacagtgatgtatcagacgtttgagaagcttggtaagtactgtggatcgcctagatctaccttgaagtgtgaatggagcagcaacaatagctgcagcagcgaggacgagaaggacgagggaatctagcagaatttttcttcctaataactattttcgagctttctgtttttgttctttctttttaaaaaacttattaagttcttatgaataatgacttgtgaagtttgagttcgtctccttcacaagcaagttgtattggtgttttctactttatgaatatgggttttatatacctaaagacttgttatgttattattcttaaatgttgctgctatgatgattactattatcgatttttac

SEQ ID NO: 35126 - protein, 366 aa, Arabidopsis thaliana
  peptide (1)..(366): Ceres Seq. ID no. 12600466
  misc_feature (3)..(336): Pfam Name: Adenosylmethionine decarboxylase Pfam Description: Adenosylmethionine decarboxylase
  misc_feature (3)..(336): Pfam Name: Adenosylmethionine decarboxylase Pfam Description: Adenosylmethionine decarboxylase
  misc_feature (1)..(366): Homolog of NCBI NO: 21239731 NR Description: S-adenosylmethionine decarboxylase [x
  misc_feature (1)..(366): Homolog of NCBI NO: 3913415 NR Description: S-adenosylmethionine decarboxylase proenzyme 1
  misc_feature (1)..(366): Homolog of NCBI NO: 3913410 NR Description: S-adenosylmethionine decarboxylase proenzyme 2
  misc_feature (1)..(363): Homolog of NCBI NO: 15237226 NR Description: S-adenosylmethionine decarboxylase (adoMetDC2)
  misc_feature (1)..(366): Homolog of NCBI NO: 38261497 NR Description: S-adenosyl-L-methionine decarboxylase [Brassica
  misc_feature (1)..(366): Homolog of NCBI NO: 21239731 NR Description: S-adenosylmethionine decarboxylase [x
  misc_feature (1)..(366): Homolog of NCBI NO: 3913410 NR Description: S-adenosylmethionine decarboxylase proenzyme 2
  misc_feature (1)..(366): Homolog of NCBI NO: 38261497 NR Description: S-adenosyl-L-methionine decarboxylase [Brassica
  misc_feature (1)..(366): Homolog of NCBI NO: 15232910 NR Description: S-adenosylmethionine decarboxylase
  misc_feature (1)..(366): Homolog of NCBI NO: 15809836 NR Description: AT3g02470/F16B3_10 [Arabidopsis thaliana]
  misc_feature (1)..(366): Homolog of NCBI NO: 1531763 NR Description: S-adenosylmethionine decarboxylase [Arabidopsis
  misc_feature (1)..(366): Homolog of NCBI NO: 1490554 NR Description: S-adenosylmethionine decarboxylase [Arabidopsis
  misc_feature (1)..(366): Homolog of NCBI NO: 15213968 NR Description: S-adenosylmethionine decarboxylase proenzyme 3
  misc_feature (1)..(363): Homolog of NCBI NO: 15237226 NR Description: S-adenosylmethionine decarboxylase (adoMetDC2)
  misc_feature (1)..(366): Homolog of NCBI NO: 3913415 NR Description: S-adenosylmethionine decarboxylase proenzyme 1
  misc_feature (1)..(366): Homolog of NCBI NO: 15213968 NR Description: S-adenosylmethionine decarboxylase proenzyme 3
  misc_feature (1)..(366): Homolog of NCBI NO: 1490554 NR Description: S-adenosylmethionine decarboxylase [Arabidopsis
  misc_feature (1)..(366): Homolog of NCBI NO: 1531763 NR Description: S-adenosylmethionine decarboxylase [Arabidopsis
  misc_feature (1)..(366): Homolog of NCBI NO: 15809836 NR Description: AT3g02470/F16B3_10 [Arabidopsis thaliana]
  misc_feature (1)..(366): Homolog of NCBI NO: 15232910 NR Description: S-adenosylmethionine decarboxylase
MALSAIGFEGYEKRLEVTFFEPSIFQDSKGLGLRALTKSQLDEILTPAACTIVSSLSNDQLDSYVLSESSFFVYPYKVIIKTCGTTKLLLSIPPLLKLAGELSLSVKSVKYTRGSFLCPGGQPFPHRSFSEEVSVLDGHFTQLGLNSVAYLMGNDDETKKWHVYAASAQDSSNCNNNVYTLEMCMTGLDREKAAVFYKDEADKTGSMTDNSGIRKILPKSEICDFEFEPCGYSMNSIEGDAISTIHVTPEDGFSYASFEAVGYDFNTLDLSQLVTRVLSCFEPKQFSVAVHSSVGANSYKPEITVDLEDYGCRERTFESLGEESGTVMYQTFEKLGKYCGSPRSTLKCEWSSNNSCSSEDEKDEGI

SEQ ID NO: 35127 - protein, 215 aa, Arabidopsis thaliana
  peptide (1)..(215): Ceres Seq. ID no. 12600467
  misc_feature (1)..(185): Pfam Name: Adenosylmethionine decarboxylase Pfam Description: Adenosylmethionine decarboxylase
  misc_feature (1)..(185): Pfam Name: Adenosylmethionine decarboxylase Pfam Description: Adenosylmethionine decarboxylase
  misc_feature (1)..(215): Homolog of NCBI NO: 21239731 NR Description: S-adenosylmethionine decarboxylase [x
  misc_feature (1)..(215): Homolog of NCBI NO: 3913415 NR Description: S-adenosylmethionine decarboxylase proenzyme 1
  misc_feature (1)..(215): Homolog of NCBI NO: 3913410 NR Description: S-adenosylmethionine decarboxylase proenzyme 2
  misc_feature (1)..(212): Homolog of NCBI NO: 15237226 NR Description: S-adenosylmethionine decarboxylase (adoMetDC2)
  misc_feature (1)..(215): Homolog of NCBI NO: 38261497 NR Description: S-adenosyl-L-methionine decarboxylase [Brassica
  misc_feature (1)..(215): Homolog of NCBI NO: 21239731 NR Description: S-adenosylmethionine decarboxylase [x
  misc_feature (1)..(215): Homolog of NCBI NO: 3913410 NR Description: S-adenosylmethionine decarboxylase proenzyme 2
  misc_feature (1)..(215): Homolog of NCBI NO: 38261497 NR Description: S-adenosyl-L-methionine decarboxylase [Brassica
  misc_feature (1)..(215): Homolog of NCBI NO: 15232910 NR Description: S-adenosylmethionine decarboxylase
  misc_feature (1)..(215): Homolog of NCBI NO: 15809836 NR Description: AT3g02470/F16B3_10 [Arabidopsis thaliana]
  misc_feature (1)..(215): Homolog of NCBI NO: 1531763 NR Description: S-adenosylmethionine decarboxylase [Arabidopsis
  misc_feature (1)..(215): Homolog of NCBI NO: 1490554 NR Description: S-adenosylmethionine decarboxylase [Arabidopsis
  misc_feature (1)..(215): Homolog of NCBI NO: 15213968 NR Description: S-adenosylmethionine decarboxylase proenzyme 3
  misc_feature (1)..(212): Homolog of NCBI NO: 15237226 NR Description: S-adenosylmethionine decarboxylase (adoMetDC2)
  misc_feature (1)..(215): Homolog of NCBI NO: 3913415 NR Description: S-adenosylmethionine decarboxylase proenzyme 1
  misc_feature (1)..(215): Homolog of NCBI NO: 15213968 NR Description: S-adenosylmethionine decarboxylase proenzyme 3
  misc_feature (1)..(215): Homolog of NCBI NO: 1490554 NR Description: S-adenosylmethionine decarboxylase [Arabidopsis
  misc_feature (1)..(215): Homolog of NCBI NO: 1531763 NR Description: S-adenosylmethionine decarboxylase [Arabidopsis
  misc_feature (1)..(215): Homolog of NCBI NO: 15809836 NR Description: AT3g02470/F16B3_10 [Arabidopsis thaliana]
  misc_feature (1)..(215): Homolog of NCBI NO: 15232910 NR Description: S-adenosylmethionine decarboxylase
MGNDDETKKWHVYAASAQDSSNCNNNVYTLEMCMTGLDREKAAVFYKDEADKTGSMTDNSGIRKILPKSEICDFEFEPCGYSMNSIEGDAISTIHVTPEDGFSYASFEAVGYDFNTLDLSQLVTRVLSCFEPKQFSVAVHSSVGANSYKPEITVDLEDYGCRERTFESLGEESGTVMYQTFEKLGKYCGSPRSTLKCEWSSNNSCSSEDEKDEGI

SEQ ID NO: 35128 - protein, 184 aa, Arabidopsis thaliana
  peptide (1)..(184): Ceres Seq. ID no. 12600468
  misc_feature (1)..(154): Pfam Name: Adenosylmethionine decarboxylase Pfam Description: Adenosylmethionine decarboxylase
  misc_feature (1)..(154): Pfam Name: Adenosylmethionine decarboxylase Pfam Description: Adenosylmethionine decarboxylase
  misc_feature (1)..(184): Homolog of NCBI NO: 21239731 NR Description: S-adenosylmethionine decarboxylase [x
  misc_feature (1)..(184): Homolog of NCBI NO: 3913415 NR Description: S-adenosylmethionine decarboxylase proenzyme 1
  misc_feature (1)..(184): Homolog of NCBI NO: 3913410 NR Description: S-adenosylmethionine decarboxylase proenzyme 2
  misc_feature (1)..(181): Homolog of NCBI NO: 15237226 NR Description: S-adenosylmethionine decarboxylase (adoMetDC2)
  misc_feature (1)..(184): Homolog of NCBI NO: 38261497 NR Description: S-adenosyl-L-methionine decarboxylase [Brassica
  misc_feature (1)..(184): Homolog of NCBI NO: 21239731 NR Description: S-adenosylmethionine decarboxylase [x
  misc_feature (1)..(184): Homolog of NCBI NO: 3913410 NR Description: S-adenosylmethionine decarboxylase proenzyme 2
  misc_feature (1)..(184): Homolog of NCBI NO: 38261497 NR Description: S-adenosyl-L-methionine decarboxylase [Brassica
  misc_feature (1)..(184): Homolog of NCBI NO: 15232910 NR Description: S-adenosylmethionine decarboxylase
  misc_feature (1)..(184): Homolog of NCBI NO: 15809836 NR Description: AT3g02470/F16B3_10 [Arabidopsis thaliana]
  misc_feature (1)..(184): Homolog of NCBI NO: 1531763 NR Description: S-adenosylmethionine decarboxylase [Arabidopsis
  misc_feature (1)..(184): Homolog of NCBI NO: 1490554 NR Description: S-adenosylmethionine decarboxylase [Arabidopsis
  misc_feature (1)..(184): Homolog of NCBI NO: 15213968 NR Description: S-adenosylmethionine decarboxylase proenzyme 3
  misc_feature (1)..(181): Homolog of NCBI NO: 15237226 NR Description: S-adenosylmethionine decarboxylase (adoMetDC2)
  misc_feature (1)..(184): Homolog of NCBI NO: 3913415 NR Description: S-adenosylmethionine decarboxylase proenzyme 1
  misc_feature (1)..(184): Homolog of NCBI NO: 15213968 NR Description: S-adenosylmethionine decarboxylase proenzyme 3
  misc_feature (1)..(184): Homolog of NCBI NO: 1490554 NR Description: S-adenosylmethionine decarboxylase [Arabidopsis
  misc_feature (1)..(184): Homolog of NCBI NO: 1531763 NR Description: S-adenosylmethionine decarboxylase [Arabidopsis
  misc_feature (1)..(184): Homolog of NCBI NO: 15809836 NR Description: AT3g02470/F16B3_10 [Arabidopsis thaliana]
  misc_feature (1)..(184): Homolog of NCBI NO: 15232910 NR Description: S-adenosylmethionine decarboxylase
MCMTGLDREKAAVFYKDEADKTGSMTDNSGIRKILPKSEICDFEFEPCGYSMNSIEGDAISTIHVTPEDGFSYASFEAVGYDFNTLDLSQLVTRVLSCFEPKQFSVAVHSSVGANSYKPEITVDLEDYGCRERTFESLGEESGTVMYQTFEKLGKYCGSPRSTLKCEWSSNNSCSSEDEKDEGI

SEQ ID NO: 35129 - DNA, 1085 bp, Arabidopsis thaliana
  misc_feature (1)..(1085): Ceres Seq. ID no. 12338245
  misc_feature: MA Experiment ID: 108573 Result: Up-regulated in Transcription
  misc_feature: MA Experiment 108573 PARAMETER Experiment Name: At_Drought_cDNA_P Parameter: Timepoint (hr) Value: 6
  misc_feature: MA Experiment 108573 PARAMETER Experiment Name: At_Drought_cDNA_P Parameter: Tissue Value: Aerial
  misc_feature: MA Experiment 108573 PARAMETER Experiment Name: At_Drought_cDNA_P Parameter: Treatment Value: Drought vs. No Drought
  misc_feature: MA Experiment ID: 108668 Result: Up-regulated in Transcription
  misc_feature: MA Experiment 108668 PARAMETER Experiment Name: At_2mM_SA_cDNA_P Parameter: Plant Line Value: WS
  misc_feature: MA Experiment 108668 PARAMETER Experiment Name: At_2mM_SA_cDNA_P Parameter: Timepoint (hr) Value: 6
  misc_feature: MA Experiment 108668 PARAMETER Experiment Name: At_2mM_SA_cDNA_P Parameter: Treatment Value: 2mM SA vs. No Treatment
  misc_feature: MA Experiment ID: 20000182 Result: Up-regulated in Transcription
  misc_feature: MA Experiment 20000182 PARAMETER Experiment Name: At_2mM_SA_P Parameter: Age (day) Value: 14
  misc_feature: MA Experiment 20000182 PARAMETER Experiment Name: At_2mM_SA_P Parameter: Organism Value: A. thaliana
  misc_feature: MA Experiment 20000182 PARAMETER Experiment Name: At_2mM_SA_P Parameter: Plant Line Value: WS
  misc_feature: MA Experiment 20000182 PARAMETER Experiment Name: At_2mM_SA_P Parameter: Timepoint (hr) Value: 6
  misc_feature: MA Experiment 20000182 PARAMETER Experiment Name: At_2mM_SA_P Parameter: Tissue Value: Aerial
  misc_feature: MA Experiment 20000182 PARAMETER Experiment Name: At_2mM_SA_P Parameter: Treatment Value: 2mM SA vs. No Treatment
  misc_feature: MA Experiment ID: 20000227 Result: Down-regulated in Transcription
  misc_feature: MA Experiment 20000227 PARAMETER Experiment Name: At_Root-Tips-vs-Tops_P Parameter: Tissue Value: Root Tips vs. Root Tops
acttttgccgagaaaatcagagacagaagaagaagaaaaaaaaaaaagcaaaacatgaaggcgacgacgaagactccgatccacgtggtgtggtcatgggttaggagacaacctccgaaggtgaaggcttttctcgccgtggtcactggcatggcggctttggttcttctcagattcattgttcacgatcacgacaatctcttcgttgccgctgaggctgttcattccatcgggatctgtgtgctcatctacaaactcatgaaggagaagacctgtgccggattgtcactgaaatctcaggagcttacggcgatatttttagctgttaggctgtattgtagcattgtaatggaatatgatatacataccattcttgacttggctactttgggaacaactctctgggttatatttatgattcgtttcaagttaagagctagttacatggaggacaaagacaactttcctctctattatgtgcttgcgccctgtgttgcattagctgtgttcatccatccatcgacctctcataacataataaacagaatttcatgggctttatgtgtataccttgaagctgtttcagtactacctcagctacgagtgatgcagaacacaaagattgttgaaccgttcacggctcattatgtttttgcacttggagtagcaaggttcctcagctgtgcccactgggttttacaggttgtggacacgcggggacggttgcttgtagcattgggttatggattgtggccatcaatggttctgatctcagaaattgttcaaactttcatcttggcagatttctgttactactacgtcaaaagcgttttcggaggccagcttgttctccggctaccgtctggagtagtataagttcaaaagatagaaatactccaacgatgtcctgcgatgagcttgacggaaattctaattgggaaagatagctcaatttttctttacctctgatttcatcgtttatgtgtcttgaggtttcaccaagtgtctcggttacgaattaattttacagtgttgtatattttgcctatcaagggatttaacgtctttcaggtcgataagttacc

SEQ ID NO: 35130 - protein, 291 aa, Arabidopsis thaliana
  peptide (1)..(291): Ceres Seq. ID no. 12338246
  misc_feature (66)..(277): Pfam Name: ER lumen protein retaining receptor Pfam Description: ER lumen protein retaining receptor
  misc_feature (27)..(287): Homolog of NCBI NO: 15230808 NR Description: ER lumen protein retaining receptor, putative
  misc_feature (19)..(278): Homolog of NCBI NO: 25518365 NR Description: hypothetical protein T20H2.24 - Arabidopsis
  misc_feature (24)..(278): Homolog of NCBI NO: 25412019 NR Description: probable ER lumen protein retaining receptor
  misc_feature (19)..(291): Homolog of NCBI NO: 15223724 NR Description: ER lumen protein-retaining receptor; protein id:
  misc_feature (19)..(291): Homolog of NCBI NO: 9369358 NR Description: F10A5.5 [Arabidopsis thaliana]
  misc_feature (19)..(291): Homolog of NCBI NO: 15222871 NR Description: ER lumen protein retaining receptor, putative
  misc_feature (24)..(291): Homolog of NCBI NO: 13430654 NR Description: putative ER lumen protein retaining receptor
  misc_feature (24)..(291): Homolog of NCBI NO: 21537286 NR Description: putative ER lumen protein retaining receptor
  misc_feature (24)..(291): Homolog of NCBI NO: 18399619 NR Description: putative ER lumen protein retaining receptor
  misc_feature (19)..(291): Homolog of NCBI NO: 18420309 NR Description: expressed protein
TFAEKIRDRRRRKKKKQNMKATTKTPIHVVWSWVRRQPPKVKAFLAVVTGMAALVLLRFIVHDHDNLFVAAEAVHSIGICVLIYKLMKEKTCAGLSLKSQELTAIFLAVRLYCSIVMEYDIHTILDLATLGTTLWVIFMIRFKLRASYMEDKDNFPLYYVLAPCVALAVFIHPSTSHNIINRISWALCVYLEAVSVLPQLRVMQNTKIVEPFTAHYVFALGVARFLSCAHWVLQVVDTRGRLLVALGYGLWPSMVLISEIVQTFILADFCYYYVKSVFGGQLVLRLPSGVV

SEQ ID NO: 35131 - protein, 273 aa, Arabidopsis thaliana; identical to SEQ ID NO: 24275
  peptide (1)..(273): Ceres Seq. ID no. 12338247
  misc_feature (48)..(259): Pfam Name: ER lumen protein retaining receptor Pfam Description: ER lumen protein retaining receptor
  misc_feature (9)..(269): Homolog of NCBI NO: 15230808 NR Description: ER lumen protein retaining receptor, putative
  misc_feature (1)..(260): Homolog of NCBI NO: 25518365 NR Description: hypothetical protein T20H2.24 - Arabidopsis
  misc_feature (6)..(260): Homolog of NCBI NO: 25412019 NR Description: probable ER lumen protein retaining receptor
  misc_feature (1)..(273): Homolog of NCBI NO: 15223724 NR Description: ER lumen protein-retaining receptor; protein id:
  misc_feature (1)..(273): Homolog of NCBI NO: 9369358 NR Description: F10A5.5 [Arabidopsis thaliana]
  misc_feature (1)..(273): Homolog of NCBI NO: 15222871 NR Description: ER lumen protein retaining receptor, putative
  misc_feature (6)..(273): Homolog of NCBI NO: 13430654 NR Description: putative ER lumen protein retaining receptor
  misc_feature (6)..(273): Homolog of NCBI NO: 21537286 NR Description: putative ER lumen protein retaining receptor
  misc_feature (6)..(273): Homolog of NCBI NO: 18399619 NR Description: putative ER lumen protein retaining receptor
  misc_feature (1)..(273): Homolog of NCBI NO: 18420309 NR Description: expressed protein

SEQ ID NO: 35132 - protein, 241 aa, Arabidopsis thaliana; identical to SEQ ID NO: 24276
  peptide (1)..(241): Ceres Seq. ID no. 12338248
  misc_feature (16)..(227): Pfam Name: ER lumen protein retaining receptor Pfam Description: ER lumen protein retaining receptor
  misc_feature (1)..(237): Homolog of NCBI NO: 15230808 NR Description: ER lumen protein retaining receptor, putative
  misc_feature (1)..(228): Homolog of NCBI NO: 25518365 NR Description: hypothetical protein T20H2.24 - Arabidopsis
  misc_feature (1)..(228): Homolog of NCBI NO: 25412019 NR Description: probable ER lumen protein retaining receptor
  misc_feature (1)..(241): Homolog of NCBI NO: 15223724 NR Description: ER lumen protein-retaining receptor; protein id:
  misc_feature (1)..(241): Homolog of NCBI NO: 9369358 NR Description: F10A5.5 [Arabidopsis thaliana]
  misc_feature (1)..(241): Homolog of NCBI NO: 15222871 NR Description: ER lumen protein retaining receptor, putative
  misc_feature (1)..(241): Homolog of NCBI NO: 13430654 NR Description: putative ER lumen protein retaining receptor
  misc_feature (1)..(241): Homolog of NCBI NO: 21537286 NR Description: putative ER lumen protein retaining receptor
  misc_feature (1)..(241): Homolog of NCBI NO: 18399619 NR Description: putative ER lumen protein retaining receptor
  misc_feature (1)..(241): Homolog of NCBI NO: 18420309 NR Description: expressed protein

SEQ ID NO: 35133 - DNA, 993 bp, Arabidopsis thaliana
  misc_feature (1)..(993): Ceres Seq. ID no. 12602231
  misc_feature: MA Experiment ID: 108435 Result: Down-regulated in Transcription
  misc_feature: MA Experiment 108435 PARAMETER Experiment Name: At_stm_Mutants_cDNA_P Parameter: Plant Line Value: wt Landsburg vs stm
  misc_feature: MA Experiment 108435 PARAMETER Experiment Name: At_stm_Mutants_cDNA_P Parameter: Tissue Value: Shoot Apical Meristem Region
  misc_feature: MA Experiment ID: 108461 Result: Up-regulated in Transcription
  misc_feature: MA Experiment 108461 PARAMETER Experiment Name: At_Germinating_Seeds_cDNA_P Parameter: Age (day) Value: 1 vs. 0
  misc_feature: MA Experiment 108461 PARAMETER Experiment Name: At_Germinating_Seeds_cDNA_P Parameter: Tissue Value: Germinating Seeds
  misc_feature: MA Experiment ID: 108462 Result: Up-regulated in Transcription
  misc_feature: MA Experiment 108462 PARAMETER Experiment Name: At_Germinating_Seeds_cDNA_P Parameter: Age (day) Value: 2 vs. 0
  misc_feature: MA Experiment 108462 PARAMETER Experiment Name: At_Germinating_Seeds_cDNA_P Parameter: Tissue Value: Germinating Seeds
  misc_feature: MA Experiment ID: 108463 Result: Up-regulated in Transcription
  misc_feature: MA Experiment 108463 PARAMETER Experiment Name: At_Germinating_Seeds_cDNA_P Parameter: Age (day) Value: 3 vs. 0
  misc_feature: MA Experiment 108463 PARAMETER Experiment Name: At_Germinating_Seeds_cDNA_P Parameter: Tissue Value: Germinating Seeds
  misc_feature: MA Experiment ID: 108464 Result: Up-regulated in Transcription
  misc_feature: MA Experiment 108464 PARAMETER Experiment Name: At_Germinating_Seeds_cDNA_P Parameter: Age (day) Value: 4 vs. 0
  misc_feature: MA Experiment 108464 PARAMETER Experiment Name: At_Germinating_Seeds_cDNA_P Parameter: Tissue Value: Germinating Seeds
  misc_feature: MA Experiment ID: 108488 Result: Up-regulated in Transcription
  misc_feature: MA Experiment ID: 108489 Result: Down-regulated in Transcription
  misc_feature: MA Experiment ID: 108595 Result: Down-regulated in Transcription
  misc_feature: MA Experiment 108595 PARAMETER Experiment Name: At_Ler-pi_Ovule_cDNA_P Parameter: Plant Line Value: null
  misc_feature: MA Experiment ID: 20000087 Result: Down-regulated in Transcription
  misc_feature: MA Experiment 20000087 PARAMETER Experiment Name: At_100uM_ABA_Mutants_cDNA_P Parameter: Plant Line Value: WS
  misc_feature: MA Experiment 20000087 PARAMETER Experiment Name: At_100uM_ABA_Mutants_cDNA_P Parameter: Timepoint (hr) Value: 6
  misc_feature: MA Experiment 20000087 PARAMETER Experiment Name: At_100uM_ABA_Mutants_cDNA_P Parameter: Tissue Value: Aerial
  misc_feature: MA Experiment 20000087 PARAMETER Experiment Name: At_100uM_ABA_Mutants_cDNA_P Parameter: Treatment Value: 100uM ABA vs. No Treatment
  misc_feature: MA Experiment ID: 20000180 Result: Up-regulated in Transcription
  misc_feature: MA Experiment 20000180 PARAMETER Experiment Name: At_Germinating_Seeds_P Parameter: Age (hr) Value: 24 vs. 0
  misc_feature: MA Experiment 20000180 PARAMETER Experiment Name: At_Germinating_Seeds_P Parameter: Tissue Value: Germinating Seeds
  misc_feature: MA Experiment ID: 20000185 Result: Down-regulated in Transcription
  misc_feature: MA Experiment 20000185 PARAMETER Experiment Name: At_Roots__P Parameter: Age (day) Value: 7 vs. 21
  misc_feature: MA Experiment 20000185 PARAMETER Experiment Name: At_Roots__P Parameter: Organism Value: A. thaliana
  misc_feature: MA Experiment 20000185 PARAMETER Experiment Name: At_Roots__P Parameter: Tissue Value: Roots vs. Whole Plant
  misc_feature: MA Experiment ID: 20000227 Result: Down-regulated in Transcription
  misc_feature: MA Experiment 20000227 PARAMETER Experiment Name: At_Root-Tips-vs-Tops_P Parameter: Tissue Value: Root Tips vs. Root Tops
  misc_feature: MA Experiment ID: 20000234 Result: Down-regulated in Transcription
  misc_feature: MA Experiment 20000234 PARAMETER Experiment Name: At_Siliques_P Parameter: Age (day) Value: 21
  misc_feature: MA Experiment 20000234 PARAMETER Experiment Name: At_Siliques_P Parameter: Organism Value: A. thaliana
  misc_feature: MA Experiment 20000234 PARAMETER Experiment Name: At_Siliques_P Parameter: Plant Line Value: WS
  misc_feature: MA Experiment 20000234 PARAMETER Experiment Name: At_Siliques_P Parameter: Tissue Value: Less Than 5mm Siliques vs. Whole Plant
  misc_feature: MA Experiment ID: 20000264 Result: Down-regulated in Transcription
  misc_feature: MA Experiment 20000264 PARAMETER Experiment Name: At_Open_Flower_P Parameter: Age (day) Value: 21
  misc_feature: MA Experiment 20000264 PARAMETER Experiment Name: At_Open_Flower_P Parameter: Plant Line Value: WS
  misc_feature: MA Experiment 20000264 PARAMETER Experiment Name: At_Open_Flower_P Parameter: Tissue Value: Open Flower vs. Whole Plant
  misc_feature: MA Experiment ID: 20000265 Result: Down-regulated in Transcription
  misc_feature: MA Experiment 20000265 PARAMETER Experiment Name: At_Open_Flower_P Parameter: Age (day) Value: 21
  misc_feature: MA Experiment 20000265 PARAMETER Experiment Name: At_Open_Flower_P Parameter: Plant Line Value: WS
  misc_feature: MA Experiment 20000265 PARAMETER Experiment Name: At_Open_Flower_P Parameter: Tissue Value: Closed Flower vs. Whole Plant
  misc_feature: MA Experiment ID: 20000286 Result: Down-regulated in Transcription
  misc_feature: MA Experiment 20000286 PARAMETER Experiment Name: At_Open_Flower_P Parameter: Age (day) Value: 21
  misc_feature: MA Experiment 20000286 PARAMETER Experiment Name: At_Open_Flower_P Parameter: Plant Line Value: WS
  misc_feature: MA Experiment 20000286 PARAMETER Experiment Name: At_Open_Flower_P Parameter: Tissue Value: Half Open vs. Whole Plant
  misc_feature: MA Experiment ID: 20000439 Result: Down-regulated in Transcription
  misc_feature: MA Experiment 20000439 PARAMETER Experiment Name: At_Roots__P Parameter: Age (day) Value: 14 vs. 21
  misc_feature: MA Experiment 20000439 PARAMETER Experiment Name: At_Roots__P Parameter: Organism Value: A. thaliana
  misc_feature: MA Experiment 20000439 PARAMETER Experiment Name: At_Roots__P Parameter: Tissue Value: Roots vs. Whole Plant
  misc_feature: MA Experiment ID: 20000441 Result: Up-regulated in Transcription
  misc_feature: MA Experiment 20000441 PARAMETER Experiment Name: At_1uM_BR-BRZ__P Parameter: Tissue Value: Shoot Apices
  misc_feature: MA Experiment 20000441 PARAMETER Experiment Name: At_1uM_BR-BRZ__P Parameter: Treatment Value: 1uM BR vs. No Treatment
  misc_feature: MA Experiment ID: 20000443 Result: Up-regulated in Transcription
  misc_feature: MA Experiment 20000443 PARAMETER Experiment Name: At_1uM_BR-BRZ__P Parameter: Tissue Value: Shoot Apices
  misc_feature: MA Experiment 20000443 PARAMETER Experiment Name: At_1uM_BR-BRZ__P Parameter: Treatment Value: 1uM BRZ vs. No Treatment
  misc_feature: MA Experiment ID: 20000496 Result: Down-regulated in Transcription
  misc_feature: MA Experiment 20000496 PARAMETER Experiment Name: At_Guard_Cells_P Parameter: Harvest Date Value: 7/19/2002
  misc_feature: MA Experiment 20000496 PARAMETER Experiment Name: At_Guard_Cells_P Parameter: Organism Value: Canola
  misc_feature: MA Experiment 20000496 PARAMETER Experiment Name: At_Guard_Cells_P Parameter: Tissue Value: Guard Cells vs. Leaves
  misc_feature: MA Experiment ID: 20000794 Result: Down-regulated in Transcription
  misc_feature: MA Experiment 20000794 PARAMETER Experiment Name: At_Petals_P Parameter: Age (day) Value: 23-25 days
  misc_feature: MA Experiment 20000794 PARAMETER Experiment Name: At_Petals_P Parameter: Plant Line Value: WS
  misc_feature: MA Experiment 20000794 PARAMETER Experiment Name: At_Petals_P Parameter: Tissue Value: Petals vs. Whole plant
  misc_feature: MA Experiment ID: 20001451 Result: Down-regulated in Transcription
  misc_feature: MA Experiment 20001451 PARAMETER Experiment Name: At_Far-red-induction_P Parameter: Age (day) Value: 7
  misc_feature: MA Experiment 20001451 PARAMETER Experiment Name: At_Far-red-induction_P Parameter: Light Value: Far-red vs. White
  misc_feature: MA Experiment 20001451 PARAMETER Experiment Name: At_Far-red-induction_P Parameter: Organism Value: A. thaliana
  misc_feature: MA Experiment 20001451 PARAMETER Experiment Name: At_Far-red-induction_P Parameter: Plant Line Value: Columbia
  misc_feature: MA Experiment 20001451 PARAMETER Experiment Name: At_Far-red-induction_P Parameter: Timepoint (hr) Value: 24
  misc_feature: MA Experiment 20001451 PARAMETER Experiment Name: At_Far-red-induction_P Parameter: Tissue Value: Whole Plant
  misc_feature: MA Experiment ID: 20001557 Result: Down-regulated in Transcription
  misc_feature: MA Experiment 20001557 PARAMETER Experiment Name: At_Drought_Soil_Dry_P Parameter: Age (day) Value: 27
  misc_feature: MA Experiment 20001557 PARAMETER Experiment Name: At_Drought_Soil_Dry_P Parameter: Organism Value: A. thaliana
  misc_feature: MA Experiment 20001557 PARAMETER Experiment Name: At_Drought_Soil_Dry_P Parameter: Plant Line Value: WS
  misc_feature: MA Experiment 20001557 PARAMETER Experiment Name: At_Drought_Soil_Dry_P Parameter: Post Timepoint (hr) Value: 3
  misc_feature: MA Experiment 20001557 PARAMETER Experiment Name: At_Drought_Soil_Dry_P Parameter: Post-Treatment Value: Re-Water vs. No Drought
  misc_feature: MA Experiment 20001557 PARAMETER Experiment Name: At_Drought_Soil_Dry_P Parameter: Timepoint (day) Value: 13
  misc_feature: MA Experiment 20001557 PARAMETER Experiment Name: At_Drought_Soil_Dry_P Parameter: Treatment Value: Drought vs. No Drought
  misc_feature: MA Experiment ID: 20001558 Result: Down-regulated in Transcription
  misc_feature: MA Experiment 20001558 PARAMETER Experiment Name: At_Drought_Soil_Dry_P Parameter: Age (day) Value: 27
  misc_feature: MA Experiment 20001558 PARAMETER Experiment Name: At_Drought_Soil_Dry_P Parameter: Organism Value: A. thaliana
  misc_feature: MA Experiment 20001558 PARAMETER Experiment Name: At_Drought_Soil_Dry_P Parameter: Plant Line Value: WS
  misc_feature: MA Experiment 20001558 PARAMETER Experiment Name: At_Drought_Soil_Dry_P Parameter: Post Timepoint (hr) Value: 6
  misc_feature: MA Experiment 20001558 PARAMETER Experiment Name: At_Drought_Soil_Dry_P Parameter: Post-Treatment Value: Re-Water vs. No Drought
  misc_feature: MA Experiment 20001558 PARAMETER Experiment Name: At_Drought_Soil_Dry_P Parameter: Timepoint (day) Value: 13
  misc_feature: MA Experiment 20001558 PARAMETER Experiment Name: At_Drought_Soil_Dry_P Parameter: Treatment Value: Drought vs. No Drought
  misc_feature: MA Experiment ID: 20001757 Result: Up-regulated in Transcription
  misc_feature: MA Experiment 20001757 PARAMETER Experiment Name: At_50mM_NH4NO3_L-to-H_P Parameter: Timepoint (hr) Value: 6
  misc_feature: MA Experiment 20001757 PARAMETER Experiment Name: At_50mM_NH4NO3_L-to-H_P Parameter: Tissue Value: Leaf
  misc_feature: MA Experiment 20001757 PARAMETER Experiment Name: At_50mM_NH4NO3_L-to-H_P Parameter: Treatment Value: 50mM NH4NO3 vs 100mM Mannitol
  misc_feature: MA Experiment ID: 20001904 Result: Down-regulated in Transcription
  misc_feature: MA Experiment 20001904 PARAMETER Experiment Name: At_Drought_Reproduction_P Parameter: Age (day) Value: 37
  misc_feature: MA Experiment 20001904 PARAMETER Experiment Name: At_Drought_Reproduction_P Parameter: Organism Value: A. thaliana
  misc_feature: MA Experiment 20001904 PARAMETER Experiment Name: At_Drought_Reproduction_P Parameter: Plant Line Value: WS
  misc_feature: MA Experiment 20001904 PARAMETER Experiment Name: At_Drought_Reproduction_P Parameter: Timepoint (day) Value: 7
  misc_feature: MA Experiment 20001904 PARAMETER Experiment Name: At_Drought_Reproduction_P Parameter: Tissue Value: Rosettes
  misc_feature: MA Experiment 20001904 PARAMETER Experiment Name: At_Drought_Reproduction_P Parameter: Treatment Value: Drought vs. No Drought
  misc_feature: MA Experiment ID: 20001905 Result: Down-regulated in Transcription
  misc_feature: MA Experiment 20001905 PARAMETER Experiment Name: At_Drought_Reproduction_P Parameter: Age (day) Value: 40
  misc_feature: MA Experiment 20001905 PARAMETER Experiment Name: At_Drought_Reproduction_P Parameter: Organism Value: A. thaliana
  misc_feature: MA Experiment 20001905 PARAMETER Experiment Name: At_Drought_Reproduction_P Parameter: Plant Line Value: WS
  misc_feature: MA Experiment 20001905 PARAMETER Experiment Name: At_Drought_Reproduction_P Parameter: Timepoint (day) Value: 10
  misc_feature: MA Experiment 20001905 PARAMETER Experiment Name: At_Drought_Reproduction_P Parameter: Tissue Value: Rosettes
  misc_feature: MA Experiment 20001905 PARAMETER Experiment Name: At_Drought_Reproduction_P Parameter: Treatment Value: Drought vs. No Drought
  misc_feature: MA Experiment ID: 20001906 Result: Down-regulated in Transcription
  misc_feature: MA Experiment 20001906 PARAMETER Experiment Name: At_Drought_Reproduction_P Parameter: Age (day) Value: 35
  misc_feature: MA Experiment 20001906 PARAMETER Experiment Name: At_Drought_Reproduction_P Parameter: Organism Value: A. thaliana
  misc_feature: MA Experiment 20001906 PARAMETER Experiment Name: At_Drought_Reproduction_P Parameter: Plant Line Value: WS
  misc_feature: MA Experiment 20001906 PARAMETER Experiment Name: At_Drought_Reproduction_P Parameter: Timepoint (day) Value: 5
  misc_feature: MA Experiment 20001906 PARAMETER Experiment Name: At_Drought_Reproduction_P Parameter: Tissue Value: Siliques
  misc_feature: MA Experiment 20001906 PARAMETER Experiment Name: At_Drought_Reproduction_P Parameter: Treatment Value: Drought vs. No Drought
  misc_feature: MA Experiment ID: 20001908 Result: Down-regulated in Transcription
  misc_feature: MA Experiment 20001908 PARAMETER Experiment Name: At_Drought_Reproduction_P Parameter: Age (day) Value: 40
  misc_feature: MA Experiment 20001908 PARAMETER Experiment Name: At_Drought_Reproduction_P Parameter: Organism Value: A. thaliana
  misc_feature: MA Experiment 20001908 PARAMETER Experiment Name: At_Drought_Reproduction_P Parameter: Plant Line Value: WS
  misc_feature: MA Experiment 20001908 PARAMETER Experiment Name: At_Drought_Reproduction_P Parameter: Timepoint (day) Value: 10
  misc_feature: MA Experiment 20001908 PARAMETER Experiment Name: At_Drought_Reproduction_P Parameter: Tissue Value: Siliques
  misc_feature: MA Experiment 20001908 PARAMETER Experiment Name: At_Drought_Reproduction_P Parameter: Treatment Value: Drought vs. No Drought
atctcacaaatcttacttatacgatcagtctcccacattcacacttccaccaaacacctctcgtccacatctttctcctttggtggcaaacacaacgacagatagagagaaacgatggcgtcgaactcgcttatgagctgtggcatagccgccgtgtacccttcgcttctctcttcttccaagtctaaattcgtatccgccggagttccactcccaaacgccgggaatgttggtcgtatcagaatggctgctcactggatgcctggcgagccacgaccagcttaccttgacggttctgctcctggtgactttgggtttgacccacttggacttggagaagttccagcgaaccttgagagatacaaagagtcagagctcatccactgtagatgggctatgctcgctgttcctgggattttggtaccagaagcattaggatatggaaactgggttaaggctcaggaatgggcagcactaccagggggtcaagccacttacttgggaaacccagtcccgtggggtactttgcccacaatcttggccattgagttcttagccattgcatttgttgagcaccagagaagtatggagaaagaccctgagaagaagaagtacccgggaggcgcatttgaccctcttggatactcgaaggaccccaagaagctcgaggaattgaaagttaaagagatcaagaacgggcggcttgcgctgttggcgtttgtaggattctgtgtgcaacagtcggcttacccggggacaggaccattggagaacttggcaactcacttggcggatccatggcacaacaacattggcgatattgttatccctttcaactaatgaatgtaaaaataaaaatatgtgtaccttatgagctttatgtgtatcaaaaacactgtgtaatgaaagacagatttgtgaattcctgtaatttgtcttggtgatcgaatgctcgtgtgagcttgaattctaagtgatgaaccttttgaaccc

SEQ ID NO: 35134 - protein, 241 aa, Arabidopsis thaliana
  peptide (1)..(241): Ceres Seq. ID no. 12602232
  misc_feature (53)..(210): Pfam Name: Chlorophyll A-B binding protein Pfam Description: Chlorophyll A-B binding protein
  misc_feature (53)..(210): Pfam Name: Chlorophyll A-B binding protein Pfam Description: Chlorophyll A-B binding protein
  misc_feature (1)..(239): Homolog of NCBI NO: 3789954 NR Description: chlorophyll a/b-binding protein precursor [Oryza
  misc_feature (1)..(241): Homolog of NCBI NO: 6685157 NR Description: chlorophyll a/b binding protein precursor
  misc_feature (186)..(241): Homolog of NCBI NO: 30694146 NR Description: light-harvesting chlorophyll a/b binding protein
  misc_feature (1)..(151): Homolog of NCBI NO: 30694146 NR Description: light-harvesting chlorophyll a/b binding protein
  misc_feature (1)..(239): Homolog of NCBI NO: 115764 NR Description: Chlorophyll A-B binding protein 6A, chloroplast
  misc_feature (1)..(239): Homolog of NCBI NO: 3789954 NR Description: chlorophyll a/b-binding protein precursor [Oryza
  misc_feature (186)..(241): Homolog of NCBI NO: 30694146 NR Description: light-harvesting chlorophyll a/b binding protein
  misc_feature (1)..(239): Homolog of NCBI NO: 115764 NR Description: Chlorophyll A-B binding protein 6A, chloroplast
  misc_feature (1)..(241): Homolog of NCBI NO: 15233115 NR Description: light-harvesting chlorophyll a/b binding protein
  misc_feature (1)..(241): Homolog of NCBI NO: 13265501 NR Description: AT3g54890 [Arabidopsis thaliana]
  misc_feature (1)..(238): Homolog of NCBI NO: 625547 NR Description: chlorophyll a/b-binding protein type I - common
  misc_feature (1)..(239): Homolog of NCBI NO: 82078 NR Description: chlorophyll a/b-binding protein type I precursor
  misc_feature (1)..(239): Homolog of NCBI NO: 82079 NR Description: chlorophyll a/b-binding protein type I precursor
  misc_feature (1)..(151): Homolog of NCBI NO: 30694146 NR Description: light-harvesting chlorophyll a/b binding protein
  misc_feature (1)..(241): Homolog of NCBI NO: 6685157 NR Description: chlorophyll a/b binding protein precursor
  misc_feature (1)..(239): Homolog of NCBI NO: 82079 NR Description: chlorophyll a/b-binding protein type I precursor
  misc_feature (1)..(239): Homolog of NCBI NO: 82078 NR Description: chlorophyll a/b-binding protein type I precursor
  misc_feature (1)..(238): Homolog of NCBI NO: 625547 NR Description: chlorophyll a/b-binding protein type I - common
  misc_feature (1)..(241): Homolog of NCBI NO: 13265501 NR Description: AT3g54890 [Arabidopsis thaliana]
  misc_feature (1)..(241): Homolog of NCBI NO: 15233115 NR Description: light-harvesting chlorophyll a/b binding protein
MASNSLMSCGIAAVYPSLLSSSKSKFVSAGVPLPNAGNVGRIRMAAHWMPGEPRPAYLDGSAPGDFGFDPLGLGEVPANLERYKESELIHCRWAMLAVPGILVPEALGYGNWVKAQEWAALPGGQATYLGNPVPWGTLPTILAIEFLAIAFVEHQRSMEKDPEKKKYPGGAFDPLGYSKDPKKLEELKVKEIKNGRLALLAFVGFCVQQSAYPGTGPLENLATHLADPWHNNIGDIVIPFN

SEQ ID NO: 35135 - protein, 235 aa, Arabidopsis thaliana
  peptide (1)..(235): Ceres Seq. ID no. 12602233
  misc_feature (47)..(204): Pfam Name: Chlorophyll A-B binding protein Pfam Description: Chlorophyll A-B binding protein
  misc_feature (47)..(204): Pfam Name: Chlorophyll A-B binding protein Pfam Description: Chlorophyll A-B binding protein
  misc_feature (1)..(233): Homolog of NCBI NO: 3789954 NR Description: chlorophyll a/b-binding protein precursor [Oryza
  misc_feature (1)..(235): Homolog of NCBI NO: 6685157 NR Description: chlorophyll a/b binding protein precursor
  misc_feature (180)..(235): Homolog of NCBI NO: 30694146 NR Description: light-harvesting chlorophyll a/b binding protein
  misc_feature (1)..(145): Homolog of NCBI NO: 30694146 NR Description: light-harvesting chlorophyll a/b binding protein
  misc_feature (1)..(233): Homolog of NCBI NO: 115764 NR Description: Chlorophyll A-B binding protein 6A, chloroplast
  misc_feature (1)..(233): Homolog of NCBI NO: 3789954 NR Description: chlorophyll a/b-binding protein precursor [Oryza
  misc_feature (180)..(235): Homolog of NCBI NO: 30694146 NR Description: light-harvesting chlorophyll a/b binding protein
  misc_feature (1)..(233): Homolog of NCBI NO: 115764 NR Description: Chlorophyll A-B binding protein 6A, chloroplast
  misc_feature (1)..(235): Homolog of NCBI NO: 15233115 NR Description: light-harvesting chlorophyll a/b binding protein
  misc_feature (1)..(235): Homolog of NCBI NO: 13265501 NR Description: AT3g54890 [Arabidopsis thaliana]
  misc_feature (1)..(232): Homolog of NCBI NO: 625547 NR Description: chlorophyll a/b-binding protein type I - common
  misc_feature (1)..(233): Homolog of NCBI NO: 82078 NR Description: chlorophyll a/b-binding protein type I precursor
  misc_feature (1)..(233): Homolog of NCBI NO: 82079 NR Description: chlorophyll a/b-binding protein type I precursor
  misc_feature (1)..(145): Homolog of NCBI NO: 30694146 NR Description: light-harvesting chlorophyll a/b binding protein
  misc_feature (1)..(235): Homolog of NCBI NO: 6685157 NR Description: chlorophyll a/b binding protein precursor
  misc_feature (1)..(233): Homolog of NCBI NO: 82079 NR Description: chlorophyll a/b-binding protein type I precursor
  misc_feature (1)..(233): Homolog of NCBI NO: 82078 NR Description: chlorophyll a/b-binding protein type I precursor
  misc_feature (1)..(232): Homolog of NCBI NO: 625547 NR Description: chlorophyll a/b-binding protein type I - common
  misc_feature (1)..(235): Homolog of NCBI NO: 13265501 NR Description: AT3g54890 [Arabidopsis thaliana]
  misc_feature (1)..(235): Homolog of NCBI NO: 15233115 NR Description: light-harvesting chlorophyll a/b binding protein
MSCGIAAVYPSLLSSSKSKFVSAGVPLPNAGNVGRIRMAAHWMPGEPRPAYLDGSAPGDFGFDPLGLGEVPANLERYKESELIHCRWAMLAVPGILVPEALGYGNWVKAQEWAALPGGQATYLGNPVPWGTLPTILAIEFLAIAFVEHQRSMEKDPEKKKYPGGAFDPLGYSKDPKKLEELKVKEIKNGRLALLAFVGFCVQQSAYPGTGPLENLATHLADPWHNNIGDIVIPFN

SEQ ID NO: 35136 - protein, 198 aa, Arabidopsis thaliana
  peptide (1)..(198): Ceres Seq. ID no. 12602234
  misc_feature (10)..(167): Pfam Name: Chlorophyll A-B binding protein Pfam Description: Chlorophyll A-B binding protein
  misc_feature (10)..(167): Pfam Name: Chlorophyll A-B binding protein Pfam Description: Chlorophyll A-B binding protein
  misc_feature (1)..(196): Homolog of NCBI NO: 3789954 NR Description: chlorophyll a/b-binding protein precursor [Oryza
  misc_feature (1)..(198): Homolog of NCBI NO: 6685157 NR Description: chlorophyll a/b binding protein precursor
  misc_feature (143)..(198): Homolog of NCBI NO: 30694146 NR Description: light-harvesting chlorophyll a/b binding protein
  misc_feature (1)..(108): Homolog of NCBI NO: 30694146 NR Description: light-harvesting chlorophyll a/b binding protein
  misc_feature (1)..(196): Homolog of NCBI NO: 115764 NR Description: Chlorophyll A-B binding protein 6A, chloroplast
  misc_feature (1)..(196): Homolog of NCBI NO: 3789954 NR Description: chlorophyll a/b-binding protein precursor [Oryza
  misc_feature (143)..(198): Homolog of NCBI NO: 30694146 NR Description: light-harvesting chlorophyll a/b binding protein
  misc_feature (1)..(196): Homolog of NCBI NO: 115764 NR Description: Chlorophyll A-B binding protein 6A, chloroplast
  misc_feature (1)..(198): Homolog of NCBI NO: 15233115 NR Description: light-harvesting chlorophyll a/b binding protein
  misc_feature (1)..(198): Homolog of NCBI NO: 13265501 NR Description: AT3g54890 [Arabidopsis thaliana]
  misc_feature (1)..(195): Homolog of NCBI NO: 625547 NR Description: chlorophyll a/b-binding protein type I - common
  misc_feature (1)..(196): Homolog of NCBI NO: 82078 NR Description: chlorophyll a/b-binding protein type I precursor
  misc_feature (1)..(196): Homolog of NCBI NO: 82079 NR Description: chlorophyll a/b-binding protein type I precursor
  misc_feature (1)..(108): Homolog of NCBI NO: 30694146 NR Description: light-harvesting chlorophyll a/b binding protein
  misc_feature (1)..(198): Homolog of NCBI NO: 6685157 NR Description: chlorophyll a/b binding protein precursor
  misc_feature (1)..(196): Homolog of NCBI NO: 82079 NR Description: chlorophyll a/b-binding protein type I precursor
  misc_feature (1)..(196): Homolog of NCBI NO: 82078 NR Description: chlorophyll a/b-binding protein type I precursor
  misc_feature (1)..(195): Homolog of NCBI NO: 625547 NR Description: chlorophyll a/b-binding protein type I - common
  misc_feature (1)..(198): Homolog of NCBI NO: 13265501 NR Description: AT3g54890 [Arabidopsis thaliana]
  misc_feature (1)..(198): Homolog of NCBI NO: 15233115 NR Description: light-harvesting chlorophyll a/b binding protein
MAAHWMPGEPRPAYLDGSAPGDFGFDPLGLGEVPANLERYKESELIHCRWAMLAVPGILVPEALGYGNWVKAQEWAALPGGQATYLGNPVPWGTLPTILAIEFLAIAFVEHQRSMEKDPEKKKYPGGAFDPLGYSKDPKKLEELKVKEIKNGRLALLAFVGFCVQQSAYPGTGPLENLATHLADPWHNNIGDIVIPFN

SEQ ID NO: 35137 - DNA, 1607 bp, Arabidopsis thaliana
  misc_feature (1)..(1607): Ceres Seq. ID no. 12439748
ctaatccaaaaacttcctagaaaagtaagtatatacctttctctgtatttccttcacctccggctaaatctccggcgaccgcgtaacttgttctccggtctgaatagtgaataaacacacacacggagccaaatccaggagaaattaggtttgaattagagagattaggagaatacaaattggtttggtggttttcaagtatgctaccaagtgggttgaaagaaacccaactccgtgagagcaacaacaaccaaaaagtccatcctcaaccaatggaagagtctatcaatcagaatcctgaagctatggaagcacttatctccaatctcttcggaaacatctcgtctttgaaatctgcttatatcgagcttcaaagtgctcatactccttacgatcccgagaagattcaggcagcggacaaagttgtcatttctgaactcaagaatctttccgaaatgaagcatttttacagagagaataaccccaaacctgtatgtgtctctccacaagactctcgtttagctgcagagatccaagagcagcagagtttgttgaagacttatgaggttatggtgaagaagtttcagtctgagattcagaacaaggattctgagatcacgcagatgctacagaagattgaggaagcaaaccagaaacggcttaagcttgataagaatcttaagttaagaggaatgtctacaaacgaaggttctaatggagatggaaatatgcagtttcctgacttaactactgaactctatgtatctacttacgaagctgctgctaaagccgtgcacgatttctccaagccgctaatcaacatgatgaaagcagcaggatgggatcttgattctgcagccaattctattgagcctgatgttgtttacgccaagaggcctcacaagaaatatgcatttgaatcatacatatgccaaaggatgttcagtgggtttcagcagaagaacttctcagtaaactcagagatgctgcggttatggccgatgatgacacagacacctttttccgccagtttcttgctctcaaggacatggatccactagatgctctaggtacaaaccctgattccaactttggtatattctgcaggagcaagtatctcctcttggtccacccaaagatggaagcttctttctttggaaatctagaccagcgtgactacgtgacaggaggtgggcacccgaggactgcgttttaccaggccttcttaaaacttgcaaagtcgatatggatcttgcacaggcttgcttactcttttgatccagctgcaaagatcttccaagtgaaaaagggtagtgagttctctgattcatacatggaaagtgttgtgaagaacatagttgtggatgaaaaagaagagaacccaagagttggtcttatggttatgcctgggttttggattggtggcagtgtcattcaaagccgagtttatgtttctggtgtgaaggtccttgagtgaaggatctcaggaactctcttaatgcttcttcccactttgttgtgcaacttttattttctctttgttataagcaagcctatatgtatcatctattgttaaaaaaaaatggaattaatatcttcttcgtctc

SEQ ID NO: 35138 - protein, 286 aa, Arabidopsis thaliana
  peptide (1)..(286): Ceres Seq. ID no. 12439749
  misc_feature (25)..(160): Pfam Name: Plant protein of unknown function (DUF641) Pfam Description: Plant protein of unknown function (DUF641)
  misc_feature (38)..(259): Homolog of NCBI NO: 15232398 NR Description: putative protein; protein id: At3g60680.1
  misc_feature (19)..(259): Homolog of NCBI NO: 34907852 NR Description: P0031D02.13 [Oryza sativa (japonica
  misc_feature (31)..(286): Homolog of NCBI NO: 20466324 NR Description: unknown protein [Arabidopsis thaliana]
  misc_feature (31)..(265): Homolog of NCBI NO: 22329840 NR Description: unknown protein
  misc_feature (25)..(261): Homolog of NCBI NO: 15219282 NR Description: unknown protein; protein id: At1g53380.1
  misc_feature (35)..(260): Homolog of NCBI NO: 15231944 NR Description: hypothetical protein; protein id: At3g14870.1
  misc_feature (35)..(260): Homolog of NCBI NO: 8777470 NR Description: gb|AAB82637.1~gene_id:K15M2.1~similar to unknown
  misc_feature (25)..(261): Homolog of NCBI NO: 15234143 NR Description: hypothetical protein; protein id: At4g33320.1
  misc_feature (25)..(261): Homolog of NCBI NO: 15235221 NR Description: putative protein; protein id: At4g34080.1
  misc_feature (1)..(261): Homolog of NCBI NO: 15225441 NR Description: hypothetical protein
MLPSGLKETQLRESNNNQKVHPQPMEESINQNPEAMEALISNLFGNISSLKSAYIELQSAHTPYDPEKIQAADKVVISELKNLSEMKHFYRENNPKPVCVSPQDSRLAAEIQEQQSLLKTYEVMVKKFQSEIQNKDSEITQMLQKIEEANQKRLKLDKNLKLRGMSTNEGSNGDGNMQFPDLTTELYVSTYEAAAKAVHDFSKPLINMMKAAGWDLDSAANSIEPDVVYAKRPHKKYAFESYICQRMFSGFQQKNFSVNSEMLRLWPMMTQTPFSASFLLSRTWIH

SEQ ID NO: 35139 - protein, 262 aa, Arabidopsis thaliana
  peptide (1)..(262): Ceres Seq. ID no. 12439750
  misc_feature (1)..(136): Pfam Name: Plant protein of unknown function (DUF641) Pfam Description: Plant protein of unknown function (DUF641)
  misc_feature (14)..(235): Homolog of NCBI NO: 15232398 NR Description: putative protein; protein id: At3g60680.1
  misc_feature (1)..(235): Homolog of NCBI NO: 34907852 NR Description: P0031D02.13 [Oryza sativa (japonica
  misc_feature (7)..(262): Homolog of NCBI NO: 20466324 NR Description: unknown protein [Arabidopsis thaliana]
  misc_feature (7)..(241): Homolog of NCBI NO: 22329840 NR Description: unknown protein
  misc_feature (1)..(237): Homolog of NCBI NO: 15219282 NR Description: unknown protein; protein id: At1g53380.1
  misc_feature (11)..(236): Homolog of NCBI NO: 15231944 NR Description: hypothetical protein; protein id: At3g14870.1
  misc_feature (11)..(236): Homolog of NCBI NO: 8777470 NR Description: gb|AAB82637.1~gene_id:K15M2.1~similar to unknown
  misc_feature (1)..(237): Homolog of NCBI NO: 15234143 NR Description: hypothetical protein; protein id: At4g33320.1
  misc_feature (1)..(237): Homolog of NCBI NO: 15235221 NR Description: putative protein; protein id: At4g34080.1
  misc_feature (1)..(237): Homolog of NCBI NO: 15225441 NR Description: hypothetical protein
MEESINQNPEAMEALISNLFGNISSLKSAYIELQSAHTPYDPEKIQAADKVVISELKNLSEMKHFYRENNPKPVCVSPQDSRLAAEIQEQQSLLKTYEVMVKKFQSEIQNKDSEITQMLQKIEEANQKRLKLDKNLKLRGMSTNEGSNGDGNMQFPDLTTELYVSTYEAAAKAVHDFSKPLINMMKAAGWDLDSAANSIEPDVVYAKRPHKKYAFESYICQRMFSGFQQKNFSVNSEMLRLWPMMTQTPFSASFLLSRTWIH

SEQ ID NO: 35140 - protein, 251 aa, Arabidopsis thaliana
  peptide (1)..(251): Ceres Seq. ID no. 12439751
  misc_feature (1)..(125): Pfam Name: Plant protein of unknown function (DUF641) Pfam Description: Plant protein of unknown function (DUF641)
  misc_feature (3)..(224): Homolog of NCBI NO: 15232398 NR Description: putative protein; protein id: At3g60680.1
  misc_feature (1)..(224): Homolog of NCBI NO: 34907852 NR Description: P0031D02.13 [Oryza sativa (japonica
  misc_feature (1)..(251): Homolog of NCBI NO: 20466324 NR Description: unknown protein [Arabidopsis thaliana]
  misc_feature (1)..(230): Homolog of NCBI NO: 22329840 NR Description: unknown protein
  misc_feature (1)..(226): Homolog of NCBI NO: 15219282 NR Description: unknown protein; protein id: At1g53380.1
  misc_feature (1)..(225): Homolog of NCBI NO: 15231944 NR Description: hypothetical protein; protein id: At3g14870.1
  misc_feature (1)..(225): Homolog of NCBI NO: 8777470 NR Description: gb|AAB82637.1~gene_id:K15M2.1~similar to unknown
  misc_feature (1)..(226): Homolog of NCBI NO: 15234143 NR Description: hypothetical protein; protein id: At4g33320.1
  misc_feature (1)..(226): Homolog of NCBI NO: 15235221 NR Description: putative protein; protein id: At4g34080.1
  misc_feature (1)..(226): Homolog of NCBI NO: 15225441 NR Description: hypothetical protein
MEALISNLFGNISSLKSAYIELQSAHTPYDPEKIQAADKVVISELKNLSEMKHFYRENNPKPVCVSPQDSRLAAEIQEQQSLLKTYEVMVKKFQSEIQNKDSEITQMLQKIEEANQKRLKLDKNLKLRGMSTNEGSNGDGNMQFPDLTTELYVSTYEAAAKAVHDFSKPLINMMKAAGWDLDSAANSIEPDVVYAKRPHKKYAFESYICQRMFSGFQQKNFSVNSEMLRLWPMMTQTPFSASFLLSRTWIH

SEQ ID NO: 35141 - DNA, 1163 bp, Arabidopsis thaliana
  misc_feature (1)..(1163): Ceres Seq. ID no. 12482807
  misc_feature: MA Experiment ID: 108573 Result: Up-regulated in Transcription
  misc_feature: MA Experiment 108573 PARAMETER Experiment Name: At_Drought_cDNA_P Parameter: Timepoint (hr) Value: 6
  misc_feature: MA Experiment 108573 PARAMETER Experiment Name: At_Drought_cDNA_P Parameter: Tissue Value: Aerial
  misc_feature: MA Experiment 108573 PARAMETER Experiment Name: At_Drought_cDNA_P Parameter: Treatment Value: Drought vs. No Drought
  misc_feature: MA Experiment ID: 108577 Result: Down-regulated in Transcription
  misc_feature: MA Experiment 108577 PARAMETER Experiment Name: At_42deg_Heat_cDNA_P Parameter: Temperature (deg C) Value: 42 vs. 22
  misc_feature: MA Experiment 108577 PARAMETER Experiment Name: At_42deg_Heat_cDNA_P Parameter: Timepoint (hr) Value: 6
  misc_feature: MA Experiment 108577 PARAMETER Experiment Name: At_42deg_Heat_cDNA_P Parameter: Tissue Value: Aerial
  misc_feature: MA Experiment ID: 108595 Result: Down-regulated in Transcription
  misc_feature: MA Experiment 108595 PARAMETER Experiment Name: At_Ler-pi_Ovule_cDNA_P Parameter: Plant Line Value: null
catttcttcttcttcttcctcactttgttcatcatcttcttctccgatctaaacaacaatggcgacaccaggagcttcctcagcaagagatgaattcgtatacatggcgaaactcgccgaacaagcagagcgttacgaagaaatggttgaattcatggagaaagtcgcgaaagctgttgacaaagacgaactcaccgtcgaagaacgtaatctcctctccgtcgcttacaaaaacgtcatcggagctcgtcgtgcttcgtggagaatcatttcatcgatcgaacaaaaggaggagtctcgcggtaacgatgaccacgtttcgttgatccgtgactacagaagcaaaatcgaaacggaactttctgatatctgtgacggaatccttaagcttctcgatacgattctcgttcccgctgctgcttctggagattcgaaggtgttttatctgaagatgaaaggtgattatcataggtacttggctgagttcaaatctggtcaagagaggaaagatgctgctgaacatactcttactgcttacaaagctgctcaggatattgctaattctgaattggctccaacgcatccgattcgtcttggtcttgcgttgaacttctctgtgttttactatgagattctcaattctccagatcgtgcttgtaatctcgctaagcaggcgtttgatgaagcaattgctgaattggatactcttggtgaagagtcatacaaggacagtactttgattatgcagcttcttcgtgataacctcactctctggacttctgatatgcaggacgatgttgctgatgacatcaaagaagcagcaccagcagcagcaaaacccgctgacgagcaacaatcctaagtcgtcttaccacaactttgttgtcatttcagtatctaaaacctctccattaatatgtttttctcttggaggtgtttctctgttggtttcttatttccttttatccccaagctctctaaggcagtctaattcttgtccttttttgctgcttttctcaaccgtggatacgaaaactcgattcctattatttttcgtttatctgtttccattttatcgtgatttgactcctatcttctgtgtctttgtttgtaatggattcaacttctctttttgtttcaatgtcaagaaaaatctttggttc

SEQ ID NO: 35142 - protein, 267 aa, Arabidopsis thaliana
  peptide (1)..(267): Ceres Seq. ID no. 12482808
  misc_feature (10)..(247): Pfam Name: 14-3-3 protein Pfam Description: 14-3-3 protein
  misc_feature (2)..(266): Homolog of NCBI NO: 8099063 NR Description: 14-3-3 protein [Populus x canescens]
  misc_feature (6)..(266): Homolog of NCBI NO: 13447104 NR Description: GF14 omega [Brassica napus]
  misc_feature (7)..(266): Homolog of NCBI NO: 487791 NR Description: GF14omega isoform
  misc_feature (7)..(266): Homolog of NCBI NO: 18411901 NR Description: 14-3-3 protein GF14 omega (grf2)
  misc_feature (2)..(264): Homolog of NCBI NO: 14532442 NR Description: At1g35160/T32G9_30 [Arabidopsis thaliana]
  misc_feature (2)..(266): Homolog of NCBI NO: 18399524 NR Description: 14-3-3 protein GF14 phi (grf4)
  misc_feature (1)..(266): Homolog of NCBI NO: 20340229 NR Description: 14-3-3-like protein [Thellungiella halophila]
  misc_feature (7)..(267): Homolog of NCBI NO: 1361987 NR Description: 14-3-3 protein homolog GF14 chi chain -
  misc_feature (1)..(267): Homolog of NCBI NO: 1702986 NR Description: 14-3-3-like protein GF14 chi (General regulatory
  misc_feature (1)..(267): Homolog of NCBI NO: 18413181 NR Description: 14-3-3 protein GF14 chi (grf1)
MATPGASSARDEFVYMAKLAEQAERYEEMVEFMEKVAKAVDKDELTVEERNLLSVAYKNVIGARRASWRIISSIEQKEESRGNDDHVSLIRDYRSKIETELSDICDGILKLLDTILVPAAASGDSKVFYLKMKGDYHRYLAEFKSGQERKDAAEHTLTAYKAAQDIANSELAPTHPIRLGLALNFSVFYYEILNSPDRACNLAKQAFDEAIAELDTLGEESYKDSTLIMQLLRDNLTLWTSDMQDDVADDIKEAAPAAAKPADEQQS

SEQ ID NO: 35143 - protein, 252 aa, Arabidopsis thaliana
  peptide (1)..(252): Ceres Seq. ID no. 12482809
  misc_feature (1)..(232): Pfam Name: 14-3-3 protein Pfam Description: 14-3-3 protein
  misc_feature (1)..(251): Homolog of NCBI NO: 8099063 NR Description: 14-3-3 protein [Populus x canescens]
  misc_feature (1)..(251): Homolog of NCBI NO: 13447104 NR Description: GF14 omega [Brassica napus]
  misc_feature (1)..(251): Homolog of NCBI NO: 487791 NR Description: GF14omega isoform
  misc_feature (1)..(251): Homolog of NCBI NO: 18411901 NR Description: 14-3-3 protein GF14 omega (grf2)
  misc_feature (1)..(249): Homolog of NCBI NO: 14532442 NR Description: At1g35160/T32G9_30 [Arabidopsis thaliana]
  misc_feature (1)..(251): Homolog of NCBI NO: 18399524 NR Description: 14-3-3 protein GF14 phi (grf4)
  misc_feature (1)..(251): Homolog of NCBI NO: 20340229 NR Description: 14-3-3-like protein [Thellungiella halophila]
  misc_feature (1)..(252): Homolog of NCBI NO: 1361987 NR Description: 14-3-3 protein homolog GF14 chi chain -
  misc_feature (1)..(252): Homolog of NCBI NO: 1702986 NR Description: 14-3-3-like protein GF14 chi (General regulatory
  misc_feature (1)..(252): Homolog of NCBI NO: 18413181 NR Description: 14-3-3 protein GF14 chi (grf1)
MAKLAEQAERYEEMVEFMEKVAKAVDKDELTVEERNLLSVAYKNVIGARRASWRIISSIEQKEESRGNDDHVSLIRDYRSKIETELSDICDGILKLLDTILVPAAASGDSKVFYLKMKGDYHRYLAEFKSGQERKDAAEHTLTAYKAAQDIANSELAPTHPIRLGLALNFSVFYYEILNSPDRACNLAKQAFDEAIAELDTLGEESYKDSTLIMQLLRDNLTLWTSDMQDDVADDIKEAAPAAAKPADEQQS

SEQ ID NO: 35144 - protein, 239 aa, Arabidopsis thaliana
  peptide (1)..(239): Ceres Seq. ID no. 12482810
  misc_feature (1)..(219): Pfam Name: 14-3-3 protein Pfam Description: 14-3-3 protein
  misc_feature (1)..(238): Homolog of NCBI NO: 8099063 NR Description: 14-3-3 protein [Populus x canescens]
  misc_feature (1)..(238): Homolog of NCBI NO: 13447104 NR Description: GF14 omega [Brassica napus]
  misc_feature (1)..(238): Homolog of NCBI NO: 487791 NR Description: GF14omega isoform
  misc_feature (1)..(238): Homolog of NCBI NO: 18411901 NR Description: 14-3-3 protein GF14 omega (grf2)
  misc_feature (1)..(236): Homolog of NCBI NO: 14532442 NR Description: At1g35160/T32G9_30 [Arabidopsis thaliana]
  misc_feature (1)..(238): Homolog of NCBI NO: 18399524 NR Description: 14-3-3 protein GF14 phi (grf4)
  misc_feature (1)..(238): Homolog of NCBI NO: 20340229 NR Description: 14-3-3-like protein [Thellungiella halophila]
  misc_feature (1)..(239): Homolog of NCBI NO: 1361987 NR Description: 14-3-3 protein homolog GF14 chi chain -
  misc_feature (1)..(239): Homolog of NCBI NO: 1702986 NR Description: 14-3-3-like protein GF14 chi (General regulatory
  misc_feature (1)..(239): Homolog of NCBI NO: 18413181 NR Description: 14-3-3 protein GF14 chi (grf1)
MVEFMEKVAKAVDKDELTVEERNLLSVAYKNVIGARRASWRIISSIEQKEESRGNDDHVSLIRDYRSKIETELSDICDGILKLLDTILVPAAASGDSKVFYLKMKGDYHRYLAEFKSGQERKDAAEHTLTAYKAAQDIANSELAPTHPIRLGLALNFSVFYYEILNSPDRACNLAKQAFDEAIAELDTLGEESYKDSTLIMQLLRDNLTLWTSDMQDDVADDIKEAAPAAAKPADEQQS

SEQ ID NO: 35145 - DNA, 797 bp, Arabidopsis thaliana
  misc_feature (1)..(797): Ceres Seq. ID no. 12421974
  misc_feature: MA Experiment ID: 108474 Result: Down-regulated in Transcription
  misc_feature: MA Experiment 108474 PARAMETER Experiment Name: At_Drought_Flowers_cDNA_P Parameter: Timepoint (hr) Value: null
  misc_feature: MA Experiment 108474 PARAMETER Experiment Name: At_Drought_Flowers_cDNA_P Parameter: Treatment Value: Drought vs. No Drought
  misc_feature: MA Experiment ID: 108595 Result: Up-regulated in Transcription
  misc_feature: MA Experiment 108595 PARAMETER Experiment Name: At_Ler-pi_Ovule_cDNA_P Parameter: Plant Line Value: null
  misc_feature: MA Experiment ID: 20000112 Result: Up-regulated in Transcription
  misc_feature: MA Experiment 20000112 PARAMETER Experiment Name: At_42deg_Heat_cDNA_P Parameter: Temperature (deg C) Value: 42 vs. 22
  misc_feature: MA Experiment 20000112 PARAMETER Experiment Name: At_42deg_Heat_cDNA_P Parameter: Timepoint (hr) Value: 2
  misc_feature: MA Experiment 20000112 PARAMETER Experiment Name: At_42deg_Heat_cDNA_P Parameter: Tissue Value: Aerial
  misc_feature: MA Experiment ID: 20000286 Result: Up-regulated in Transcription
  misc_feature: MA Experiment 20000286 PARAMETER Experiment Name: At_Open_Flower_P Parameter: Age (day) Value: 21
  misc_feature: MA Experiment 20000286 PARAMETER Experiment Name: At_Open_Flower_P Parameter: Plant Line Value: WS
  misc_feature: MA Experiment 20000286 PARAMETER Experiment Name: At_Open_Flower_P Parameter: Tissue Value: Half Open vs. Whole Plant
  misc_feature: MA Experiment ID: 20000441 Result: Down-regulated in Transcription
  misc_feature: MA Experiment 20000441 PARAMETER Experiment Name: At_1uM_BR-BRZ__P Parameter: Tissue Value: Shoot Apices
  misc_feature: MA Experiment 20000441 PARAMETER Experiment Name: At_1uM_BR-BRZ__P Parameter: Treatment Value: 1uM BR vs. No Treatment
  misc_feature: MA Experiment ID: 20000443 Result: Down-regulated in Transcription
  misc_feature: MA Experiment 20000443 PARAMETER Experiment Name: At_1uM_BR-BRZ__P Parameter: Tissue Value: Shoot Apices
  misc_feature: MA Experiment 20000443 PARAMETER Experiment Name: At_1uM_BR-BRZ__P Parameter: Treatment Value: 1uM BRZ vs. No Treatment
  misc_feature: MA Experiment ID: 20000794 Result: Up-regulated in Transcription
  misc_feature: MA Experiment 20000794 PARAMETER Experiment Name: At_Petals_P Parameter: Age (day) Value: 23-25 days
  misc_feature: MA Experiment 20000794 PARAMETER Experiment Name: At_Petals_P Parameter: Plant Line Value: WS
  misc_feature: MA Experiment 20000794 PARAMETER Experiment Name: At_Petals_P Parameter: Tissue Value: Petals vs. Whole plant
  misc_feature: MA Experiment ID: 20001761 Result: Up-regulated in Transcription
  misc_feature: MA Experiment 20001761 PARAMETER Experiment Name: At_50mM_NH4NO3_L-to-H_P Parameter: Timepoint (hr) Value: 4
  misc_feature: MA Experiment 20001761 PARAMETER Experiment Name: At_50mM_NH4NO3_L-to-H_P Parameter: Tissue Value: Siliques
  misc_feature: MA Experiment 20001761 PARAMETER Experiment Name: At_50mM_NH4NO3_L-to-H_P Parameter: Treatment Value: 50mM NH4NO3 vs 100mM Mannitol
aaacacatcacacaacaatatggtaacaatgatgagacctactctccttatacttctcttttccacctttctcccacaaatcctcaccgttgatccaccactcccaccatccaacggctccgatttcatccgtttggcctgcaacaccacactctacccggacctttgcttctccactctctcctcttttgccaactccatccaaaatgactcaaaccgcctcgcgcgcgtagccatctccctcactctccacaacactctccagcttctctcttacctccaaaacgcttataaccgcgaccacccaacccccgtccttagagactgcttcgagaatcttaaagatgccgttgacggtatgagaggctccatgaaacagatgaaggagcttgtctccgcgtctggctcgatcgagtcatttaggttccagatgagtaatgtcaagacttggcttagtgcagctcttactgatgagtatacttgtacggacgggttcaaagacgtccacgaagacgactctatcaaagatgacgtctgctctcgagtcgatgacgtcaagaagcttactagcaatgcgctggctttagttaaccgctatgccgacgagtcaataataaattaataatatctcagtcatcgatccttcgagtcttttgttttttttcgaaactatgaacttttatacttaaaaaagtattagtaaactaaaagtactactcgttgttgcatgtaatactgaaaatatatgtgagttttccttggaattattatttacttggatttatttcagtttttgc

SEQ ID NO: 35146 - protein, 206 aa, Arabidopsis thaliana
  peptide (1)..(206): Ceres Seq. ID no. 12421975
  misc_feature (14)..(199): Homolog of NCBI NO: 15234980 NR Description: putative protein
  misc_feature (37)..(200): Homolog of NCBI NO: 7488727 NR Description: 21K protein precursor - alfalfa
  misc_feature (18)..(200): Homolog of NCBI NO: 112717 NR Description: 21 KD PROTEIN PRECURSOR (1.2 PROTEIN)
  misc_feature (15)..(201): Homolog of NCBI NO: 18394174 NR Description: expressed protein
  misc_feature (3)..(201): Homolog of NCBI NO: 15226321 NR Description: unknown protein; protein id: At2g01610.1
  misc_feature (11)..(204): Homolog of NCBI NO: 21555465 NR Description: unknown [Arabidopsis thaliana]
  misc_feature (8)..(204): Homolog of NCBI NO: 15220674 NR Description: Unknown protein
  misc_feature (10)..(206): Homolog of NCBI NO: 25406069 NR Description: hypothetical protein F5A18.10 [imported] -
  misc_feature (7)..(206): Homolog of NCBI NO: 18409660 NR Description: expressed protein
  misc_feature (7)..(206): Homolog of NCBI NO: 21554277 NR Description: unknown [Arabidopsis thaliana]
NTSHNNMVTMMRPTLLILLFSTFLPQILTVDPPLPPSNGSDFIRLACNTTLYPDLCFSTLSSFANSIQNDSNRLARVAISLTLHNTLQLLSYLQNAYNRDHPTPVLRDCFENLKDAVDGMRGSMKQMKELVSASGSIESFRFQMSNVKTWLSAALTDEYTCTDGFKDVHEDDSIKDDVCSRVDDVKKLTSNALALVNRYADESIIN

SEQ ID NO: 35147 - protein, 200 aa, Arabidopsis thaliana
  peptide (1)..(200): Ceres Seq. ID no. 12421976
  misc_feature (8)..(193): Homolog of NCBI NO: 15234980 NR Description: putative protein
  misc_feature (31)..(194): Homolog of NCBI NO: 7488727 NR Description: 21K protein precursor - alfalfa
  misc_feature (12)..(194): Homolog of NCBI NO: 112717 NR Description: 21 KD PROTEIN PRECURSOR (1.2 PROTEIN)
  misc_feature (9)..(195): Homolog of NCBI NO: 18394174 NR Description: expressed protein
  misc_feature (1)..(195): Homolog of NCBI NO: 15226321 NR Description: unknown protein; protein id: At2g01610.1
  misc_feature (5)..(198): Homolog of NCBI NO: 21555465 NR Description: unknown [Arabidopsis thaliana]
  misc_feature (2)..(198): Homolog of NCBI NO: 15220674 NR Description: Unknown protein
  misc_feature (4)..(200): Homolog of NCBI NO: 25406069 NR Description: hypothetical protein F5A18.10 [imported] -
  misc_feature (1)..(200): Homolog of NCBI NO: 18409660 NR Description: expressed protein
  misc_feature (1)..(200): Homolog of NCBI NO: 21554277 NR Description: unknown [Arabidopsis thaliana]
MVTMMRPTLLILLFSTFLPQILTVDPPLPPSNGSDFIRLACNTTLYPDLCFSTLSSFANSIQNDSNRLARVAISLTLHNTLQLLSYLQNAYNRDHPTPVLRDCFENLKDAVDGMRGSMKQMKELVSASGSIESFRFQMSNVKTWLSAALTDEYTCTDGFKDVHEDDSIKDDVCSRVDDVKKLTSNALALVNRYADESIIN

SEQ ID NO: 35148 - protein, 197 aa, Arabidopsis thaliana
  peptide (1)..(197): Ceres Seq. ID no. 12421977
  misc_feature (5)..(190): Homolog of NCBI NO: 15234980 NR Description: putative protein
  misc_feature (28)..(191): Homolog of NCBI NO: 7488727 NR Description: 21K protein precursor - alfalfa
  misc_feature (9)..(191): Homolog of NCBI NO: 112717 NR Description: 21 KD PROTEIN PRECURSOR (1.2 PROTEIN)
  misc_feature (6)..(192): Homolog of NCBI NO: 18394174 NR Description: expressed protein
  misc_feature (1)..(192): Homolog of NCBI NO: 15226321 NR Description: unknown protein; protein id: At2g01610.1
  misc_feature (2)..(195): Homolog of NCBI NO: 21555465 NR Description: unknown [Arabidopsis thaliana]
  misc_feature (1)..(195): Homolog of NCBI NO: 15220674 NR Description: Unknown protein
  misc_feature (1)..(197): Homolog of NCBI NO: 25406069 NR Description: hypothetical protein F5A18.10 [imported] -
  misc_feature (1)..(197): Homolog of NCBI NO: 18409660 NR Description: expressed protein
  misc_feature (1)..(197): Homolog of NCBI NO: 21554277 NR Description: unknown [Arabidopsis thaliana]
MMRPTLLILLFSTFLPQILTVDPPLPPSNGSDFIRLACNTTLYPDLCFSTLSSFANSIQNDSNRLARVAISLTLHNTLQLLSYLQNAYNRDHPTPVLRDCFENLKDAVDGMRGSMKQMKELVSASGSIESFRFQMSNVKTWLSAALTDEYTCTDGFKDVHEDDSIKDDVCSRVDDVKKLTSNALALVNRYADESIIN

SEQ ID NO: 35149 - DNA, 1226 bp, Arabidopsis thaliana
  misc_feature (1)..(1226): Ceres Seq. ID no. 12348505
  misc_feature: MA Experiment ID: 20000794 Result: Up-regulated in Transcription
  misc_feature: MA Experiment 20000794 PARAMETER Experiment Name: At_Petals_P Parameter: Age (day) Value: 23-25 days
  misc_feature: MA Experiment 20000794 PARAMETER Experiment Name: At_Petals_P Parameter: Plant Line Value: WS
  misc_feature: MA Experiment 20000794 PARAMETER Experiment Name: At_Petals_P Parameter: Tissue Value: Petals vs. Whole plant
ctcgaagactattaaaggaatatccgcaaagaagaaaaaaaaaacatttttttggtaaaggactaatctttttgtttgcatcggccatctctaaccttacgattgtgtgttcttgctttgagcgaaaccctagaatcggtcttaacccatttgagcagagatgctgcgagtagcaggaaggaggcttttttctgtttcgcagagatcatcgacggtgacctccttcgtcctttcccgtgaccataccctttccgatggaggcaactcctcttccgcttctagatctgtcccctctgcagatctctcatctttcaattcttaccaccggagcgttataagaggttttgcttctcaagttattactcagggaaatgagataggttttggttcggaagtcccagccacagtcgaagctgtcaaaacacctaactcaaagattgtctatgacgaccataaccatgagcgttacccacctggtgaccctagcaagcgggcattcgcctattttgtcttgtcgggtggaaggtttgtttatgcctctgttctccgcctgcttgttctgaagcttattgtgagcatgtctgcaagtaaagatgtccttgcccttgcatccctcgaggttgacctagggagcatagaaccaggaactaccgtgacagtcaagtggcgtggaaagcccgtcttcatcaggcgaagaacagaagatgacatcaagctggccaatagtgtggatgttggatccctgagggacccacaagaagactcggttagagtcaagaatccagaatggttgatcgtggttggagtatgcactcatttggggtgcatccccttgcctaatgctggtgattatggtggttggttttgtccgtgtcacggatcacattacgatatatctggaagaattaggaaaggtcctgcaccatacaacctggaagtaccgacctacagcttcttggaagagaataaattactcattggttaatgaataaagcacaacagtccgagtgtcatggtctggatgatcttaaatctgtttttgtttttatattttccggcattttagcgtgcaagttcgctttcctcacactttgggctcagcaaaaattggcttgttttgctgaataatacaaacttgtcattgtatgacttagtatctgtctcatctggtgaaaatacattgttcatacttcatagtctctgtttattatttgaaaagagttttg

SEQ ID NO: 35150 - protein, 274 aa, Arabidopsis thaliana
  peptide (1)..(274): Ceres Seq. ID no. 12348506
  misc_feature (174)..(270): Pfam Name: Rieske [2Fe-2S] domain Pfam Description: Rieske [2Fe-2S] domain
  misc_feature (1)..(274): Homolog of NCBI NO: 1717953 NR Description: Ubiquinol-cytochrome C reductase iron-sulfur
  misc_feature (1)..(274): Homolog of NCBI NO: 1717951 NR Description: Ubiquinol-cytochrome C reductase iron-sulfur
  misc_feature (1)..(274): Homolog of NCBI NO: 1717950 NR Description: Ubiquinol-cytochrome C reductase iron-sulfur
  misc_feature (1)..(274): Homolog of NCBI NO: 586145 NR Description: Ubiquinol-cytochrome C reductase iron-sulfur
  misc_feature (1)..(274): Homolog of NCBI NO: 1076675 NR Description: ubiquinol-cytochrome-c reductase (EC 1.10.2.2)
  misc_feature (74)..(274): Homolog of NCBI NO: 11248861 NR Description: ubiquinol-cytochrome-c reductase (EC 1.10.2.2)
  misc_feature (1)..(274): Homolog of NCBI NO: 18417067 NR Description: ubiquinol--cytochrome-c reductase - like protein
  misc_feature (1)..(274): Homolog of NCBI NO: 21553507 NR Description: ubiquinol--cytochrome-c reductase-like protein
  misc_feature (1)..(274): Homolog of NCBI NO: 15240627 NR Description: ubiquinol--cytochrome-c reductase - like protein
  misc_feature (1)..(274): Homolog of NCBI NO: 21554278 NR Description: ubiquinol--cytochrome-c reductase-like protein
MLRVAGRRLFSVSQRSSTVTSFVLSRDHTLSDGGNSSSASRSVPSADLSSFNSYHRSVIRGFASQVITQGNEIGFGSEVPATVEAVKTPNSKIVYDDHNHERYPPGDPSKRAFAYFVLSGGRFVYASVLRLLVLKLIVSMSASKDVLALASLEVDLGSIEPGTTVTVKWRGKPVFIRRRTEDDIKLANSVDVGSLRDPQEDSVRVKNPEWLIVVGVCTHLGCIPLPNAGDYGGWFCPCHGSHYDISGRIRKGPAPYNLEVPTYSFLEENKLLIG

SEQ ID NO: 35151 - DNA, 1308 bp, Arabidopsis thaliana
  misc_feature (1)..(1308): Ceres Seq. ID no. 12335664
  misc_feature: MA Experiment ID: 108434 Result: Up-regulated in Transcription
  misc_feature: MA Experiment 108434 PARAMETER Experiment Name: At_Root_Tips_cDNA_P Parameter: Tissue Value: Root Tips
  misc_feature: MA Experiment ID: 108461 Result: Up-regulated in Transcription
  misc_feature: MA Experiment 108461 PARAMETER Experiment Name: At_Germinating_Seeds_cDNA_P Parameter: Age (day) Value: 1 vs. 0
  misc_feature: MA Experiment 108461 PARAMETER Experiment Name: At_Germinating_Seeds_cDNA_P Parameter: Tissue Value: Germinating Seeds
  misc_feature: MA Experiment ID: 108462 Result: Up-regulated in Transcription
  misc_feature: MA Experiment 108462 PARAMETER Experiment Name: At_Germinating_Seeds_cDNA_P Parameter: Age (day) Value: 2 vs. 0
  misc_feature: MA Experiment 108462 PARAMETER Experiment Name: At_Germinating_Seeds_cDNA_P Parameter: Tissue Value: Germinating Seeds
ctctttctctgttttttgtttctggggaaaatgtcttctgcgattgttgtttctcaagatgcggaatcgcttggtctgcaaatttatagccgcaaggagaaatctcttggggttctcgtctccaatttcctgagactgtataaccgagacgatgtggatctcattgggctcgatgatgccgctgggcaattaggagttgaaaggcggcgtatctatgatgtggtcaatatattggagagtattgggattgtggcaagaagagggaagaatcaatactcgtggaaaggttttggagagattcctcgttctctagatgaactcaaggaagaagggatgagagagaggttaggttactcaagttcaaacaattcagacaaggtttcaaatggttgtgaaagagaagaacctttaactttaacacctgatgatcaggagaactcatcatcctctaaaatggaccaaaagaaggaaaaatctctctggcttctcgcacagaattttgtgaagatgtttctatgttctgatgatgatctcatcacacttgatagtgctgcaaaagccttgctgagcgactctccagattcagtccatatgcgaactaaagttagaagactttacgacattgcaaatgtatttgcctcgatgaatttaatcgagaagactcatataccagtgactaggaaaccagcatataggtggttagggtccaaaagcatagctgaaagaggattaagcttatttaattccggagaaccgaagcgggtatttggaacagagatcacaaacttgagggcaaagagaaacaaaacatattgttcatcaatccgcaagcaaattggatataagaaacatgacgaggaaaacacagagcaggaatcgaaaccagctgcaagtaaatatgtgtttggcccgttctccccaataggagcatctaagacgaacaacgacaaagtcggaaagggaaggttactagagatcgaggcccttgcttctacctaccaaccacagtattgcaatcaagaaataactggtcttcttgggcatttcacggaggcatggaagaaatggtatgcagaggttgatcggaataaataacattactgaggtcacatgttttctctgggtacatgagagcacataactcatccaacatatagctttagtctttgtttgccttaaacaatagtaagaaacagagtattgttattgttaataaaagtcacacccaacaaattccgagtgactttgttctatacttgattcgaattcctatcctctccttaacttaatataaatgtttaatccatc

SEQ ID NO: 35152 - protein, 364 aa, Arabidopsis thaliana
  peptide (1)..(364): Ceres Seq. ID no. 12335665
  misc_feature (30)..(98): Pfam Name: Transcription factor E2F/dimerisation partner (TDP) Pfam Description: Transcription factor E2F/dimerisation partner
  misc_feature (30)..(227): Homolog of NCBI NO: 26334515 NR Description: unnamed protein product [Mus musculus]
  misc_feature (7)..(334): Homolog of NCBI NO: 29741773 NR Description: similar to Transcription factor E2F dimerisation
  misc_feature (145)..(360): Homolog of NCBI NO: 22331664 NR Description: DP-E2F-like protein 1
  misc_feature (54)..(274): Homolog of NCBI NO: 7487385 NR Description: hypothetical protein T24C20.40 - Arabidopsis
  misc_feature (11)..(274): Homolog of NCBI NO: 30692988 NR Description: DP-E2F-related protein 1 [Arabidopsis thaliana]
  misc_feature (11)..(274): Homolog of NCBI NO: 22331664 NR Description: DP-E2F-like protein 1
  misc_feature (11)..(208): Homolog of NCBI NO: 19578317 NR Description: transcription factor E2Ff [Arabidopsis thaliana]
  misc_feature (20)..(364): Homolog of NCBI NO: 15242176 NR Description: DP-E2F-like 2
  misc_feature (11)..(340): Homolog of NCBI NO: 6094551 NR Description: hypothetical protein [Arabidopsis thaliana]
  misc_feature (11)..(364): Homolog of NCBI NO: 22330789 NR Description: DP-E2F-like protein 3
LFLCFLFLGKMSSAIVVSQDAESLGLQIYSRKEKSLGVLVSNFLRLYNRDDVDLIGLDDAAGQLGVERRRIYDVVNILESIGIVARRGKNQYSWKGFGEIPRSLDELKEEGMRERLGYSSSNNSDKVSNGCEREEPLTLTPDDQENSSSSKMDQKKEKSLWLLAQNFVKMFLCSDDDLITLDSAAKALLSDSPDSVHMRTKVRRLYDIANVFASMNLIEKTHIPVTRKPAYRWLGSKSIAERGLSLFNSGEPKRVFGTEITNLRAKRNKTYCSSIRKQIGYKKHDEENTEQESKPAASKYVFGPFSPIGASKTNNDKVGKGRLLEIEALASTYQPQYCNQEITGLLGHFTEAWKKWYAEVDRNK

SEQ ID NO: 35153 - protein, 354 aa, Arabidopsis thaliana
  peptide (1)..(354): Ceres Seq. ID no. 12335666
  misc_feature (20)..(88): Pfam Name: Transcription factor E2F/dimerisation partner (TDP) Pfam Description: Transcription factor E2F/dimerisation partner
  misc_feature (20)..(217): Homolog of NCBI NO: 26334515 NR Description: unnamed protein product [Mus musculus]
  misc_feature (1)..(324): Homolog of NCBI NO: 29741773 NR Description: similar to Transcription factor E2F dimerisation
  misc_feature (135)..(350): Homolog of NCBI NO: 22331664 NR Description: DP-E2F-like protein 1
  misc_feature (44)..(264): Homolog of NCBI NO: 7487385 NR Description: hypothetical protein T24C20.40 - Arabidopsis
  misc_feature (1)..(264): Homolog of NCBI NO: 30692988 NR Description: DP-E2F-related protein 1 [Arabidopsis thaliana]
  misc_feature (1)..(264): Homolog of NCBI NO: 22331664 NR Description: DP-E2F-like protein 1
  misc_feature (1)..(198): Homolog of NCBI NO: 19578317 NR Description: transcription factor E2Ff [Arabidopsis thaliana]
  misc_feature (10)..(354): Homolog of NCBI NO: 15242176 NR Description: DP-E2F-like 2
  misc_feature (1)..(330): Homolog of NCBI NO: 6094551 NR Description: hypothetical protein [Arabidopsis thaliana]
  misc_feature (1)..(354): Homolog of NCBI NO: 22330789 NR Description: DP-E2F-like protein 3
MSSAIVVSQDAESLGLQIYSRKEKSLGVLVSNFLRLYNRDDVDLIGLDDAAGQLGVERRRIYDVVNILESIGIVARRGKNQYSWKGFGEIPRSLDELKEEGMRERLGYSSSNNSDKVSNGCEREEPLTLTPDDQENSSSSKMDQKKEKSLWLLAQNFVKMFLCSDDDLITLDSAAKALLSDSPDSVHMRTKVRRLYDIANVFASMNLIEKTHIPVTRKPAYRWLGSKSIAERGLSLFNSGEPKRVFGTEITNLRAKRNKTYCSSIRKQIGYKKHDEENTEQESKPAASKYVFGPFSPIGASKTNNDKVGKGRLLEIEALASTYQPQYCNQEITGLLGHFTEAWKKWYAEVDRNK

SEQ ID NO: 35154 - protein, 253 aa, Arabidopsis thaliana
  peptide (1)..(253): Ceres Seq. ID no. 12335667
  misc_feature (1)..(116): Homolog of NCBI NO: 26334515 NR Description: unnamed protein product [Mus musculus]
  misc_feature (1)..(223): Homolog of NCBI NO: 29741773 NR Description: similar to Transcription factor E2F dimerisation
  misc_feature (34)..(249): Homolog of NCBI NO: 22331664 NR Description: DP-E2F-like protein 1
  misc_feature (1)..(163): Homolog of NCBI NO: 7487385 NR Description: hypothetical protein T24C20.40 - Arabidopsis
  misc_feature (1)..(163): Homolog of NCBI NO: 30692988 NR Description: DP-E2F-related protein 1 [Arabidopsis thaliana]
  misc_feature (1)..(163): Homolog of NCBI NO: 22331664 NR Description: DP-E2F-like protein 1
  misc_feature (1)..(97): Homolog of NCBI NO: 19578317 NR Description: transcription factor E2Ff [Arabidopsis thaliana]
  misc_feature (1)..(253): Homolog of NCBI NO: 15242176 NR Description: DP-E2F-like 2
  misc_feature (1)..(229): Homolog of NCBI NO: 6094551 NR Description: hypothetical protein [Arabidopsis thaliana]
  misc_feature (1)..(253): Homolog of NCBI NO: 22330789 NR Description: DP-E2F-like protein 3
MRERLGYSSSNNSDKVSNGCEREEPLTLTPDDQENSSSSKMDQKKEKSLWLLAQNFVKMFLCSDDDLITLDSAAKALLSDSPDSVHMRTKVRRLYDIANVFASMNLIEKTHIPVTRKPAYRWLGSKSIAERGLSLFNSGEPKRVFGTEITNLRAKRNKTYCSSIRKQIGYKKHDEENTEQESKPAASKYVFGPFSPIGASKTNNDKVGKGRLLEIEALASTYQPQYCNQEITGLLGHFTEAWKKWYAEVDRNK

SEQ ID NO: 35155 - DNA, 877 bp, Arabidopsis thaliana
  misc_feature (1)..(877): Ceres Seq. ID no. 12738221
  misc_feature: MA Experiment ID: 108434 Result: Up-regulated in Transcription
  misc_feature: MA Experiment 108434 PARAMETER Experiment Name: At_Root_Tips_cDNA_P Parameter: Tissue Value: Root Tips
  misc_feature: MA Experiment ID: 108462 Result: Down-regulated in Transcription
  misc_feature: MA Experiment 108462 PARAMETER Experiment Name: At_Germinating_Seeds_cDNA_P Parameter: Age (day) Value: 2 vs. 0
  misc_feature: MA Experiment 108462 PARAMETER Experiment Name: At_Germinating_Seeds_cDNA_P Parameter: Tissue Value: Germinating Seeds
  misc_feature: MA Experiment ID: 108463 Result: Down-regulated in Transcription
  misc_feature: MA Experiment 108463 PARAMETER Experiment Name: At_Germinating_Seeds_cDNA_P Parameter: Age (day) Value: 3 vs. 0
  misc_feature: MA Experiment 108463 PARAMETER Experiment Name: At_Germinating_Seeds_cDNA_P Parameter: Tissue Value: Germinating Seeds
  misc_feature: MA Experiment ID: 108464 Result: Down-regulated in Transcription
  misc_feature: MA Experiment 108464 PARAMETER Experiment Name: At_Germinating_Seeds_cDNA_P Parameter: Age (day) Value: 4 vs. 0
  misc_feature: MA Experiment 108464 PARAMETER Experiment Name: At_Germinating_Seeds_cDNA_P Parameter: Tissue Value: Germinating Seeds
  misc_feature: MA Experiment ID: 20000180 Result: Down-regulated in Transcription
  misc_feature: MA Experiment 20000180 PARAMETER Experiment Name: At_Germinating_Seeds_P Parameter: Age (hr) Value: 24 vs. 0
  misc_feature: MA Experiment 20000180 PARAMETER Experiment Name: At_Germinating_Seeds_P Parameter: Tissue Value: Germinating Seeds
  misc_feature: MA Experiment ID: 20000184 Result: Down-regulated in Transcription
  misc_feature: MA Experiment 20000184 PARAMETER Experiment Name: At_Shoots__P Parameter: Age (day) Value: 7
  misc_feature: MA Experiment 20000184 PARAMETER Experiment Name: At_Shoots__P Parameter: Tissue Value: Shoots vs. Whole Plant
  misc_feature: MA Experiment ID: 20000227 Result: Down-regulated in Transcription
  misc_feature: MA Experiment 20000227 PARAMETER Experiment Name: At_Root-Tips-vs-Tops_P Parameter: Tissue Value: Root Tips vs. Root Tops
  misc_feature: MA Experiment ID: 20001557 Result: Up-regulated in Transcription
  misc_feature: MA Experiment 20001557 PARAMETER Experiment Name: At_Drought_Soil_Dry_P Parameter: Age (day) Value: 27
  misc_feature: MA Experiment 20001557 PARAMETER Experiment Name: At_Drought_Soil_Dry_P Parameter: Organism Value: A. thaliana
  misc_feature: MA Experiment 20001557 PARAMETER Experiment Name: At_Drought_Soil_Dry_P Parameter: Plant Line Value: WS
  misc_feature: MA Experiment 20001557 PARAMETER Experiment Name: At_Drought_Soil_Dry_P Parameter: Post Timepoint (hr) Value: 3
  misc_feature: MA Experiment 20001557 PARAMETER Experiment Name: At_Drought_Soil_Dry_P Parameter: Post-Treatment Value: Re-Water vs. No Drought
  misc_feature: MA Experiment 20001557 PARAMETER Experiment Name: At_Drought_Soil_Dry_P Parameter: Timepoint (day) Value: 13
  misc_feature: MA Experiment 20001557 PARAMETER Experiment Name: At_Drought_Soil_Dry_P Parameter: Treatment Value: Drought vs. No Drought
  misc_feature: MA Experiment ID: 20001558 Result: Up-regulated in Transcription
  misc_feature: MA Experiment 20001558 PARAMETER Experiment Name: At_Drought_Soil_Dry_P Parameter: Age (day) Value: 27
  misc_feature: MA Experiment 20001558 PARAMETER Experiment Name: At_Drought_Soil_Dry_P Parameter: Organism Value: A. thaliana
  misc_feature: MA Experiment 20001558 PARAMETER Experiment Name: At_Drought_Soil_Dry_P Parameter: Plant Line Value: WS
  misc_feature: MA Experiment 20001558 PARAMETER Experiment Name: At_Drought_Soil_Dry_P Parameter: Post Timepoint (hr) Value: 6
  misc_feature: MA Experiment 20001558 PARAMETER Experiment Name: At_Drought_Soil_Dry_P Parameter: Post-Treatment Value: Re-Water vs. No Drought
  misc_feature: MA Experiment 20001558 PARAMETER Experiment Name: At_Drought_Soil_Dry_P Parameter: Timepoint (day) Value: 13
  misc_feature: MA Experiment 20001558 PARAMETER Experiment Name: At_Drought_Soil_Dry_P Parameter: Treatment Value: Drought vs. No Drought
  misc_feature: MA Experiment ID: 20001757 Result: Up-regulated in Transcription
  misc_feature: MA Experiment 20001757 PARAMETER Experiment Name: At_50mM_NH4NO3_L-to-H_P Parameter: Timepoint (hr) Value: 6
  misc_feature: MA Experiment 20001757 PARAMETER Experiment Name: At_50mM_NH4NO3_L-to-H_P Parameter: Tissue Value: Leaf
  misc_feature: MA Experiment 20001757 PARAMETER Experiment Name: At_50mM_NH4NO3_L-to-H_P Parameter: Treatment Value: 50mM NH4NO3 vs 100mM Mannitol
aaaaggagaaagcttgaaacgccgcttcttcttcttcttcttcctctgtcgttctctctgtaaatcgcttcttcaatcatctctgtggatttgtctctattcataacttggtgaagaagatgttgacggaagaggagctcaaaagattgtacagaatccagaagacgttgatgcagatgttaagggatcgtggatattttatcgcggattctgaacttacgatgactaaacaacagtttattaggaaacatggtgataacatgaaaagagaggatcttgttactcttaaggctaagcgaaatgataatagtgatcagctctatatattcttccctgatgaggcgaaagttggtgtgaagacgatgaaaatgtacacgaacaggatgaaatcagagaatgtgttcagagctattttggttgtgcaacagaacttgaccccgtttgctcgaacttgcattagtgagatctcttccaagtttcatctggaagttttccaggaggcggaaatgctagtgaacattaaagaacatgttcttgttcctgagcatcaagttcttaccactgaagagaagaaaactttactggagagatacacagtcaaggagacacagctcccaaggatccaagtgactgatccaatcgcaagatactttggactaaaacgtgggcaagtcgtgaagatcattcgtccgagtgaaactgctggtcgttatgttacctatcgttatgttgtataagccaaaacaaaaaggcttttgtggattgtaatgcgaattgaacgctgagagttgtgaaacatagaagtaatgcttttgtaccaaacctaactgtcgactgttttttatttttggttgtcagctatgagacataaagcttg

SEQ ID NO: 35156 - protein, 205 aa, Arabidopsis thaliana; identical to SEQ ID NO: 29287
  peptide (1)..(205): Ceres Seq. ID no. 12738222
  misc_feature (1)..(90): Pfam Name: RNA polymerase Rpb5, N-terminal domain Pfam Description: RNA polymerase Rpb5, N-terminal domain
  misc_feature (4)..(204): Homolog of NCBI NO: 19922004 NR Description: CG11979-PA [Drosophila melanogaster]
  misc_feature (2)..(205): Homolog of NCBI NO: 39595790 NR Description: Hypothetical protein CBG12745 [Caenorhabditis
  misc_feature (2)..(205): Homolog of NCBI NO: 17507947 NR Description: RNA polymerase Rpb5, N-terminal domain and RNA
  misc_feature (4)..(204): Homolog of NCBI NO: 14589951 NR Description: DNA directed RNA polymerase II polypeptide E
  misc_feature (4)..(204): Homolog of NCBI NO: 2896797 NR Description: RPB5_Human [Homo sapiens]
  misc_feature (4)..(204): Homolog of NCBI NO: 28497750 NR Description: polymerase (RNA) II (DNA directed) polypeptide E
  misc_feature (4)..(204): Homolog of NCBI NO: 2135016 NR Description: DNA-directed RNA polymerase (EC 2.7.7.6) II 23K
  misc_feature (4)..(204): Homolog of NCBI NO: 1173134 NR Description: DNA-directed RNA polymerase II 23 kDa polypeptide
  misc_feature (1)..(205): Homolog of NCBI NO: 38344231 NR Description: OJ991113_30.8 [Oryza sativa (japonica
  misc_feature (1)..(205): Homolog of NCBI NO: 15228724 NR Description: RNA polymerase I, II and III 24.3 kDa subunit

SEQ ID NO: 35157 - protein, 188 aa, Arabidopsis thaliana; identical to SEQ ID NO: 29288
  peptide (1)..(188): Ceres Seq. ID no. 12738223
  misc_feature (1)..(73): Pfam Name: RNA polymerase Rpb5, N-terminal domain Pfam Description: RNA polymerase Rpb5, N-terminal domain
  misc_feature (1)..(187): Homolog of NCBI NO: 19922004 NR Description: CG11979-PA [Drosophila melanogaster]
  misc_feature (1)..(188): Homolog of NCBI NO: 39595790 NR Description: Hypothetical protein CBG12745 [Caenorhabditis
  misc_feature (1)..(188): Homolog of NCBI NO: 17507947 NR Description: RNA polymerase Rpb5, N-terminal domain and RNA
  misc_feature (1)..(187): Homolog of NCBI NO: 14589951 NR Description: DNA directed RNA polymerase II polypeptide E
  misc_feature (1)..(187): Homolog of NCBI NO: 2896797 NR Description: RPB5_Human [Homo sapiens]
  misc_feature (1)..(187): Homolog of NCBI NO: 28497750 NR Description: polymerase (RNA) II (DNA directed) polypeptide E
  misc_feature (1)..(187): Homolog of NCBI NO: 2135016 NR Description: DNA-directed RNA polymerase (EC 2.7.7.6) II 23K
  misc_feature (1)..(187): Homolog of NCBI NO: 1173134 NR Description: DNA-directed RNA polymerase II 23 kDa polypeptide
  misc_feature (1)..(188): Homolog of NCBI NO: 38344231 NR Description: OJ991113_30.8 [Oryza sativa (japonica
  misc_feature (1)..(188): Homolog of NCBI NO: 15228724 NR Description: RNA polymerase I, II and III 24.3 kDa subunit

SEQ ID NO: 35158 - protein, 186 aa, Arabidopsis thaliana
  peptide (1)..(186): Ceres Seq. ID no. 12738224
  misc_feature (1)..(71): Pfam Name: RNA polymerase Rpb5, N-terminal domain Pfam Description: RNA polymerase Rpb5, N-terminal domain
  misc_feature (1)..(185): Homolog of NCBI NO: 19922004 NR Description: CG11979-PA [Drosophila melanogaster]
  misc_feature (1)..(186): Homolog of NCBI NO: 39595790 NR Description: Hypothetical protein CBG12745 [Caenorhabditis
  misc_feature (1)..(186): Homolog of NCBI NO: 17507947 NR Description: RNA polymerase Rpb5, N-terminal domain and RNA
  misc_feature (1)..(185): Homolog of NCBI NO: 14589951 NR Description: DNA directed RNA polymerase II polypeptide E
  misc_feature (1)..(185): Homolog of NCBI NO: 2896797 NR Description: RPB5_Human [Homo sapiens]
  misc_feature (1)..(185): Homolog of NCBI NO: 28497750 NR Description: polymerase (RNA) II (DNA directed) polypeptide E
  misc_feature (1)..(185): Homolog of NCBI NO: 2135016 NR Description: DNA-directed RNA polymerase (EC 2.7.7.6) II 23K
  misc_feature (1)..(185): Homolog of NCBI NO: 1173134 NR Description: DNA-directed RNA polymerase II 23 kDa polypeptide
  misc_feature (1)..(186): Homolog of NCBI NO: 38344231 NR Description: OJ991113_30.8 [Oryza sativa (japonica
  misc_feature (1)..(186): Homolog of NCBI NO: 15228724 NR Description: RNA polymerase I, II and III 24.3 kDa subunit
MLRDRGYFIADSELTMTKQQFIRKHGDNMKREDLVTLKAKRNDNSDQLYIFFPDEAKVGVKTMKMYTNRMKSENVFRAILVVQQNLTPFARTCISEISSKFHLEVFQEAEMLVNIKEHVLVPEHQVLTTEEKKTLLERYTVKETQLPRIQVTDPIARYFGLKRGQVVKIIRPSETAGRYVTYRYVV

SEQ ID NO: 35159 - DNA, 1294 bp, Arabidopsis thaliana
  misc_feature (1)..(1294): Ceres Seq. ID no. 12385215
  misc_feature: MA Experiment ID: 108573 Result: Up-regulated in Transcription
  misc_feature: MA Experiment 108573 PARAMETER Experiment Name: At_Drought_cDNA_P Parameter: Timepoint (hr) Value: 6
  misc_feature: MA Experiment 108573 PARAMETER Experiment Name: At_Drought_cDNA_P Parameter: Tissue Value: Aerial
  misc_feature: MA Experiment 108573 PARAMETER Experiment Name: At_Drought_cDNA_P Parameter: Treatment Value: Drought vs. No Drought
  misc_feature: MA Experiment ID: 108594 Result: Down-regulated in Transcription
  misc_feature: MA Experiment 108594 PARAMETER Experiment Name: At_Ler-rhl_Root_cDNA_P Parameter: Plant Line Value: null
aataacttcatctctcccattctcttcactcttctcaaaaattcgatctttagggtttttcttttatcctcttatcgctaatctggagctctatagagactataaagggtttttgattgattcgggagctcgagatttgacttcttttagctgattcggcaagtttgtatctagaaaggatcgattggtgaggtcaatagtggttggtgggttttagtaatggaagacggtgagcttgatttctccaatcaggaagtgttttcgagttcggagatgggtgaattaccacctagcaattgttcgatggatagtttctttgatgggcttttaatggatactaatgctgcttgtacccacactcacacctgtaaccccactggaccagagaacactcatactcacacgtgcttccatgtccacaccaagattctcccggatgagagcgatgaaaaagtttctactgatgatacagctgagtcttgtgggaagaagggtgaaaagagacctttgggaaaccgggaagcggttagaaagtatagagagaagaagaaggctaaagctgcttctttggaggatgaggttgcaaggcttagggcggtgaatcagcagctggtgaagaggttgcaaaatcaggctaccttggaagctgaggtttcgaggcttaagtgtttgcttgtggatttgagaggaagaatagatggagagattggatcttttccttatcagaaacctatggctgcaaatattccttctttctcgcacatgatgaatccttgtaatgtacaatgtgatgatgaagtttattgccctcagaatgtgtttggagtgaatagccaagaaggtgcctcgatcaatgaccaagggttaagtggttgtgattttgatcagctacaatgcatggctaatcagaacttaaatggaaatggaaacggatcattcagcaacgtcaatacatctgtctcgaataagagaaaaggtgggcatcgtgcatcaagagcagtttgaagcatcatcaagcttgtactatctatttccaccagcatagatattgtattccaaataagttgtagagttcagctgcaggatcagcttcgctcaggttcctttgtatcctcatttttgttttttgttttctgactctctttcccttccattgtatttccttgttgagcttgacaaactagaaggatgatatattgttaatacaacaaactcaaatgttctgtgtgttgcttgccatttgttttcatacttgagctgcttcttcttaagtttatgtcgaagaagttgattg

SEQ ID NO: 35160 - protein, 261 aa, Arabidopsis thaliana
  peptide (1)..(261): Ceres Seq. ID no. 12385216
  misc_feature (87)..(154): Pfam Name: bZIP transcription factor Pfam Description: bZIP transcription factor
  misc_feature (94)..(186): Homolog of NCBI NO: 34908964 NR Description: P0003D09.19 [Oryza sativa (japonica
  misc_feature (44)..(170): Homolog of NCBI NO: 11357780 NR Description: hypothetical protein F4F15.70 - Arabidopsis
  misc_feature (44)..(213): Homolog of NCBI NO: 30693563 NR Description: bZIP family transcription factor [Arabidopsis
  misc_feature (44)..(213): Homolog of NCBI NO: 30693560 NR Description: bZIP family transcription factor [Arabidopsis
  misc_feature (1)..(226): Homolog of NCBI NO: 18855044 NR Description: putative transcription factor [Oryza sativa]
  misc_feature (1)..(253): Homolog of NCBI NO: 25370607 NR Description: hypothetical protein At2g16770 [imported] -
  misc_feature (1)..(261): Homolog of NCBI NO: 30679757 NR Description: bZIP protein [Arabidopsis thaliana]
  misc_feature (1)..(253): Homolog of NCBI NO: 7486791 NR Description: hypothetical protein M4E13.100 - Arabidopsis
  misc_feature (1)..(261): Homolog of NCBI NO: 21554283 NR Description: putative transcription factor [Arabidopsis
  misc_feature (1)..(261): Homolog of NCBI NO: 18418563 NR Description: bZIP protein
MEDGELDFSNQEVFSSSEMGELPPSNCSMDSFFDGLLMDTNAACTHTHTCNPTGPENTHTHTCFHVHTKILPDESDEKVSTDDTAESCGKKGEKRPLGNREAVRKYREKKKAKAASLEDEVARLRAVNQQLVKRLQNQATLEAEVSRLKCLLVDLRGRIDGEIGSFPYQKPMAANIPSFSHMMNPCNVQCDDEVYCPQNVFGVNSQEGASINDQGLSGCDFDQLQCMANQNLNGNGNGSFSNVNTSVSNKRKGGHRASRAV

SEQ ID NO: 35161 - protein, 243 aa, Arabidopsis thaliana
  peptide (1)..(243): Ceres Seq. ID no. 12385217
  misc_feature (69)..(136): Pfam Name: bZIP transcription factor Pfam Description: bZIP transcription factor
  misc_feature (76)..(168): Homolog of NCBI NO: 34908964 NR Description: P0003D09.19 [Oryza sativa (japonica
  misc_feature (26)..(152): Homolog of NCBI NO: 11357780 NR Description: hypothetical protein F4F15.70 - Arabidopsis
  misc_feature (26)..(195): Homolog of NCBI NO: 30693563 NR Description: bZIP family transcription factor [Arabidopsis
  misc_feature (26)..(195): Homolog of NCBI NO: 30693560 NR Description: bZIP family transcription factor [Arabidopsis
  misc_feature (1)..(208): Homolog of NCBI NO: 18855044 NR Description: putative transcription factor [Oryza sativa]
  misc_feature (1)..(235): Homolog of NCBI NO: 25370607 NR Description: hypothetical protein At2g16770 [imported] -
  misc_feature (1)..(243): Homolog of NCBI NO: 30679757 NR Description: bZIP protein [Arabidopsis thaliana]
  misc_feature (1)..(235): Homolog of NCBI NO: 7486791 NR Description: hypothetical protein M4E13.100 - Arabidopsis
  misc_feature (1)..(243): Homolog of NCBI NO: 21554283 NR Description: putative transcription factor [Arabidopsis
  misc_feature (1)..(243): Homolog of NCBI NO: 18418563 NR Description: bZIP protein
MGELPPSNCSMDSFFDGLLMDTNAACTHTHTCNPTGPENTHTHTCFHVHTKILPDESDEKVSTDDTAESCGKKGEKRPLGNREAVRKYREKKKAKAASLEDEVARLRAVNQQLVKRLQNQATLEAEVSRLKCLLVDLRGRIDGEIGSFPYQKPMAANIPSFSHMMNPCNVQCDDEVYCPQNVFGVNSQEGASINDQGLSGCDFDQLQCMANQNLNGNGNGSFSNVNTSVSNKRKGGHRASRAV

SEQ ID NO: 35162 - protein, 233 aa, Arabidopsis thaliana
  peptide (1)..(233): Ceres Seq. ID no. 12385218
  misc_feature (59)..(126): Pfam Name: bZIP transcription factor Pfam Description: bZIP transcription factor
  misc_feature (66)..(158): Homolog of NCBI NO: 34908964 NR Description: P0003D09.19 [Oryza sativa (japonica
  misc_feature (16)..(142): Homolog of NCBI NO: 11357780 NR Description: hypothetical protein F4F15.70 - Arabidopsis
  misc_feature (16)..(185): Homolog of NCBI NO: 30693563 NR Description: bZIP family transcription factor [Arabidopsis
  misc_feature (16)..(185): Homolog of NCBI NO: 30693560 NR Description: bZIP family transcription factor [Arabidopsis
  misc_feature (1)..(198): Homolog of NCBI NO: 18855044 NR Description: putative transcription factor [Oryza sativa]
  misc_feature (1)..(225): Homolog of NCBI NO: 25370607 NR Description: hypothetical protein At2g16770 [imported] -
  misc_feature (1)..(233): Homolog of NCBI NO: 30679757 NR Description: bZIP protein [Arabidopsis thaliana]
  misc_feature (1)..(225): Homolog of NCBI NO: 7486791 NR Description: hypothetical protein M4E13.100 - Arabidopsis
  misc_feature (1)..(233): Homolog of NCBI NO: 21554283 NR Description: putative transcription factor [Arabidopsis
  misc_feature (1)..(233): Homolog of NCBI NO: 18418563 NR Description: bZIP protein
MDSFFDGLLMDTNAACTHTHTCNPTGPENTHTHTCFHVHTKILPDESDEKVSTDDTAESCGKKGEKRPLGNREAVRKYREKKKAKAASLEDEVARLRAVNQQLVKRLQNQATLEAEVSRLKCLLVDLRGRIDGEIGSFPYQKPMAANIPSFSHMMNPCNVQCDDEVYCPQNVFGVNSQEGASINDQGLSGCDFDQLQCMANQNLNGNGNGSFSNVNTSVSNKRKGGHRASRAV

SEQ ID NO: 35163 - DNA, 897 bp, Arabidopsis thaliana
  misc_feature (1)..(897): Ceres Seq. ID no. 12481912
  misc_feature: MA Experiment ID: 108435 Result: Down-regulated in Transcription
  misc_feature: MA Experiment 108435 PARAMETER Experiment Name: At_stm_Mutants_cDNA_P Parameter: Plant Line Value: wt Landsburg vs stm
  misc_feature: MA Experiment 108435 PARAMETER Experiment Name: At_stm_Mutants_cDNA_P Parameter: Tissue Value: Shoot Apical Meristem Region
  misc_feature: MA Experiment ID: 108576 Result: Down-regulated in Transcription
  misc_feature: MA Experiment 108576 PARAMETER Experiment Name: At_42deg_Heat_cDNA_P Parameter: Temperature (deg C) Value: 42 vs. 22
  misc_feature: MA Experiment 108576 PARAMETER Experiment Name: At_42deg_Heat_cDNA_P Parameter: Timepoint (hr) Value: 1
  misc_feature: MA Experiment 108576 PARAMETER Experiment Name: At_42deg_Heat_cDNA_P Parameter: Tissue Value: Aerial
  misc_feature: MA Experiment ID: 108577 Result: Down-regulated in Transcription
  misc_feature: MA Experiment 108577 PARAMETER Experiment Name: At_42deg_Heat_cDNA_P Parameter: Temperature (deg C) Value: 42 vs. 22
  misc_feature: MA Experiment 108577 PARAMETER Experiment Name: At_42deg_Heat_cDNA_P Parameter: Timepoint (hr) Value: 6
  misc_feature: MA Experiment 108577 PARAMETER Experiment Name: At_42deg_Heat_cDNA_P Parameter: Tissue Value: Aerial
  misc_feature: MA Experiment ID: 108585 Result: Down-regulated in Transcription
  misc_feature: MA Experiment 108585 PARAMETER Experiment Name: At_5mM_NaNP_cDNA_P Parameter: Timepoint (hr) Value: 6
  misc_feature: MA Experiment 108585 PARAMETER Experiment Name: At_5mM_NaNP_cDNA_P Parameter: Tissue Value: Aerial
  misc_feature: MA Experiment 108585 PARAMETER Experiment Name: At_5mM_NaNP_cDNA_P Parameter: Treatment Value: null
  misc_feature: MA Experiment ID: 108595 Result: Down-regulated in Transcription
  misc_feature: MA Experiment 108595 PARAMETER Experiment Name: At_Ler-pi_Ovule_cDNA_P Parameter: Plant Line Value: null
  misc_feature: MA Experiment ID: 108668 Result: Down-regulated in Transcription
  misc_feature: MA Experiment 108668 PARAMETER Experiment Name: At_2mM_SA_cDNA_P Parameter: Plant Line Value: WS
  misc_feature: MA Experiment 108668 PARAMETER Experiment Name: At_2mM_SA_cDNA_P Parameter: Timepoint (hr) Value: 6
  misc_feature: MA Experiment 108668 PARAMETER Experiment Name: At_2mM_SA_cDNA_P Parameter: Treatment Value: 2mM SA vs. No Treatment
  misc_feature: MA Experiment ID: 20000071 Result: Down-regulated in Transcription
  misc_feature: MA Experiment 20000071 PARAMETER Experiment Name: At_100uM_ABA_Mutants_cDNA_P Parameter: Plant Line Value: CS8104
  misc_feature: MA Experiment 20000071 PARAMETER Experiment Name: At_100uM_ABA_Mutants_cDNA_P Parameter: Timepoint (hr) Value: 6
  misc_feature: MA Experiment 20000071 PARAMETER Experiment Name: At_100uM_ABA_Mutants_cDNA_P Parameter: Tissue Value: Aerial
  misc_feature: MA Experiment 20000071 PARAMETER Experiment Name: At_100uM_ABA_Mutants_cDNA_P Parameter: Treatment Value: 100uM ABA vs. No Treatment
  misc_feature: MA Experiment ID: 20000111 Result: Down-regulated in Transcription
  misc_feature: MA Experiment 20000111 PARAMETER Experiment Name: At_42deg_Heat_cDNA_P Parameter: Temperature (deg C) Value: 42 vs. 22
  misc_feature: MA Experiment 20000111 PARAMETER Experiment Name: At_42deg_Heat_cDNA_P Parameter: Timepoint (hr) Value: 6
  misc_feature: MA Experiment 20000111 PARAMETER Experiment Name: At_42deg_Heat_cDNA_P Parameter: Tissue Value: Aerial
  misc_feature: MA Experiment ID: 20000112 Result: Down-regulated in Transcription
  misc_feature: MA Experiment 20000112 PARAMETER Experiment Name: At_42deg_Heat_cDNA_P Parameter: Temperature (deg C) Value: 42 vs. 22
  misc_feature: MA Experiment 20000112 PARAMETER Experiment Name: At_42deg_Heat_cDNA_P Parameter: Timepoint (hr) Value: 2
  misc_feature: MA Experiment 20000112 PARAMETER Experiment Name: At_42deg_Heat_cDNA_P Parameter: Tissue Value: Aerial
  misc_feature: MA Experiment ID: 20000144 Result: Down-regulated in Transcription
  misc_feature: MA Experiment 20000144 PARAMETER Experiment Name: At_42deg_Heat_cDNA_P Parameter: Temperature (deg C) Value: 42 vs. 22
  misc_feature: MA Experiment 20000144 PARAMETER Experiment Name: At_42deg_Heat_cDNA_P Parameter: Timepoint (hr) Value: 1
  misc_feature: MA Experiment 20000144 PARAMETER Experiment Name: At_42deg_Heat_cDNA_P Parameter: Tissue Value: Aerial
  misc_feature: MA Experiment ID: 20000171 Result: Down-regulated in Transcription
  misc_feature: MA Experiment 20000171 PARAMETER Experiment Name: At_42deg_Heat_P Parameter: Age (day) Value: 14
  misc_feature: MA Experiment 20000171 PARAMETER Experiment Name: At_42deg_Heat_P Parameter: Organism Value: A. thaliana
  misc_feature: MA Experiment 20000171 PARAMETER Experiment Name: At_42deg_Heat_P Parameter: Plant Line Value: WS
  misc_feature: MA Experiment 20000171 PARAMETER Experiment Name: At_42deg_Heat_P Parameter: Temperature (deg C) Value: 42 vs. 22
  misc_feature: MA Experiment 20000171 PARAMETER Experiment Name: At_42deg_Heat_P Parameter: Timepoint (hr) Value: 1
  misc_feature: MA Experiment 20000171 PARAMETER Experiment Name: At_42deg_Heat_P Parameter: Tissue Value: Aerial
  misc_feature: MA Experiment ID: 20000173 Result: Down-regulated in Transcription
  misc_feature: MA Experiment 20000173 PARAMETER Experiment Name: At_42deg_Heat_P Parameter: Age (day) Value: 14
  misc_feature: MA Experiment 20000173 PARAMETER Experiment Name: At_42deg_Heat_P Parameter: Organism Value: A. thaliana
  misc_feature: MA Experiment 20000173 PARAMETER Experiment Name: At_42deg_Heat_P Parameter: Plant Line Value: WS
  misc_feature: MA Experiment 20000173 PARAMETER Experiment Name: At_42deg_Heat_P Parameter: Temperature (deg C) Value: 42 vs. 22
  misc_feature: MA Experiment 20000173 PARAMETER Experiment Name: At_42deg_Heat_P Parameter: Timepoint (hr) Value: 6
  misc_feature: MA Experiment 20000173 PARAMETER Experiment Name: At_42deg_Heat_P Parameter: Tissue Value: Aerial
  misc_feature: MA Experiment ID: 20000180 Result: Up-regulated in Transcription
  misc_feature: MA Experiment 20000180 PARAMETER Experiment Name: At_Germinating_Seeds_P Parameter: Age (hr) Value: 24 vs. 0
  misc_feature: MA Experiment 20000180 PARAMETER Experiment Name: At_Germinating_Seeds_P Parameter: Tissue Value: Germinating Seeds
  misc_feature: MA Experiment ID: 20000182 Result: Down-regulated in Transcription
  misc_feature: MA Experiment 20000182 PARAMETER Experiment Name: At_2mM_SA_P Parameter: Age (day) Value: 14
  misc_feature: MA Experiment 20000182 PARAMETER Experiment Name: At_2mM_SA_P Parameter: Organism Value: A. thaliana
  misc_feature: MA Experiment 20000182 PARAMETER Experiment Name: At_2mM_SA_P Parameter: Plant Line Value: WS
  misc_feature: MA Experiment 20000182 PARAMETER Experiment Name: At_2mM_SA_P Parameter: Timepoint (hr) Value: 6
  misc_feature: MA Experiment 20000182 PARAMETER Experiment Name: At_2mM_SA_P Parameter: Tissue Value: Aerial
  misc_feature: MA Experiment 20000182 PARAMETER Experiment Name: At_2mM_SA_P Parameter: Treatment Value: 2mM SA vs. No Treatment
  misc_feature: MA Experiment ID: 20000185 Result: Down-regulated in Transcription
  misc_feature: MA Experiment 20000185 PARAMETER Experiment Name: At_Roots__P Parameter: Age (day) Value: 7 vs. 21
  misc_feature: MA Experiment 20000185 PARAMETER Experiment Name: At_Roots__P Parameter: Organism Value: A. thaliana
  misc_feature: MA Experiment 20000185 PARAMETER Experiment Name: At_Roots__P Parameter: Tissue Value: Roots vs. Whole Plant
  misc_feature: MA Experiment ID: 20000224 Result: Up-regulated in Transcription
  misc_feature: MA Experiment ID: 20000235 Result: Up-regulated in Transcription
  misc_feature: MA Experiment 20000235 PARAMETER Experiment Name: At_Siliques_P Parameter: Age (day) Value: 21
  misc_feature: MA Experiment 20000235 PARAMETER Experiment Name: At_Siliques_P Parameter: Organism Value: A. thaliana
  misc_feature: MA Experiment 20000235 PARAMETER Experiment Name: At_Siliques_P Parameter: Plant Line Value: WS
  misc_feature: MA Experiment 20000235 PARAMETER Experiment Name: At_Siliques_P Parameter: Tissue Value: 5-10mm Siliques vs. Whole Plant
  misc_feature: MA Experiment ID: 20000437 Result: Down-regulated in Transcription
  misc_feature: MA Experiment 20000437 PARAMETER Experiment Name: At_Drought_P Parameter: Age (day) Value: 8
  misc_feature: MA Experiment 20000437 PARAMETER Experiment Name: At_Drought_P Parameter: Organism Value: A. thaliana
  misc_feature: MA Experiment 20000437 PARAMETER Experiment Name: At_Drought_P Parameter: Plant Line Value: WS
  misc_feature: MA Experiment 20000437 PARAMETER Experiment Name: At_Drought_P Parameter: Timepoint (hr) Value: 24
  misc_feature: MA Experiment 20000437 PARAMETER Experiment Name: At_Drought_P Parameter: Tissue Value: Whole Plant
  misc_feature: MA Experiment 20000437 PARAMETER Experiment Name: At_Drought_P Parameter: Treatment Value: Drought vs. No Drought
  misc_feature: MA Experiment ID: 20000439 Result: Down-regulated in Transcription
  misc_feature: MA Experiment 20000439 PARAMETER Experiment Name: At_Roots__P Parameter: Age (day) Value: 14 vs. 21
  misc_feature: MA Experiment 20000439 PARAMETER Experiment Name: At_Roots__P Parameter: Organism Value: A. thaliana
  misc_feature: MA Experiment 20000439 PARAMETER Experiment Name: At_Roots__P Parameter: Tissue Value: Roots vs. Whole Plant
  misc_feature: MA Experiment ID: 20000495 Result: Down-regulated in Transcription
  misc_feature: MA Experiment 20000495 PARAMETER Experiment Name: At_Guard_Cells_P Parameter: Harvest Date Value: 8/2/2002
  misc_feature: MA Experiment 20000495 PARAMETER Experiment Name: At_Guard_Cells_P Parameter: Organism Value: A. thaliana
  misc_feature: MA Experiment 20000495 PARAMETER Experiment Name: At_Guard_Cells_P Parameter: Tissue Value: Guard Cells vs. Leaves
  misc_feature: MA Experiment ID: 20001248 Result: Down-regulated in Transcription
  misc_feature: MA Experiment 20001248 PARAMETER Experiment Name: At_Far-red-induction_P Parameter: Age (day) Value: 7
  misc_feature: MA Experiment 20001248 PARAMETER Experiment Name: At_Far-red-induction_P Parameter: Light Value: Far-red vs. White
  misc_feature: MA Experiment 20001248 PARAMETER Experiment Name: At_Far-red-induction_P Parameter: Organism Value: A. thaliana
  misc_feature: MA Experiment 20001248 PARAMETER Experiment Name: At_Far-red-induction_P Parameter: Plant Line Value: Columbia
  misc_feature: MA Experiment 20001248 PARAMETER Experiment Name: At_Far-red-induction_P Parameter: Timepoint (hr) Value: 4
  misc_feature: MA Experiment 20001248 PARAMETER Experiment Name: At_Far-red-induction_P Parameter: Tissue Value: Whole Plant
  misc_feature: MA Experiment ID: 20001450 Result: Down-regulated in Transcription
  misc_feature: MA Experiment 20001450 PARAMETER Experiment Name: At_Far-red-induction_P Parameter: Age (day) Value: 7
  misc_feature: MA Experiment 20001450 PARAMETER Experiment Name: At_Far-red-induction_P Parameter: Light Value: Far-red vs. White
  misc_feature: MA Experiment 20001450 PARAMETER Experiment Name: At_Far-red-induction_P Parameter: Organism Value: A. thaliana
  misc_feature: MA Experiment 20001450 PARAMETER Experiment Name: At_Far-red-induction_P Parameter: Plant Line Value: Columbia
  misc_feature: MA Experiment 20001450 PARAMETER Experiment Name: At_Far-red-induction_P Parameter: Timepoint (hr) Value: 8
  misc_feature: MA Experiment 20001450 PARAMETER Experiment Name: At_Far-red-induction_P Parameter: Tissue Value: Whole Plant
  misc_feature: MA Experiment ID: 20001905 Result: Down-regulated in Transcription
  misc_feature: MA Experiment 20001905 PARAMETER Experiment Name: At_Drought_Reproduction_P Parameter: Age (day) Value: 40
  misc_feature: MA Experiment 20001905 PARAMETER Experiment Name: At_Drought_Reproduction_P Parameter: Organism Value: A. thaliana
  misc_feature: MA Experiment 20001905 PARAMETER Experiment Name: At_Drought_Reproduction_P Parameter: Plant Line Value: WS
  misc_feature: MA Experiment 20001905 PARAMETER Experiment Name: At_Drought_Reproduction_P Parameter: Timepoint (day) Value: 10
  misc_feature: MA Experiment 20001905 PARAMETER Experiment Name: At_Drought_Reproduction_P Parameter: Tissue Value: Rosettes
  misc_feature: MA Experiment 20001905 PARAMETER Experiment Name: At_Drought_Reproduction_P Parameter: Treatment Value: Drought vs. No Drought
  misc_feature: MA Experiment ID: 20001906 Result: Down-regulated in Transcription
  misc_feature: MA Experiment 20001906 PARAMETER Experiment Name: At_Drought_Reproduction_P Parameter: Age (day) Value: 35
  misc_feature: MA Experiment 20001906 PARAMETER Experiment Name: At_Drought_Reproduction_P Parameter: Organism Value: A. thaliana
  misc_feature: MA Experiment 20001906 PARAMETER Experiment Name: At_Drought_Reproduction_P Parameter: Plant Line Value: WS
  misc_feature: MA Experiment 20001906 PARAMETER Experiment Name: At_Drought_Reproduction_P Parameter: Timepoint (day) Value: 5
  misc_feature: MA Experiment 20001906 PARAMETER Experiment Name: At_Drought_Reproduction_P Parameter: Tissue Value: Siliques
  misc_feature: MA Experiment 20001906 PARAMETER Experiment Name: At_Drought_Reproduction_P Parameter: Treatment Value: Drought vs. No Drought
atgatgaacacacttcatgcatttcagacaaccttaacaccaaactttcatgttcttttcaatgcctcgagacattctctttcccgaccccaatttctctgtctctccaaatcgggagacggaacttcagattctgattctgatcccgaccctccaaaacccgaaggcgatactcgcaggcaagaactcttagctaggatcgccatgattcagacatcgaaggtccgtttgacggatttcttggacgagagatcagagtatctcaccaagtttgctgaagaagccaatgcggagtttgacaaggttggagaagacgccatgaaagaccttgacgaagctagcacaaggatactggagaatatcgaaagcaagatgcaagcttttgaggaatctgcgggattgaacagattagagatcgaggagaacgataataagttggctgagtttgaggagaagattcaagtagacaggaatgaaggattgttctttaaaagcttacgtgacaaaaaaccagtggatagagagcaagctagagaggaaactgagaaaatacaagaggttaccaaagaaagtgcaggatcaaagtcaagaaggaatatttacctcgggttaattgggattgtggttctcgcaattgctgattccttcgtttcttcaccggattggagaaaagtcgcaattcttggagctatccttgtcccactgctcactcaattcgtatacgagcagacattattatcagaagcagataagggaaaggaaaacaagaaggaatgaacgatagaagccgacaaactctgtattaatcgaaagagatgaatataacttgatggcatagacccaaagtgtgaaacttatcactttaggtttgatgcgtcaagctacagcttttctttt

SEQ ID NO: 35164 - protein, 258 aa, Arabidopsis thaliana
  peptide (1)..(258): Ceres Seq. ID no. 12481913
  misc_feature (69)..(254): Homolog of NCBI NO: 34908370 NR Description: P0529E05.11 [Oryza sativa (japonica
  misc_feature (1)..(258): Homolog of NCBI NO: 15232007 NR Description: unknown protein; protein id: At3g09050.1
MMNTLHAFQTTLTPNFHVLFNASRHSLSRPQFLCLSKSGDGTSDSDSDPDPPKPEGDTRRQELLARIAMIQTSKVRLTDFLDERSEYLTKFAEEANAEFDKVGEDAMKDLDEASTRILENIESKMQAFEESAGLNRLEIEENDNKLAEFEEKIQVDRNEGLFFKSLRDKKPVDREQAREETEKIQEVTKESAGSKSRRNIYLGLIGIVVLAIADSFVSSPDWRKVAILGAILVPLLTQFVYEQTLLSEADKGKENKKE

SEQ ID NO: 35165 - protein, 257 aa, Arabidopsis thaliana
  peptide (1)..(257): Ceres Seq. ID no. 12481914
  misc_feature (68)..(253): Homolog of NCBI NO: 34908370 NR Description: P0529E05.11 [Oryza sativa (japonica
  misc_feature (1)..(257): Homolog of NCBI NO: 15232007 NR Description: unknown protein; protein id: At3g09050.1
MNTLHAFQTTLTPNFHVLFNASRHSLSRPQFLCLSKSGDGTSDSDSDPDPPKPEGDTRRQELLARIAMIQTSKVRLTDFLDERSEYLTKFAEEANAEFDKVGEDAMKDLDEASTRILENIESKMQAFEESAGLNRLEIEENDNKLAEFEEKIQVDRNEGLFFKSLRDKKPVDREQAREETEKIQEVTKESAGSKSRRNIYLGLIGIVVLAIADSFVSSPDWRKVAILGAILVPLLTQFVYEQTLLSEADKGKENKKE

SEQ ID NO: 35166 - protein, 190 aa, Arabidopsis thaliana
  peptide (1)..(190): Ceres Seq. ID no. 12481915
  misc_feature (1)..(186): Homolog of NCBI NO: 34908370 NR Description: P0529E05.11 [Oryza sativa (japonica
  misc_feature (1)..(190): Homolog of NCBI NO: 15232007 NR Description: unknown protein; protein id: At3g09050.1
MIQTSKVRLTDFLDERSEYLTKFAEEANAEFDKVGEDAMKDLDEASTRILENIESKMQAFEESAGLNRLEIEENDNKLAEFEEKIQVDRNEGLFFKSLRDKKPVDREQAREETEKIQEVTKESAGSKSRRNIYLGLIGIVVLAIADSFVSSPDWRKVAILGAILVPLLTQFVYEQTLLSEADKGKENKKE

SEQ ID NO: 35167 - DNA, 1403 bp, Arabidopsis thaliana
  misc_feature (1)..(1403): Ceres Seq. ID no. 12335179
  misc_feature: MA Experiment ID: 108434 Result: Down-regulated in Transcription
  misc_feature: MA Experiment 108434 PARAMETER Experiment Name: At_Root_Tips_cDNA_P Parameter: Tissue Value: Root Tips
  misc_feature: MA Experiment ID: 108463 Result: Up-regulated in Transcription
  misc_feature: MA Experiment 108463 PARAMETER Experiment Name: At_Germinating_Seeds_cDNA_P Parameter: Age (day) Value: 3 vs. 0
  misc_feature: MA Experiment 108463 PARAMETER Experiment Name: At_Germinating_Seeds_cDNA_P Parameter: Tissue Value: Germinating Seeds
  misc_feature: MA Experiment ID: 108464 Result: Up-regulated in Transcription
  misc_feature: MA Experiment 108464 PARAMETER Experiment Name: At_Germinating_Seeds_cDNA_P Parameter: Age (day) Value: 4 vs. 0
  misc_feature: MA Experiment 108464 PARAMETER Experiment Name: At_Germinating_Seeds_cDNA_P Parameter: Tissue Value: Germinating Seeds
  misc_feature: MA Experiment ID: 108488 Result: Down-regulated in Transcription
  misc_feature: MA Experiment ID: 108573 Result: Up-regulated in Transcription
  misc_feature: MA Experiment 108573 PARAMETER Experiment Name: At_Drought_cDNA_P Parameter: Timepoint (hr) Value: 6
  misc_feature: MA Experiment 108573 PARAMETER Experiment Name: At_Drought_cDNA_P Parameter: Tissue Value: Aerial
  misc_feature: MA Experiment 108573 PARAMETER Experiment Name: At_Drought_cDNA_P Parameter: Treatment Value: Drought vs. No Drought
  misc_feature: MA Experiment ID: 108577 Result: Down-regulated in Transcription
  misc_feature: MA Experiment 108577 PARAMETER Experiment Name: At_42deg_Heat_cDNA_P Parameter: Temperature (deg C) Value: 42 vs. 22
  misc_feature: MA Experiment 108577 PARAMETER Experiment Name: At_42deg_Heat_cDNA_P Parameter: Timepoint (hr) Value: 6
  misc_feature: MA Experiment 108577 PARAMETER Experiment Name: At_42deg_Heat_cDNA_P Parameter: Tissue Value: Aerial
  misc_feature: MA Experiment ID: 108585 Result: Up-regulated in Transcription
  misc_feature: MA Experiment 108585 PARAMETER Experiment Name: At_5mM_NaNP_cDNA_P Parameter: Timepoint (hr) Value: 6
  misc_feature: MA Experiment 108585 PARAMETER Experiment Name: At_5mM_NaNP_cDNA_P Parameter: Tissue Value: Aerial
  misc_feature: MA Experiment 108585 PARAMETER Experiment Name: At_5mM_NaNP_cDNA_P Parameter: Treatment Value: null
  misc_feature: MA Experiment ID: 108595 Result: Up-regulated in Transcription
  misc_feature: MA Experiment 108595 PARAMETER Experiment Name: At_Ler-pi_Ovule_cDNA_P Parameter: Plant Line Value: null
  misc_feature: MA Experiment ID: 108667 Result: Up-regulated in Transcription
  misc_feature: MA Experiment 108667 PARAMETER Experiment Name: At_2mM_SA_cDNA_P Parameter: Plant Line Value: WS
  misc_feature: MA Experiment 108667 PARAMETER Experiment Name: At_2mM_SA_cDNA_P Parameter: Timepoint (hr) Value: 1
  misc_feature: MA Experiment 108667 PARAMETER Experiment Name: At_2mM_SA_cDNA_P Parameter: Treatment Value: 2mM SA vs. No Treatment
  misc_feature: MA Experiment ID: 20000088 Result: Up-regulated in Transcription
  misc_feature: MA Experiment 20000088 PARAMETER Experiment Name: At_100uM_ABA_Mutants_cDNA_P Parameter: Plant Line Value: Landsberg
  misc_feature: MA Experiment 20000088 PARAMETER Experiment Name: At_100uM_ABA_Mutants_cDNA_P Parameter: Timepoint (hr) Value: 6
  misc_feature: MA Experiment 20000088 PARAMETER Experiment Name: At_100uM_ABA_Mutants_cDNA_P Parameter: Tissue Value: Aerial
  misc_feature: MA Experiment 20000088 PARAMETER Experiment Name: At_100uM_ABA_Mutants_cDNA_P Parameter: Treatment Value: 100uM ABA vs. No Treatment
  misc_feature: MA Experiment ID: 20000185 Result: Down-regulated in Transcription
  misc_feature: MA Experiment 20000185 PARAMETER Experiment Name: At_Roots__P Parameter: Age (day) Value: 7 vs. 21
  misc_feature: MA Experiment 20000185 PARAMETER Experiment Name: At_Roots__P Parameter: Organism Value: A. thaliana
  misc_feature: MA Experiment 20000185 PARAMETER Experiment Name: At_Roots__P Parameter: Tissue Value: Roots vs. Whole Plant
  misc_feature: MA Experiment ID: 20000234 Result: Down-regulated in Transcription
  misc_feature: MA Experiment 20000234 PARAMETER Experiment Name: At_Siliques_P Parameter: Age (day) Value: 21
  misc_feature: MA Experiment 20000234 PARAMETER Experiment Name: At_Siliques_P Parameter: Organism Value: A. thaliana
  misc_feature: MA Experiment 20000234 PARAMETER Experiment Name: At_Siliques_P Parameter: Plant Line Value: WS
  misc_feature: MA Experiment 20000234 PARAMETER Experiment Name: At_Siliques_P Parameter: Tissue Value: Less Than 5mm Siliques vs. Whole Plant
  misc_feature: MA Experiment ID: 20000235 Result: Down-regulated in Transcription
  misc_feature: MA Experiment 20000235 PARAMETER Experiment Name: At_Siliques_P Parameter: Age (day) Value: 21
  misc_feature: MA Experiment 20000235 PARAMETER Experiment Name: At_Siliques_P Parameter: Organism Value: A. thaliana
  misc_feature: MA Experiment 20000235 PARAMETER Experiment Name: At_Siliques_P Parameter: Plant Line Value: WS
  misc_feature: MA Experiment 20000235 PARAMETER Experiment Name: At_Siliques_P Parameter: Tissue Value: 5-10mm Siliques vs. Whole Plant
  misc_feature: MA Experiment ID: 20000264 Result: Down-regulated in Transcription
  misc_feature: MA Experiment 20000264 PARAMETER Experiment Name: At_Open_Flower_P Parameter: Age (day) Value: 21
  misc_feature: MA Experiment 20000264 PARAMETER Experiment Name: At_Open_Flower_P Parameter: Plant Line Value: WS
  misc_feature: MA Experiment 20000264 PARAMETER Experiment Name: At_Open_Flower_P Parameter: Tissue Value: Open Flower vs. Whole Plant
  misc_feature: MA Experiment ID: 20000265 Result: Down-regulated in Transcription
  misc_feature: MA Experiment 20000265 PARAMETER Experiment Name: At_Open_Flower_P Parameter: Age (day) Value: 21
  misc_feature: MA Experiment 20000265 PARAMETER Experiment Name: At_Open_Flower_P Parameter: Plant Line Value: WS
  misc_feature: MA Experiment 20000265 PARAMETER Experiment Name: At_Open_Flower_P Parameter: Tissue Value: Closed Flower vs. Whole Plant
  misc_feature: MA Experiment ID: 20000286 Result: Down-regulated in Transcription
  misc_feature: MA Experiment 20000286 PARAMETER Experiment Name: At_Open_Flower_P Parameter: Age (day) Value: 21
  misc_feature: MA Experiment 20000286 PARAMETER Experiment Name: At_Open_Flower_P Parameter: Plant Line Value: WS
  misc_feature: MA Experiment 20000286 PARAMETER Experiment Name: At_Open_Flower_P Parameter: Tissue Value: Half Open vs. Whole Plant
  misc_feature: MA Experiment ID: 20000439 Result: Down-regulated in Transcription
  misc_feature: MA Experiment 20000439 PARAMETER Experiment Name: At_Roots__P Parameter: Age (day) Value: 14 vs. 21
  misc_feature: MA Experiment 20000439 PARAMETER Experiment Name: At_Roots__P Parameter: Organism Value: A. thaliana
  misc_feature: MA Experiment 20000439 PARAMETER Experiment Name: At_Roots__P Parameter: Tissue Value: Roots vs. Whole Plant
  misc_feature: MA Experiment ID: 20000460 Result: Up-regulated in Transcription
  misc_feature: MA Experiment 20000460 PARAMETER Experiment Name: At_10percent_PEG_P Parameter: Age (day) Value: 12
  misc_feature: MA Experiment 20000460 PARAMETER Experiment Name: At_10percent_PEG_P Parameter: Organism Value: A. thaliana
  misc_feature: MA Experiment 20000460 PARAMETER Experiment Name: At_10percent_PEG_P Parameter: Plant Line Value: WS
  misc_feature: MA Experiment 20000460 PARAMETER Experiment Name: At_10percent_PEG_P Parameter: Timepoint (day) Value: 12
  misc_feature: MA Experiment 20000460 PARAMETER Experiment Name: At_10percent_PEG_P Parameter: Tissue Value: Whole Plant
  misc_feature: MA Experiment 20000460 PARAMETER Experiment Name: At_10percent_PEG_P Parameter: Treatment Value: 10percent PEG vs. No Treatment
  misc_feature: MA Experiment ID: 20000527 Result: Up-regulated in Transcription
  misc_feature: MA Experiment 20000527 PARAMETER Experiment Name: At_10percent_PEG_P Parameter: Age (day) Value: 20
  misc_feature: MA Experiment 20000527 PARAMETER Experiment Name: At_10percent_PEG_P Parameter: Organism Value: A. thaliana
  misc_feature: MA Experiment 20000527 PARAMETER Experiment Name: At_10percent_PEG_P Parameter: Plant Line Value: WS
  misc_feature: MA Experiment 20000527 PARAMETER Experiment Name: At_10percent_PEG_P Parameter: Timepoint (day) Value: 20
  misc_feature: MA Experiment 20000527 PARAMETER Experiment Name: At_10percent_PEG_P Parameter: Tissue Value: Whole Plant
  misc_feature: MA Experiment 20000527 PARAMETER Experiment Name: At_10percent_PEG_P Parameter: Treatment Value: 10percent PEG vs. No Treatment
  misc_feature: MA Experiment ID: 20000794 Result: Down-regulated in Transcription
  misc_feature: MA Experiment 20000794 PARAMETER Experiment Name: At_Petals_P Parameter: Age (day) Value: 23-25 days
  misc_feature: MA Experiment 20000794 PARAMETER Experiment Name: At_Petals_P Parameter: Plant Line Value: WS
  misc_feature: MA Experiment 20000794 PARAMETER Experiment Name: At_Petals_P Parameter: Tissue Value: Petals vs. Whole plant
  misc_feature: MA Experiment ID: 20001247 Result: Up-regulated in Transcription
  misc_feature: MA Experiment 20001247 PARAMETER Experiment Name: At_Far-red-induction_P Parameter: Age (day) Value: 7
  misc_feature: MA Experiment 20001247 PARAMETER Experiment Name: At_Far-red-induction_P Parameter: Light Value: Far-red vs. White
  misc_feature: MA Experiment 20001247 PARAMETER Experiment Name: At_Far-red-induction_P Parameter: Organism Value: A. thaliana
  misc_feature: MA Experiment 20001247 PARAMETER Experiment Name: At_Far-red-induction_P Parameter: Plant Line Value: Columbia
  misc_feature: MA Experiment 20001247 PARAMETER Experiment Name: At_Far-red-induction_P Parameter: Timepoint (hr) Value: 1
  misc_feature: MA Experiment 20001247 PARAMETER Experiment Name: At_Far-red-induction_P Parameter: Tissue Value: Whole Plant
aaacctctctgtcattactctggtcagcgattcttctttcttcttcttctcagatcctttcaccgagtaagaagattttaaagatgccgtcaacgccgacgacgccgactacaacaacgccgatcacggcttcgtattggtgttacagctgtacgcgtttcgtcagcgtttgggctgatcaaggcacaacaaccgtcggtagcgtcgcttgccctcactgcgacggcggttttatcgaacagattaacgattcttcctccgccgctaccgaattaacgattccggcttctactgaagtaagatcgatcaataacaaccgtagatccgtgattagacgccggagatccggtcgtcgtccgtcctttaatccggtcatcgtacttcaaggaggcgccggcgagagagaagagggagaagaaggagatgcggctagagatcgacgcgcttttgagttttattacgatgacggatccggatcgggtcttagaccgcttccggattctgtatctgagatcttgatgggatctggattcgagcggttacttgaacagctaagccaaatcgaagcgtcggctactggaattggtagatctggaaaccctccggcgtctaaatcggcgattgagtctttacctagagtcgaaatctcggattgccacataggctcggaggctaattgcgctgtttgcacggagattttcgagacggagacggaggcgcgtgagatgccgtgtaaacaccttttccacgacgattgcatcgtaccgtggctatcgattcgaaactcttgtcccgtgtgcagattcgagctaccttcagagcctaatcgacggagcaacaacaacgaggaggataacgccgtggggatgacgatttggagacttcccggtggtggattcgccgtagggaggtttaacgcagcaatgagagacggagagagagttttgccagtggtgttaacagaaatggatggtggtgggattggtaatagccaggatggtcctagacggatctcatgggttaggtcacacggtacactcgaatcggatagtaacggtactggctcaggttccggctccggtggaagattgaggaggatggttcgtggaatggtgtcgttaatgaggagagtgagaccaaaccgtagctcttcttcttcatcagctgcgatatcaacttcttctgataatctggatttgaacattgaagtagaatctagggttttggataggtcaaattcagtgatgagaagatacttcagaagaaacagaagtaacagggattcttcgtcttcagttcttcattgattcagaaatatatatatattattttttggtttgttcattcaacaatgtaaatataagattcagaagaaaaagattggtgcttcgttttctattacc

SEQ ID NO: 35168 - protein, 434 aa, Arabidopsis thaliana
  peptide (1)..(434): Ceres Seq. ID no. 12335180
  misc_feature (226)..(266): Pfam Name: Zinc finger, C3HC4 type (RING finger) Pfam Description: Zinc finger, C3HC4 type (RING finger)
  misc_feature (44)..(281): Homolog of NCBI NO: 18405518 NR Description: expressed protein
  misc_feature (41)..(286): Homolog of NCBI NO: 18410530 NR Description: Expressed protein
  misc_feature (40)..(303): Homolog of NCBI NO: 34908968 NR Description: P0003D09.21 [Oryza sativa (japonica
  misc_feature (165)..(352): Homolog of NCBI NO: 34906008 NR Description: putative RING-H2 finger protein RHC2a
  misc_feature (129)..(347): Homolog of NCBI NO: 34902106 NR Description: unknown protein [Oryza sativa (japonica
  misc_feature (42)..(422): Homolog of NCBI NO: 18405141 NR Description: expressed protein
  misc_feature (29)..(413): Homolog of NCBI NO: 14719329 NR Description: putative RING-H2 finger protein [Oryza sativa]
  misc_feature (30)..(419): Homolog of NCBI NO: 15232595 NR Description: putative protein
  misc_feature (28)..(434): Homolog of NCBI NO: 18424254 NR Description: putative protein
  misc_feature (1)..(434): Homolog of NCBI NO: 8885559 NR Description: emb|CAB62332.1~gene_id:F2O15.22~strong similarity
TSLSLLWSAILLSSSSQILSPSKKILKMPSTPTTPTTTTPITASYWCYSCTRFVSVWADQGTTTVGSVACPHCDGGFIEQINDSSSAATELTIPASTEVRSINNNRRSVIRRRRSGRRPSFNPVIVLQGGAGEREEGEEGDAARDRRAFEFYYDDGSGSGLRPLPDSVSEILMGSGFERLLEQLSQIEASATGIGRSGNPPASKSAIESLPRVEISDCHIGSEANCAVCTEIFETETEAREMPCKHLFHDDCIVPWLSIRNSCPVCRFELPSEPNRRSNNNEEDNAVGMTIWRLPGGGFAVGRFNAAMRDGERVLPVVLTEMDGGGIGNSQDGPRRISWVRSHGTLESDSNGTGSGSGSGGRLRRMVRGMVSLMRRVRPNRSSSSSSAAISTSSDNLDLNIEVESRVLDRSNSVMRRYFRRNRSNRDSSSSVLH

SEQ ID NO: 35169 - protein, 407 aa, Arabidopsis thaliana
  peptide (1)..(407): Ceres Seq. ID no. 12335181
  misc_feature (199)..(239): Pfam Name: Zinc finger, C3HC4 type (RING finger) Pfam Description: Zinc finger, C3HC4 type (RING finger)
  misc_feature (17)..(254): Homolog of NCBI NO: 18405518 NR Description: expressed protein
  misc_feature (14)..(259): Homolog of NCBI NO: 18410530 NR Description: Expressed protein
  misc_feature (13)..(276): Homolog of NCBI NO: 34908968 NR Description: P0003D09.21 [Oryza sativa (japonica
  misc_feature (138)..(325): Homolog of NCBI NO: 34906008 NR Description: putative RING-H2 finger protein RHC2a
  misc_feature (102)..(320): Homolog of NCBI NO: 34902106 NR Description: unknown protein [Oryza sativa (japonica
  misc_feature (15)..(395): Homolog of NCBI NO: 18405141 NR Description: expressed protein
  misc_feature (2)..(386): Homolog of NCBI NO: 14719329 NR Description: putative RING-H2 finger protein [Oryza sativa]
  misc_feature (3)..(392): Homolog of NCBI NO: 15232595 NR Description: putative protein
  misc_feature (1)..(407): Homolog of NCBI NO: 18424254 NR Description: putative protein
  misc_feature (1)..(407): Homolog of NCBI NO: 8885559 NR Description: emb|CAB62332.1~gene_id:F2O15.22~strong similarity
MPSTPTTPTTTTPITASYWCYSCTRFVSVWADQGTTTVGSVACPHCDGGFIEQINDSSSAATELTIPASTEVRSINNNRRSVIRRRRSGRRPSFNPVIVLQGGAGEREEGEEGDAARDRRAFEFYYDDGSGSGLRPLPDSVSEILMGSGFERLLEQLSQIEASATGIGRSGNPPASKSAIESLPRVEISDCHIGSEANCAVCTEIFETETEAREMPCKHLFHDDCIVPWLSIRNSCPVCRFELPSEPNRRSNNNEEDNAVGMTIWRLPGGGFAVGRFNAAMRDGERVLPVVLTEMDGGGIGNSQDGPRRISWVRSHGTLESDSNGTGSGSGSGGRLRRMVRGMVSLMRRVRPNRSSSSSSAAISTSSDNLDLNIEVESRVLDRSNSVMRRYFRRNRSNRDSSSSVLH

SEQ ID NO: 35170 - protein, 262 aa, Arabidopsis thaliana
  peptide (1)..(262): Ceres Seq. ID no. 12335182
  misc_feature (54)..(94): Pfam Name: Zinc finger, C3HC4 type (RING finger) Pfam Description: Zinc finger, C3HC4 type (RING finger)
  misc_feature (1)..(109): Homolog of NCBI NO: 18405518 NR Description: expressed protein
  misc_feature (1)..(114): Homolog of NCBI NO: 18410530 NR Description: Expressed protein
  misc_feature (1)..(131): Homolog of NCBI NO: 34908968 NR Description: P0003D09.21 [Oryza sativa (japonica
  misc_feature (1)..(180): Homolog of NCBI NO: 34906008 NR Description: putative RING-H2 finger protein RHC2a
  misc_feature (1)..(175): Homolog of NCBI NO: 34902106 NR Description: unknown protein [Oryza sativa (japonica
  misc_feature (1)..(250): Homolog of NCBI NO: 18405141 NR Description: expressed protein
  misc_feature (1)..(241): Homolog of NCBI NO: 14719329 NR Description: putative RING-H2 finger protein [Oryza sativa]
  misc_feature (1)..(247): Homolog of NCBI NO: 15232595 NR Description: putative protein
  misc_feature (1)..(262): Homolog of NCBI NO: 18424254 NR Description: putative protein
  misc_feature (1)..(262): Homolog of NCBI NO: 8885559 NR Description: emb|CAB62332.1~gene_id:F2O15.22~strong similarity
MGSGFERLLEQLSQIEASATGIGRSGNPPASKSAIESLPRVEISDCHIGSEANCAVCTEIFETETEAREMPCKHLFHDDCIVPWLSIRNSCPVCRFELPSEPNRRSNNNEEDNAVGMTIWRLPGGGFAVGRFNAAMRDGERVLPVVLTEMDGGGIGNSQDGPRRISWVRSHGTLESDSNGTGSGSGSGGRLRRMVRGMVSLMRRVRPNRSSSSSSAAISTSSDNLDLNIEVESRVLDRSNSVMRRYFRRNRSNRDSSSSVLH

SEQ ID NO: 35171 - DNA, 1503 bp, Arabidopsis thaliana
  misc_feature (1)..(1503): Ceres Seq. ID no. 12335175
  misc_feature: MA Experiment ID: 108577 Result: Up-regulated in Transcription
  misc_feature: MA Experiment 108577 PARAMETER Experiment Name: At_42deg_Heat_cDNA_P Parameter: Temperature (deg C) Value: 42 vs. 22
  misc_feature: MA Experiment 108577 PARAMETER Experiment Name: At_42deg_Heat_cDNA_P Parameter: Timepoint (hr) Value: 6
  misc_feature: MA Experiment 108577 PARAMETER Experiment Name: At_42deg_Heat_cDNA_P Parameter: Tissue Value: Aerial
  misc_feature: MA Experiment ID: 108595 Result: Down-regulated in Transcription
  misc_feature: MA Experiment 108595 PARAMETER Experiment Name: At_Ler-pi_Ovule_cDNA_P Parameter: Plant Line Value: null
  misc_feature: MA Experiment ID: 20000173 Result: Up-regulated in Transcription
  misc_feature: MA Experiment 20000173 PARAMETER Experiment Name: At_42deg_Heat_P Parameter: Age (day) Value: 14
  misc_feature: MA Experiment 20000173 PARAMETER Experiment Name: At_42deg_Heat_P Parameter: Organism Value: A. thaliana
  misc_feature: MA Experiment 20000173 PARAMETER Experiment Name: At_42deg_Heat_P Parameter: Plant Line Value: WS
  misc_feature: MA Experiment 20000173 PARAMETER Experiment Name: At_42deg_Heat_P Parameter: Temperature (deg C) Value: 42 vs. 22
  misc_feature: MA Experiment 20000173 PARAMETER Experiment Name: At_42deg_Heat_P Parameter: Timepoint (hr) Value: 6
  misc_feature: MA Experiment 20000173 PARAMETER Experiment Name: At_42deg_Heat_P Parameter: Tissue Value: Aerial
  misc_feature: MA Experiment ID: 20000437 Result: Down-regulated in Transcription
  misc_feature: MA Experiment 20000437 PARAMETER Experiment Name: At_Drought_P Parameter: Age (day) Value: 8
  misc_feature: MA Experiment 20000437 PARAMETER Experiment Name: At_Drought_P Parameter: Organism Value: A. thaliana
  misc_feature: MA Experiment 20000437 PARAMETER Experiment Name: At_Drought_P Parameter: Plant Line Value: WS
  misc_feature: MA Experiment 20000437 PARAMETER Experiment Name: At_Drought_P Parameter: Timepoint (hr) Value: 24
  misc_feature: MA Experiment 20000437 PARAMETER Experiment Name: At_Drought_P Parameter: Tissue Value: Whole Plant
  misc_feature: MA Experiment 20000437 PARAMETER Experiment Name: At_Drought_P Parameter: Treatment Value: Drought vs. No Drought
  misc_feature: MA Experiment ID: 20001557 Result: Down-regulated in Transcription
  misc_feature: MA Experiment 20001557 PARAMETER Experiment Name: At_Drought_Soil_Dry_P Parameter: Age (day) Value: 27
  misc_feature: MA Experiment 20001557 PARAMETER Experiment Name: At_Drought_Soil_Dry_P Parameter: Organism Value: A. thaliana
  misc_feature: MA Experiment 20001557 PARAMETER Experiment Name: At_Drought_Soil_Dry_P Parameter: Plant Line Value: WS
  misc_feature: MA Experiment 20001557 PARAMETER Experiment Name: At_Drought_Soil_Dry_P Parameter: Post Timepoint (hr) Value: 3
  misc_feature: MA Experiment 20001557 PARAMETER Experiment Name: At_Drought_Soil_Dry_P Parameter: Post-Treatment Value: Re-Water vs. No Drought
  misc_feature: MA Experiment 20001557 PARAMETER Experiment Name: At_Drought_Soil_Dry_P Parameter: Timepoint (day) Value: 13
  misc_feature: MA Experiment 20001557 PARAMETER Experiment Name: At_Drought_Soil_Dry_P Parameter: Treatment Value: Drought vs. No Drought
  misc_feature: MA Experiment ID: 20001905 Result: Down-regulated in Transcription
  misc_feature: MA Experiment 20001905 PARAMETER Experiment Name: At_Drought_Reproduction_P Parameter: Age (day) Value: 40
  misc_feature: MA Experiment 20001905 PARAMETER Experiment Name: At_Drought_Reproduction_P Parameter: Organism Value: A. thaliana
  misc_feature: MA Experiment 20001905 PARAMETER Experiment Name: At_Drought_Reproduction_P Parameter: Plant Line Value: WS
  misc_feature: MA Experiment 20001905 PARAMETER Experiment Name: At_Drought_Reproduction_P Parameter: Timepoint (day) Value: 10
  misc_feature: MA Experiment 20001905 PARAMETER Experiment Name: At_Drought_Reproduction_P Parameter: Tissue Value: Rosettes
  misc_feature: MA Experiment 20001905 PARAMETER Experiment Name: At_Drought_Reproduction_P Parameter: Treatment Value: Drought vs. No Drought
agaaattaaacagcgacgtcgttttgcagctacagtgcgatcatctaatcagtcagtgtcttcaagtttaaaccgcatctctagtctctctctacttctctctgtgtacaatattcggaaagtgaggaagatacactgaagcaaaagagcaagtcatggcggcgacatcttcctctgcttttctccttaatccgttgacttctcgccaccgtcctttcaaatactcgccagagctctcttctctctccttatcctctcgaaaggctgctgctttcgatgtttcctcagctgctttcacgctcaagagacagagccggagtgatgttgtgtgcaaggctgtatctatcaagccagaagctggtgttgaagggctcaatatcgccgataacgccgctcagcttattgggaaaactccgatggtgtacttgaacaatgtagtcaagggctgtgttgcaagtgttgctgctaagcttgagatcatggaaccatgttgcagtgtcaaggataggattgggtacagtatgattactgatgctgaagagaaaggacttataacacctggaaagagtgttcttgtggaatctacgagtgggaacacagggattggccttgcattcattgctgcttcaaaaggctataaacttatcttgacgatgcctgcgtccatgagtttggaaaggcgggttcttttgagggcatttggagctgagcttgtgttaactgaacctgcaaaaggtatgactggagcaattcagaaggctgaagaaatcttgaaaaaaactcccaattcctacatgctccaacagtttgacaaccctgccaatcccaagattcattatgagacgactggtcctgagatttgggaagatacaagaggcaaaatcgatatattggttgcggggattggaactggtggaactatcactggtgttggtcgattcattaaagaaagaaaacctgaattgaaggttattggtgtcgaacccacggaaagtgctatactttctggtggaaaacccggacctcacaagattcaaggaattggagctggatttgtacccaagaatttggatctggctattgtagatgaatacatagcgatttccagtgaggaagctattgaaacctcgaagcaactagctctccaggaaggcttgttggttggtatatcttctggagctgctgctgctgctgcaatccaggttgcaaagagacctgaaaatgccgggaaactcatagccgttgtgttcccgagcttcggggaacgttacctctcgacccagcttttccagtcgattcgagaagagtgcgagcaaatgcagcccgagctttgattttcttctgtaatttcgtgaccaacaaggaacctcttctttgatttattgctgattgtttttcttctaatagacgtttctgcagaaatctctacgtctactgtgtatatttacaattcgcaacgcaatttggtgtttgttattaataaaggcataagaggttttggtc

SEQ ID NO: 35172 - protein, 392 aa, Arabidopsis thaliana
  peptide (1)..(392): Ceres Seq. ID no. 12335176
  misc_feature (79)..(368): Pfam Name: Pyridoxal-phosphate dependent enzyme Pfam Description: Pyridoxal-phosphate dependent enzyme
  misc_feature (79)..(368): Pfam Name: Pyridoxal-phosphate dependent enzyme Pfam Description: Pyridoxal-phosphate dependent enzyme
  misc_feature (1)..(372): Homolog of NCBI NO: 30695058 NR Description: cysteine synthase, mitochondrial (O-acetylserine
  misc_feature (1)..(392): Homolog of NCBI NO: 1488519 NR Description: cysteine synthase [Arabidopsis thaliana]
  misc_feature (10)..(392): Homolog of NCBI NO: 25291707 NR Description: cysteine synthase (EC 4.2.99.8) precursor,
  misc_feature (1)..(392): Homolog of NCBI NO: 11269069 NR Description: cysteine synthase (EC 4.2.99.8) F24G16.30
  misc_feature (1)..(391): Homolog of NCBI NO: 30695056 NR Description: cysteine synthase, mitochondrial (O-acetylserine
  misc_feature (1)..(372): Homolog of NCBI NO: 30695058 NR Description: cysteine synthase, mitochondrial (O-acetylserine
  misc_feature (10)..(392): Homolog of NCBI NO: 25291707 NR Description: cysteine synthase (EC 4.2.99.8) precursor,
  misc_feature (1)..(391): Homolog of NCBI NO: 30695056 NR Description: cysteine synthase, mitochondrial (O-acetylserine
  misc_feature (1)..(392): Homolog of NCBI NO: 15224351 NR Description: cysteine synthase (cpACS1)
  misc_feature (1)..(392): Homolog of NCBI NO: 572517 NR Description: cysteine synthase [Arabidopsis thaliana]
  misc_feature (1)..(392): Homolog of NCBI NO: 1084347 NR Description: cysteine synthase (EC 4.2.99.8) isoform 7-4
  misc_feature (1)..(392): Homolog of NCBI NO: 12643295 NR Description: CYSTEINE SYNTHASE, MITOCHONDRIAL PRECURSOR SULFHYDRYLASE) (O-ACETYLSERINE (THIOL)-LYASE) (CSASE C) (CS-C)
  misc_feature (1)..(392): Homolog of NCBI NO: 22331875 NR Description: cysteine synthase
  misc_feature (1)..(392): Homolog of NCBI NO: 11269069 NR Description: cysteine synthase (EC 4.2.99.8) F24G16.30
  misc_feature (1)..(392): Homolog of NCBI NO: 1488519 NR Description: cysteine synthase [Arabidopsis thaliana]
  misc_feature (1)..(392): Homolog of NCBI NO: 22331875 NR Description: cysteine synthase
  misc_feature (1)..(392): Homolog of NCBI NO: 12643295 NR Description: CYSTEINE SYNTHASE, MITOCHONDRIAL PRECURSOR SULFHYDRYLASE) (O-ACETYLSERINE (THIOL)-LYASE) (CSASE C) (CS-C)
  misc_feature (1)..(392): Homolog of NCBI NO: 1084347 NR Description: cysteine synthase (EC 4.2.99.8) isoform 7-4
  misc_feature (1)..(392): Homolog of NCBI NO: 572517 NR Description: cysteine synthase [Arabidopsis thaliana]
  misc_feature (1)..(392): Homolog of NCBI NO: 15224351 NR Description: cysteine synthase (cpACS1)
MAATSSSAFLLNPLTSRHRPFKYSPELSSLSLSSRKAAAFDVSSAAFTLKRQSRSDVVCKAVSIKPEAGVEGLNIADNAAQLIGKTPMVYLNNVVKGCVASVAAKLEIMEPCCSVKDRIGYSMITDAEEKGLITPGKSVLVESTSGNTGIGLAFIAASKGYKLILTMPASMSLERRVLLRAFGAELVLTEPAKGMTGAIQKAEEILKKTPNSYMLQQFDNPANPKIHYETTGPEIWEDTRGKIDILVAGIGTGGTITGVGRFIKERKPELKVIGVEPTESAILSGGKPGPHKIQGIGAGFVPKNLDLAIVDEYIAISSEEAIETSKQLALQEGLLVGISSGAAAAAAIQVAKRPENAGKLIAVVFPSFGERYLSTQLFQSIREECEQMQPEL

SEQ ID NO: 35173 - protein, 305 aa, Arabidopsis thaliana
  peptide (1)..(305): Ceres Seq. ID no. 12335177
  misc_feature (1)..(281): Pfam Name: Pyridoxal-phosphate dependent enzyme Pfam Description: Pyridoxal-phosphate dependent enzyme
  misc_feature (1)..(281): Pfam Name: Pyridoxal-phosphate dependent enzyme Pfam Description: Pyridoxal-phosphate dependent enzyme
  misc_feature (1)..(285): Homolog of NCBI NO: 30695058 NR Description: cysteine synthase, mitochondrial (O-acetylserine
  misc_feature (1)..(305): Homolog of NCBI NO: 1488519 NR Description: cysteine synthase [Arabidopsis thaliana]
  misc_feature (1)..(305): Homolog of NCBI NO: 25291707 NR Description: cysteine synthase (EC 4.2.99.8) precursor,
  misc_feature (1)..(305): Homolog of NCBI NO: 11269069 NR Description: cysteine synthase (EC 4.2.99.8) F24G16.30
  misc_feature (1)..(304): Homolog of NCBI NO: 30695056 NR Description: cysteine synthase, mitochondrial (O-acetylserine
  misc_feature (1)..(285): Homolog of NCBI NO: 30695058 NR Description: cysteine synthase, mitochondrial (O-acetylserine
  misc_feature (1)..(305): Homolog of NCBI NO: 25291707 NR Description: cysteine synthase (EC 4.2.99.8) precursor,
  misc_feature (1)..(304): Homolog of NCBI NO: 30695056 NR Description: cysteine synthase, mitochondrial (O-acetylserine
  misc_feature (1)..(305): Homolog of NCBI NO: 15224351 NR Description: cysteine synthase (cpACS1)
  misc_feature (1)..(305): Homolog of NCBI NO: 572517 NR Description: cysteine synthase [Arabidopsis thaliana]
  misc_feature (1)..(305): Homolog of NCBI NO: 1084347 NR Description: cysteine synthase (EC 4.2.99.8) isoform 7-4
  misc_feature (1)..(305): Homolog of NCBI NO: 12643295 NR Description: CYSTEINE SYNTHASE, MITOCHONDRIAL PRECURSOR SULFHYDRYLASE) (O-ACETYLSERINE (THIOL)-LYASE) (CSASE C) (CS-C)
  misc_feature (1)..(305): Homolog of NCBI NO: 22331875 NR Description: cysteine synthase
  misc_feature (1)..(305): Homolog of NCBI NO: 11269069 NR Description: cysteine synthase (EC 4.2.99.8) F24G16.30
  misc_feature (1)..(305): Homolog of NCBI NO: 1488519 NR Description: cysteine synthase [Arabidopsis thaliana]
  misc_feature (1)..(305): Homolog of NCBI NO: 22331875 NR Description: cysteine synthase
  misc_feature (1)..(305): Homolog of NCBI NO: 12643295 NR Description: CYSTEINE SYNTHASE, MITOCHONDRIAL PRECURSOR SULFHYDRYLASE) (O-ACETYLSERINE (THIOL)-LYASE) (CSASE C) (CS-C)
  misc_feature (1)..(305): Homolog of NCBI NO: 1084347 NR Description: cysteine synthase (EC 4.2.99.8) isoform 7-4
  misc_feature (1)..(305): Homolog of NCBI NO: 572517 NR Description: cysteine synthase [Arabidopsis thaliana]
  misc_feature (1)..(305): Homolog of NCBI NO: 15224351 NR Description: cysteine synthase (cpACS1)
MVYLNNVVKGCVASVAAKLEIMEPCCSVKDRIGYSMITDAEEKGLITPGKSVLVESTSGNTGIGLAFIAASKGYKLILTMPASMSLERRVLLRAFGAELVLTEPAKGMTGAIQKAEEILKKTPNSYMLQQFDNPANPKIHYETTGPEIWEDTRGKIDILVAGIGTGGTITGVGRFIKERKPELKVIGVEPTESAILSGGKPGPHKIQGIGAGFVPKNLDLAIVDEYIAISSEEAIETSKQLALQEGLLVGISSGAAAAAAIQVAKRPENAGKLIAVVFPSFGERYLSTQLFQSIREECEQMQPEL

SEQ ID NO: 35174 - protein, 284 aa, Arabidopsis thaliana
  peptide (1)..(284): Ceres Seq. ID no. 12335178
  misc_feature (1)..(260): Pfam Name: Pyridoxal-phosphate dependent enzyme Pfam Description: Pyridoxal-phosphate dependent enzyme
  misc_feature (1)..(260): Pfam Name: Pyridoxal-phosphate dependent enzyme Pfam Description: Pyridoxal-phosphate dependent enzyme
  misc_feature (1)..(264): Homolog of NCBI NO: 30695058 NR Description: cysteine synthase, mitochondrial (O-acetylserine
  misc_feature (1)..(284): Homolog of NCBI NO: 1488519 NR Description: cysteine synthase [Arabidopsis thaliana]
  misc_feature (1)..(284): Homolog of NCBI NO: 25291707 NR Description: cysteine synthase (EC 4.2.99.8) precursor,
  misc_feature (1)..(284): Homolog of NCBI NO: 11269069 NR Description: cysteine synthase (EC 4.2.99.8) F24G16.30
  misc_feature (1)..(283): Homolog of NCBI NO: 30695056 NR Description: cysteine synthase, mitochondrial (O-acetylserine
  misc_feature (1)..(264): Homolog of NCBI NO: 30695058 NR Description: cysteine synthase, mitochondrial (O-acetylserine
  misc_feature (1)..(284): Homolog of NCBI NO: 25291707 NR Description: cysteine synthase (EC 4.2.99.8) precursor,
  misc_feature (1)..(283): Homolog of NCBI NO: 30695056 NR Description: cysteine synthase, mitochondrial (O-acetylserine
  misc_feature (1)..(284): Homolog of NCBI NO: 15224351 NR Description: cysteine synthase (cpACS1)
  misc_feature (1)..(284): Homolog of NCBI NO: 572517 NR Description: cysteine synthase [Arabidopsis thaliana]
  misc_feature (1)..(284): Homolog of NCBI NO: 1084347 NR Description: cysteine synthase (EC 4.2.99.8) isoform 7-4
  misc_feature (1)..(284): Homolog of NCBI NO: 12643295 NR Description: CYSTEINE SYNTHASE, MITOCHONDRIAL PRECURSOR SULFHYDRYLASE) (O-ACETYLSERINE (THIOL)-LYASE) (CSASE C) (CS-C)
  misc_feature (1)..(284): Homolog of NCBI NO: 22331875 NR Description: cysteine synthase
  misc_feature (1)..(284): Homolog of NCBI NO: 11269069 NR Description: cysteine synthase (EC 4.2.99.8) F24G16.30
  misc_feature (1)..(284): Homolog of NCBI NO: 1488519 NR Description: cysteine synthase [Arabidopsis thaliana]
  misc_feature (1)..(284): Homolog of NCBI NO: 22331875 NR Description: cysteine synthase
  misc_feature (1)..(284): Homolog of NCBI NO: 12643295 NR Description: CYSTEINE SYNTHASE, MITOCHONDRIAL PRECURSOR SULFHYDRYLASE) (O-ACETYLSERINE (THIOL)-LYASE) (CSASE C) (CS-C)
  misc_feature (1)..(284): Homolog of NCBI NO: 1084347 NR Description: cysteine synthase (EC 4.2.99.8) isoform 7-4
  misc_feature (1)..(284): Homolog of NCBI NO: 572517 NR Description: cysteine synthase [Arabidopsis thaliana]
  misc_feature (1)..(284): Homolog of NCBI NO: 15224351 NR Description: cysteine synthase (cpACS1)
MEPCCSVKDRIGYSMITDAEEKGLITPGKSVLVESTSGNTGIGLAFIAASKGYKLILTMPASMSLERRVLLRAFGAELVLTEPAKGMTGAIQKAEEILKKTPNSYMLQQFDNPANPKIHYETTGPEIWEDTRGKIDILVAGIGTGGTITGVGRFIKERKPELKVIGVEPTESAILSGGKPGPHKIQGIGAGFVPKNLDLAIVDEYIAISSEEAIETSKQLALQEGLLVGISSGAAAAAAIQVAKRPENAGKLIAVVFPSFGERYLSTQLFQSIREECEQMQPEL

SEQ ID NO: 35175 - DNA, 1232 bp, Arabidopsis thaliana
  misc_feature (1)..(1232): Ceres Seq. ID no. 13497527
  misc_feature: MA Experiment ID: 20000180 Result: Up-regulated in Transcription
  misc_feature: MA Experiment 20000180 PARAMETER Experiment Name: At_Germinating_Seeds_P Parameter: Age (hr) Value: 24 vs. 0
  misc_feature: MA Experiment 20000180 PARAMETER Experiment Name: At_Germinating_Seeds_P Parameter: Tissue Value: Germinating Seeds
  misc_feature: MA Experiment ID: 20000182 Result: Up-regulated in Transcription
  misc_feature: MA Experiment 20000182 PARAMETER Experiment Name: At_2mM_SA_P Parameter: Age (day) Value: 14
  misc_feature: MA Experiment 20000182 PARAMETER Experiment Name: At_2mM_SA_P Parameter: Organism Value: A. thaliana
  misc_feature: MA Experiment 20000182 PARAMETER Experiment Name: At_2mM_SA_P Parameter: Plant Line Value: WS
  misc_feature: MA Experiment 20000182 PARAMETER Experiment Name: At_2mM_SA_P Parameter: Timepoint (hr) Value: 6
  misc_feature: MA Experiment 20000182 PARAMETER Experiment Name: At_2mM_SA_P Parameter: Tissue Value: Aerial
  misc_feature: MA Experiment 20000182 PARAMETER Experiment Name: At_2mM_SA_P Parameter: Treatment Value: 2mM SA vs. No Treatment
  misc_feature: MA Experiment ID: 20000184 Result: Down-regulated in Transcription
  misc_feature: MA Experiment 20000184 PARAMETER Experiment Name: At_Shoots__P Parameter: Age (day) Value: 7
  misc_feature: MA Experiment 20000184 PARAMETER Experiment Name: At_Shoots__P Parameter: Tissue Value: Shoots vs. Whole Plant
  misc_feature: MA Experiment ID: 20000437 Result: Up-regulated in Transcription
  misc_feature: MA Experiment 20000437 PARAMETER Experiment Name: At_Drought_P Parameter: Age (day) Value: 8
  misc_feature: MA Experiment 20000437 PARAMETER Experiment Name: At_Drought_P Parameter: Organism Value: A. thaliana
  misc_feature: MA Experiment 20000437 PARAMETER Experiment Name: At_Drought_P Parameter: Plant Line Value: WS
  misc_feature: MA Experiment 20000437 PARAMETER Experiment Name: At_Drought_P Parameter: Timepoint (hr) Value: 24
  misc_feature: MA Experiment 20000437 PARAMETER Experiment Name: At_Drought_P Parameter: Tissue Value: Whole Plant
  misc_feature: MA Experiment 20000437 PARAMETER Experiment Name: At_Drought_P Parameter: Treatment Value: Drought vs. No Drought
  misc_feature: MA Experiment ID: 20001905 Result: Up-regulated in Transcription
  misc_feature: MA Experiment 20001905 PARAMETER Experiment Name: At_Drought_Reproduction_P Parameter: Age (day) Value: 40
  misc_feature: MA Experiment 20001905 PARAMETER Experiment Name: At_Drought_Reproduction_P Parameter: Organism Value: A. thaliana
  misc_feature: MA Experiment 20001905 PARAMETER Experiment Name: At_Drought_Reproduction_P Parameter: Plant Line Value: WS
  misc_feature: MA Experiment 20001905 PARAMETER Experiment Name: At_Drought_Reproduction_P Parameter: Timepoint (day) Value: 10
  misc_feature: MA Experiment 20001905 PARAMETER Experiment Name: At_Drought_Reproduction_P Parameter: Tissue Value: Rosettes
  misc_feature: MA Experiment 20001905 PARAMETER Experiment Name: At_Drought_Reproduction_P Parameter: Treatment Value: Drought vs. No Drought
aaatagaaatttgtggtgcttcattggatcgacgaaaggcgtcccgatattgaggttcgttacgccggcgaagattttcatcggaaacttatctgatcgtttacgccggcgaagatttccatcggaaacttaatctgatcggaaggaagaaggctcgatgaagagcagattgaagagctacaggaggaagaagctagggttagccacagttatcgtcttctgttctctctgtttcctcttcggtttctatggctccactctactttctcagaatgtgcctcgtgttaaacccaggttgagaatgttggatatggttgagaatggggaagaagaagctagctcgatgcctcatggtgttactggagaagaatctattggatcgattccttttcaggtacttagttggagacctagggctatatattttccgaattttgcaactgcagaacaatgccaagctattattgagagagcaaaggttaatctgaaaccttctgctttggctctccggaaaggagaaactgctgagaacactaagggcactagaacaagctcaggaacttttatcagtgcttcagaagagagtactggtgctctggattttgttgaaaggaaaatcgcaagagctacgatgatcccaaggtcccatggagagtcattcaatattttacggtatgaacttggccaaaagtatgattcccactatgatgttttcaacccaacagaatatggaccacaatcaagccaaaggattgcctccttcctgttgtacttatctgatgttgaagaaggcggtgaaaccatgttcccatttgagaacggttctaatatgggcatcggatacgattacaagcaatgtattgggttgaaagtaaagcctcggaaaggagatggtcttcttttttattccgtgtttccaaatggaacgattgatcagacttcgcttcacgggagctgcccggtgaccaaaggagagaaatgggtggcaaccaaatggatcagagaccaagaccaggaagaataagttaggtttttttccatatatctatctcagtctcacagcttctatcttttgactaaaaatctgctgctggatccctcgtgtacagttcttcgctgaaacagtgtaactatttagctttcttataatgcgaatgatacaaaaattaaaacctgataatgaaaacttggttcgaaatatcatttgaacaatagaagtttcttgttgtttg

SEQ ID NO: 35176 - protein, 288 aa, Arabidopsis thaliana; identical to SEQ ID NO: 26258
  peptide (1)..(288): Ceres Seq. ID no. 13497528
  misc_feature (164)..(283): Pfam Name: 2OG-Fe(II) oxygenase superfamily Pfam Description: 2OG-Fe(II) oxygenase superfamily
  misc_feature (68)..(281): Homolog of NCBI NO: 9294583 NR Description: prolyl 4-hydroxylase alpha subunit-like protein
  misc_feature (23)..(281): Homolog of NCBI NO: 18405808 NR Description: oxidoreductase, 2OG-Fe(II) oxygenase family
  misc_feature (23)..(281): Homolog of NCBI NO: 18086437 NR Description: AT3g28480/MFJ20_16 [Arabidopsis thaliana]
  misc_feature (79)..(281): Homolog of NCBI NO: 18394842 NR Description: oxidoreductase, 2OG-Fe(II) oxygenase family
  misc_feature (79)..(281): Homolog of NCBI NO: 21537370 NR Description: putative prolyl 4-hydroxylase, alpha subunit
  misc_feature (5)..(284): Homolog of NCBI NO: 30681957 NR Description: oxidoreductase -related [Arabidopsis thaliana]
  misc_feature (10)..(286): Homolog of NCBI NO: 14488368 NR Description: putative dioxygenase [Oryza sativa (japonica
  misc_feature (1)..(288): Homolog of NCBI NO: 40809925 NR Description: prolyl 4-hydroxylase [Nicotiana tabacum]
  misc_feature (52)..(262): Homolog of NCBI NO: 7485609 NR Description: hypothetical protein F17I5.100 - Arabidopsis
  misc_feature (1)..(288): Homolog of NCBI NO: 18418321 NR Description: oxidoreductase, 2OG-Fe(II) oxygenase family

SEQ ID NO: 35177 - protein, 240 aa, Arabidopsis thaliana; identical to SEQ ID NO: 26259
  peptide (1)..(240): Ceres Seq. ID no. 13497529
  misc_feature (116)..(235): Pfam Name: 2OG-Fe(II) oxygenase superfamily Pfam Description: 2OG-Fe(II) oxygenase superfamily
  misc_feature (20)..(233): Homolog of NCBI NO: 9294583 NR Description: prolyl 4-hydroxylase alpha subunit-like protein
  misc_feature (1)..(233): Homolog of NCBI NO: 18405808 NR Description: oxidoreductase, 2OG-Fe(II) oxygenase family
  misc_feature (1)..(233): Homolog of NCBI NO: 18086437 NR Description: AT3g28480/MFJ20_16 [Arabidopsis thaliana]
  misc_feature (31)..(233): Homolog of NCBI NO: 18394842 NR Description: oxidoreductase, 2OG-Fe(II) oxygenase family
  misc_feature (31)..(233): Homolog of NCBI NO: 21537370 NR Description: putative prolyl 4-hydroxylase, alpha subunit
  misc_feature (1)..(236): Homolog of NCBI NO: 30681957 NR Description: oxidoreductase -related [Arabidopsis thaliana]
  misc_feature (1)..(238): Homolog of NCBI NO: 14488368 NR Description: putative dioxygenase [Oryza sativa (japonica
  misc_feature (1)..(240): Homolog of NCBI NO: 40809925 NR Description: prolyl 4-hydroxylase [Nicotiana tabacum]
  misc_feature (4)..(214): Homolog of NCBI NO: 7485609 NR Description: hypothetical protein F17I5.100 - Arabidopsis
  misc_feature (1)..(240): Homolog of NCBI NO: 18418321 NR Description: oxidoreductase, 2OG-Fe(II) oxygenase family

SEQ ID NO: 35178 - protein, 237 aa, Arabidopsis thaliana; identical to SEQ ID NO: 26260
  peptide (1)..(237): Ceres Seq. ID no. 13497530
  misc_feature (113)..(232): Pfam Name: 2OG-Fe(II) oxygenase superfamily Pfam Description: 2OG-Fe(II) oxygenase superfamily
  misc_feature (17)..(230): Homolog of NCBI NO: 9294583 NR Description: prolyl 4-hydroxylase alpha subunit-like protein
  misc_feature (1)..(230): Homolog of NCBI NO: 18405808 NR Description: oxidoreductase, 2OG-Fe(II) oxygenase family
  misc_feature (1)..(230): Homolog of NCBI NO: 18086437 NR Description: AT3g28480/MFJ20_16 [Arabidopsis thaliana]
  misc_feature (28)..(230): Homolog of NCBI NO: 18394842 NR Description: oxidoreductase, 2OG-Fe(II) oxygenase family
  misc_feature (28)..(230): Homolog of NCBI NO: 21537370 NR Description: putative prolyl 4-hydroxylase, alpha subunit
  misc_feature (1)..(233): Homolog of NCBI NO: 30681957 NR Description: oxidoreductase -related [Arabidopsis thaliana]
  misc_feature (1)..(235): Homolog of NCBI NO: 14488368 NR Description: putative dioxygenase [Oryza sativa (japonica
  misc_feature (1)..(237): Homolog of NCBI NO: 40809925 NR Description: prolyl 4-hydroxylase [Nicotiana tabacum]
  misc_feature (1)..(211): Homolog of NCBI NO: 7485609 NR Description: hypothetical protein F17I5.100 - Arabidopsis
  misc_feature (1)..(237): Homolog of NCBI NO: 18418321 NR Description: oxidoreductase, 2OG-Fe(II) oxygenase family

SEQ ID NO: 35179 - DNA, 1625 bp, Arabidopsis thaliana
  misc_feature (1)..(1625): Ceres Seq. ID no. 12739023
  misc_feature: MA Experiment ID: 108434 Result: Down-regulated in Transcription
  misc_feature: MA Experiment 108434 PARAMETER Experiment Name: At_Root_Tips_cDNA_P Parameter: Tissue Value: Root Tips
  misc_feature: MA Experiment ID: 108462 Result: Down-regulated in Transcription
  misc_feature: MA Experiment 108462 PARAMETER Experiment Name: At_Germinating_Seeds_cDNA_P Parameter: Age (day) Value: 2 vs. 0
  misc_feature: MA Experiment 108462 PARAMETER Experiment Name: At_Germinating_Seeds_cDNA_P Parameter: Tissue Value: Germinating Seeds
  misc_feature: MA Experiment ID: 108463 Result: Down-regulated in Transcription
  misc_feature: MA Experiment 108463 PARAMETER Experiment Name: At_Germinating_Seeds_cDNA_P Parameter: Age (day) Value: 3 vs. 0
  misc_feature: MA Experiment 108463 PARAMETER Experiment Name: At_Germinating_Seeds_cDNA_P Parameter: Tissue Value: Germinating Seeds
  misc_feature: MA Experiment ID: 108464 Result: Down-regulated in Transcription
  misc_feature: MA Experiment 108464 PARAMETER Experiment Name: At_Germinating_Seeds_cDNA_P Parameter: Age (day) Value: 4 vs. 0
  misc_feature: MA Experiment 108464 PARAMETER Experiment Name: At_Germinating_Seeds_cDNA_P Parameter: Tissue Value: Germinating Seeds
  misc_feature: MA Experiment ID: 108573 Result: Up-regulated in Transcription
  misc_feature: MA Experiment 108573 PARAMETER Experiment Name: At_Drought_cDNA_P Parameter: Timepoint (hr) Value: 6
  misc_feature: MA Experiment 108573 PARAMETER Experiment Name: At_Drought_cDNA_P Parameter: Tissue Value: Aerial
  misc_feature: MA Experiment 108573 PARAMETER Experiment Name: At_Drought_cDNA_P Parameter: Treatment Value: Drought vs. No Drought
  misc_feature: MA Experiment ID: 108579 Result: Up-regulated in Transcription
  misc_feature: MA Experiment 108579 PARAMETER Experiment Name: At_4deg_Cold_cDNA_P Parameter: Temperature (deg C) Value: 4 vs. 22
  misc_feature: MA Experiment 108579 PARAMETER Experiment Name: At_4deg_Cold_cDNA_P Parameter: Timepoint (hr) Value: 6
  misc_feature: MA Experiment 108579 PARAMETER Experiment Name: At_4deg_Cold_cDNA_P Parameter: Tissue Value: Aerial
  misc_feature: MA Experiment ID: 108608 Result: Down-regulated in Transcription
  misc_feature: MA Experiment 108608 PARAMETER Experiment Name: At_100uM_ABA_cDNA_P Parameter: Timepoint (hr) Value: 1
  misc_feature: MA Experiment 108608 PARAMETER Experiment Name: At_100uM_ABA_cDNA_P Parameter: Tissue Value: Aerial
  misc_feature: MA Experiment 108608 PARAMETER Experiment Name: At_100uM_ABA_cDNA_P Parameter: Treatment Value: 100uM ABA vs. No Treatment
  misc_feature: MA Experiment ID: 20000112 Result: Up-regulated in Transcription
  misc_feature: MA Experiment 20000112 PARAMETER Experiment Name: At_42deg_Heat_cDNA_P Parameter: Temperature (deg C) Value: 42 vs. 22
  misc_feature: MA Experiment 20000112 PARAMETER Experiment Name: At_42deg_Heat_cDNA_P Parameter: Timepoint (hr) Value: 2
  misc_feature: MA Experiment 20000112 PARAMETER Experiment Name: At_42deg_Heat_cDNA_P Parameter: Tissue Value: Aerial
  misc_feature: MA Experiment ID: 20000144 Result: Up-regulated in Transcription
  misc_feature: MA Experiment 20000144 PARAMETER Experiment Name: At_42deg_Heat_cDNA_P Parameter: Temperature (deg C) Value: 42 vs. 22
  misc_feature: MA Experiment 20000144 PARAMETER Experiment Name: At_42deg_Heat_cDNA_P Parameter: Timepoint (hr) Value: 1
  misc_feature: MA Experiment 20000144 PARAMETER Experiment Name: At_42deg_Heat_cDNA_P Parameter: Tissue Value: Aerial
  misc_feature: MA Experiment ID: 20000166 Result: Down-regulated in Transcription
  misc_feature: MA Experiment 20000166 PARAMETER Experiment Name: At_100uM_ABA_P Parameter: Age (day) Value: 14
  misc_feature: MA Experiment 20000166 PARAMETER Experiment Name: At_100uM_ABA_P Parameter: Organism Value: A. thaliana
  misc_feature: MA Experiment 20000166 PARAMETER Experiment Name: At_100uM_ABA_P Parameter: Plant Line Value: WS
  misc_feature: MA Experiment 20000166 PARAMETER Experiment Name: At_100uM_ABA_P Parameter: Timepoint (hr) Value: 1
  misc_feature: MA Experiment 20000166 PARAMETER Experiment Name: At_100uM_ABA_P Parameter: Tissue Value: Aerial
  misc_feature: MA Experiment 20000166 PARAMETER Experiment Name: At_100uM_ABA_P Parameter: Treatment Value: 100uM ABA vs. No Treatment
  misc_feature: MA Experiment ID: 20000441 Result: Up-regulated in Transcription
  misc_feature: MA Experiment 20000441 PARAMETER Experiment Name: At_1uM_BR-BRZ__P Parameter: Tissue Value: Shoot Apices
  misc_feature: MA Experiment 20000441 PARAMETER Experiment Name: At_1uM_BR-BRZ__P Parameter: Treatment Value: 1uM BR vs. No Treatment
  misc_feature: MA Experiment ID: 20000573 Result: Up-regulated in Transcription
  misc_feature: MA Experiment 20000573 PARAMETER Experiment Name: At_100uM_ABA_Mutants__P Parameter: Organism Value: A. thaliana
  misc_feature: MA Experiment 20000573 PARAMETER Experiment Name: At_100uM_ABA_Mutants__P Parameter: Plant Line Value: CS22 vs. Ler wt
  misc_feature: MA Experiment 20000573 PARAMETER Experiment Name: At_100uM_ABA_Mutants__P Parameter: Timepoint (hr) Value: N/A
  misc_feature: MA Experiment 20000573 PARAMETER Experiment Name: At_100uM_ABA_Mutants__P Parameter: Tissue Value: Whole Plant
  misc_feature: MA Experiment 20000573 PARAMETER Experiment Name: At_100uM_ABA_Mutants__P Parameter: Treatment Value: None
  misc_feature: MA Experiment ID: 20001911 Result: Up-regulated in Transcription
  misc_feature: MA Experiment 20001911 PARAMETER Experiment Name: At_Drought_Reproduction_P Parameter: Age (day) Value: 40
  misc_feature: MA Experiment 20001911 PARAMETER Experiment Name: At_Drought_Reproduction_P Parameter: Organism Value: A. thaliana
  misc_feature: MA Experiment 20001911 PARAMETER Experiment Name: At_Drought_Reproduction_P Parameter: Plant Line Value: WS
  misc_feature: MA Experiment 20001911 PARAMETER Experiment Name: At_Drought_Reproduction_P Parameter: Timepoint (day) Value: 10
  misc_feature: MA Experiment 20001911 PARAMETER Experiment Name: At_Drought_Reproduction_P Parameter: Tissue Value: Flowers
  misc_feature: MA Experiment 20001911 PARAMETER Experiment Name: At_Drought_Reproduction_P Parameter: Treatment Value: Drought vs. No Drought
gagtaacatcgagacaaagaagaaaagctaaaaaagagaaccccaaagaatcgaatatttattatttcgccccgaagattctatttctgatcatttacacccctaaaaagagtagagctttcgtgaagccaccatgtgtggaggagctataatctccgatttcatacctccgccgaggtccctccgcgtcactaacgagtttatctggccggatctgaaaaacaaagtgaaagcttcaaagaagagatcgaataagcgatccgatttcttcgatcttgacgatgatttcgaagctgatttccaagggtttaaggatgactcggcttttgactgcgaagacgatgatgatgtcttcgtcaatgttaagcctttcgtcttcaccgcaactactaagcccgtagcttccgctttcgtctccactgtaggttcagcatatgccaagaaaactgtagagtccgctgagcaagctgagaaatcttctaagaggaagaggaagaatcagtaccgagggattaggcagcgtccttggggaaaatgggctgcggagatccgtgatccgagaaaaggctcccgagaatggcttggaacattcgacactgctgaggaagcagcaagagcttatgatgctgcagcacgcagaatccgtggcacgaaagctaaggtgaattttcccgaggagaagaaccctagcgtcgtatcccagaaacgtcctagtgctaagactaataatcttcagaaatcagtggctaaaccaaacaaaagcgtaactttggttcagcagccaacacatctgagtcagcagtactgcaacaactcctttgacaactcttttggtgatatgagtttcatggaagagaagcctcagatgtacaacaatcagtttgggttaacaaactcgttcgatgctggaggtaacaatggataccagtatttcagttccgatcagggcagtaactccttcgactgttctgagttcgggtggagtgatcacggccctaaaacacccgagatctcttcaatgcttgtcaataacaacgaagcatcatttgttgaagaaaccaatgcagccaagaagctcaaacctaactctgatgagtcagacgatctgatggcataccttgacaacgccttgtgggacaccccactagaagtgaaagccatgcttggcgcagatgctggtgctgtgactcaggaagaggaaaacccagtggagctatggagcttagatgagatcaatttcatgctggaaggagacttttgaagtgatcgatggttccttagtttgtaaataaagctgtgttggattttgctgttgggggatggtacaagtcacacctcaagctctatgcattggtatctcatgagcctctcttccatagagagtttctcttttaattttgtcgaaataaaaaaggtgtgatgaagtaaatagaggtataataatatctatctattaagtcttgttttgttctttcatttttgtatttcttttctatttaaaagacagtttattagtcttctgagctctctttttgatctttgttatagcgtatcatcaccctcgaaagtgtaatgttttgtacccccaaacttgtttagcattataataaagtctctttggaacc

SEQ ID NO: 35180 - protein, 375 aa, Arabidopsis thaliana
  peptide (1)..(375): Ceres Seq. ID no. 12739024
  misc_feature (121)..(185): Pfam Name: AP2 domain Pfam Description: AP2 domain
  misc_feature (1)..(373): Homolog of NCBI NO: 18496063 NR Description: ethylene responsive element binding protein
  misc_feature (1)..(319): Homolog of NCBI NO: 38343926 NR Description: ethylene transcription factor [Fagus sylvatica]
  misc_feature (42)..(339): Homolog of NCBI NO: 2281649 NR Description: AP2 domain containing protein RAP2.12
  misc_feature (1)..(339): Homolog of NCBI NO: 15220971 NR Description: AP2 domain protein RAP2.12
  misc_feature (1)..(339): Homolog of NCBI NO: 21593779 NR Description: AP2 domain containing protein, putative
  misc_feature (130)..(375): Homolog of NCBI NO: 2281629 NR Description: AP2 domain containing protein RAP2.2 [Arabidopsis
  misc_feature (1)..(375): Homolog of NCBI NO: 18400321 NR Description: AP2 domain protein RAP2.2
  misc_feature (1)..(375): Homolog of NCBI NO: 30683064 NR Description: AP2 domain protein RAP2.2 [Arabidopsis thaliana]
  misc_feature (1)..(375): Homolog of NCBI NO: 21553709 NR Description: DNA-binding protein [Arabidopsis thaliana]
  misc_feature (1)..(375): Homolog of NCBI NO: 30683059 NR Description: AP2 domain protein RAP2.2 [Arabidopsis thaliana]
MCGGAIISDFIPPPRSLRVTNEFIWPDLKNKVKASKKRSNKRSDFFDLDDDFEADFQGFKDDSAFDCEDDDDVFVNVKPFVFTATTKPVASAFVSTVGSAYAKKTVESAEQAEKSSKRKRKNQYRGIRQRPWGKWAAEIRDPRKGSREWLGTFDTAEEAARAYDAAARRIRGTKAKVNFPEEKNPSVVSQKRPSAKTNNLQKSVAKPNKSVTLVQQPTHLSQQYCNNSFDNSFGDMSFMEEKPQMYNNQFGLTNSFDAGGNNGYQYFSSDQGSNSFDCSEFGWSDHGPKTPEISSMLVNNNEASFVEETNAAKKLKPNSDESDDLMAYLDNALWDTPLEVKAMLGADAGAVTQEEENPVELWSLDEINFMLEGDF

SEQ ID NO: 35181 - DNA, 1246 bp, Arabidopsis thaliana; identical to SEQ ID NO: 26472
  misc_feature (1)..(1246): Ceres Seq. ID no. 13591822
  misc_feature: MA Experiment ID: 108433 Result: Down-regulated in Transcription
  misc_feature: MA Experiment 108433 PARAMETER Experiment Name: At_rhl_Mutant2_cDNA_P Parameter: Age (day) Value: 7
  misc_feature: MA Experiment 108433 PARAMETER Experiment Name: At_rhl_Mutant2_cDNA_P Parameter: Organism Value: A. thaliana
  misc_feature: MA Experiment 108433 PARAMETER Experiment Name: At_rhl_Mutant2_cDNA_P Parameter: Plant Line Value: rhl Mutant vs. wt landsburg
  misc_feature: MA Experiment 108433 PARAMETER Experiment Name: At_rhl_Mutant2_cDNA_P Parameter: Tissue Value: Roots
  misc_feature: MA Experiment ID: 108434 Result: Down-regulated in Transcription
  misc_feature: MA Experiment 108434 PARAMETER Experiment Name: At_Root_Tips_cDNA_P Parameter: Tissue Value: Root Tips
  misc_feature: MA Experiment ID: 108461 Result: Up-regulated in Transcription
  misc_feature: MA Experiment 108461 PARAMETER Experiment Name: At_Germinating_Seeds_cDNA_P Parameter: Age (day) Value: 1 vs. 0
  misc_feature: MA Experiment 108461 PARAMETER Experiment Name: At_Germinating_Seeds_cDNA_P Parameter: Tissue Value: Germinating Seeds
  misc_feature: MA Experiment ID: 108462 Result: Up-regulated in Transcription
  misc_feature: MA Experiment 108462 PARAMETER Experiment Name: At_Germinating_Seeds_cDNA_P Parameter: Age (day) Value: 2 vs. 0
  misc_feature: MA Experiment 108462 PARAMETER Experiment Name: At_Germinating_Seeds_cDNA_P Parameter: Tissue Value: Germinating Seeds
  misc_feature: MA Experiment ID: 108464 Result: Up-regulated in Transcription
  misc_feature: MA Experiment 108464 PARAMETER Experiment Name: At_Germinating_Seeds_cDNA_P Parameter: Age (day) Value: 4 vs. 0
  misc_feature: MA Experiment 108464 PARAMETER Experiment Name: At_Germinating_Seeds_cDNA_P Parameter: Tissue Value: Germinating Seeds
  misc_feature: MA Experiment ID: 108488 Result: Up-regulated in Transcription
  misc_feature: MA Experiment ID: 108594 Result: Down-regulated in Transcription
  misc_feature: MA Experiment 108594 PARAMETER Experiment Name: At_Ler-rhl_Root_cDNA_P Parameter: Plant Line Value: null

SEQ ID NO: 35182 - protein, 169 aa, Arabidopsis thaliana; identical to SEQ ID NO: 26473
  peptide (1)..(169): Ceres Seq. ID no. 13591823
  misc_feature (57)..(169): Pfam Name: Thi4 family Pfam Description: Thi4 family
  misc_feature (57)..(169): Pfam Name: Thi4 family Pfam Description: Thi4 family
  misc_feature (57)..(169): Pfam Name: Thi4 family Pfam Description: Thi4 family
  misc_feature (1)..(169): Homolog of NCBI NO: 30013665 NR Description: putative chloroplast thiazole biosynthetic
  misc_feature (1)..(169): Homolog of NCBI NO: 6094476 NR Description: Thiazole biosynthetic enzyme, chloroplast
  misc_feature (1)..(169): Homolog of NCBI NO: 6094476 NR Description: Thiazole biosynthetic enzyme, chloroplast
  misc_feature (1)..(169): Homolog of NCBI NO: 6094476 NR Description: Thiazole biosynthetic enzyme, chloroplast
  misc_feature (1)..(169): Homolog of NCBI NO: 15239735 NR Description: thiazole biosynthetic enzyme precursor (ARA6) (sp
  misc_feature (1)..(169): Homolog of NCBI NO: 30013665 NR Description: putative chloroplast thiazole biosynthetic
  misc_feature (1)..(169): Homolog of NCBI NO: 15239735 NR Description: thiazole biosynthetic enzyme precursor (ARA6) (sp
  misc_feature (1)..(169): Homolog of NCBI NO: 30013665 NR Description: putative chloroplast thiazole biosynthetic
  misc_feature (1)..(169): Homolog of NCBI NO: 15239735 NR Description: thiazole biosynthetic enzyme precursor (ARA6) (sp

SEQ ID NO: 35183 - protein, 100 aa, Arabidopsis thaliana; identical to SEQ ID NO: 26474
  peptide (1)..(100): Ceres Seq. ID no. 13591824
  misc_feature (1)..(100): Pfam Name: Thi4 family Pfam Description: Thi4 family
  misc_feature (1)..(100): Pfam Name: Thi4 family Pfam Description: Thi4 family
  misc_feature (1)..(100): Pfam Name: Thi4 family Pfam Description: Thi4 family
  misc_feature (1)..(100): Homolog of NCBI NO: 30013665 NR Description: putative chloroplast thiazole biosynthetic
  misc_feature (1)..(100): Homolog of NCBI NO: 6094476 NR Description: Thiazole biosynthetic enzyme, chloroplast
  misc_feature (1)..(100): Homolog of NCBI NO: 6094476 NR Description: Thiazole biosynthetic enzyme, chloroplast
  misc_feature (1)..(100): Homolog of NCBI NO: 6094476 NR Description: Thiazole biosynthetic enzyme, chloroplast
  misc_feature (1)..(100): Homolog of NCBI NO: 15239735 NR Description: thiazole biosynthetic enzyme precursor (ARA6) (sp
  misc_feature (1)..(100): Homolog of NCBI NO: 30013665 NR Description: putative chloroplast thiazole biosynthetic
  misc_feature (1)..(100): Homolog of NCBI NO: 15239735 NR Description: thiazole biosynthetic enzyme precursor (ARA6) (sp
  misc_feature (1)..(100): Homolog of NCBI NO: 30013665 NR Description: putative chloroplast thiazole biosynthetic
  misc_feature (1)..(100): Homolog of NCBI NO: 15239735 NR Description: thiazole biosynthetic enzyme precursor (ARA6) (sp

SEQ ID NO: 35184 - protein, 95 aa, Arabidopsis thaliana; identical to SEQ ID NO: 26475
  peptide (1)..(95): Ceres Seq. ID no. 13591825
  misc_feature (1)..(95): Pfam Name: Thi4 family Pfam Description: Thi4 family
  misc_feature (1)..(95): Pfam Name: Thi4 family Pfam Description: Thi4 family
  misc_feature (1)..(95): Pfam Name: Thi4 family Pfam Description: Thi4 family
  misc_feature (1)..(95): Homolog of NCBI NO: 30013665 NR Description: putative chloroplast thiazole biosynthetic
  misc_feature (1)..(95): Homolog of NCBI NO: 6094476 NR Description: Thiazole biosynthetic enzyme, chloroplast
  misc_feature (1)..(95): Homolog of NCBI NO: 6094476 NR Description: Thiazole biosynthetic enzyme, chloroplast
  misc_feature (1)..(95): Homolog of NCBI NO: 6094476 NR Description: Thiazole biosynthetic enzyme, chloroplast
  misc_feature (1)..(95): Homolog of NCBI NO: 15239735 NR Description: thiazole biosynthetic enzyme precursor (ARA6) (sp
  misc_feature (1)..(95): Homolog of NCBI NO: 30013665 NR Description: putative chloroplast thiazole biosynthetic
  misc_feature (1)..(95): Homolog of NCBI NO: 15239735 NR Description: thiazole biosynthetic enzyme precursor (ARA6) (sp
  misc_feature (1)..(95): Homolog of NCBI NO: 30013665 NR Description: putative chloroplast thiazole biosynthetic
  misc_feature (1)..(95): Homolog of NCBI NO: 15239735 NR Description: thiazole biosynthetic enzyme precursor (ARA6) (sp

SEQ ID NO: 35185 - DNA, 1344 bp, Arabidopsis thaliana
  misc_feature (1)..(1344): Ceres Seq. ID no. 12333671
  misc_feature: MA Experiment ID: 108434 Result: Down-regulated in Transcription
  misc_feature: MA Experiment 108434 PARAMETER Experiment Name: At_Root_Tips_cDNA_P Parameter: Tissue Value: Root Tips
  misc_feature: MA Experiment ID: 108585 Result: Up-regulated in Transcription
  misc_feature: MA Experiment 108585 PARAMETER Experiment Name: At_5mM_NaNP_cDNA_P Parameter: Timepoint (hr) Value: 6
  misc_feature: MA Experiment 108585 PARAMETER Experiment Name: At_5mM_NaNP_cDNA_P Parameter: Tissue Value: Aerial
  misc_feature: MA Experiment 108585 PARAMETER Experiment Name: At_5mM_NaNP_cDNA_P Parameter: Treatment Value: null
  misc_feature: MA Experiment ID: 108595 Result: Down-regulated in Transcription
  misc_feature: MA Experiment 108595 PARAMETER Experiment Name: At_Ler-pi_Ovule_cDNA_P Parameter: Plant Line Value: null
  misc_feature: MA Experiment ID: 108668 Result: Up-regulated in Transcription
  misc_feature: MA Experiment 108668 PARAMETER Experiment Name: At_2mM_SA_cDNA_P Parameter: Plant Line Value: WS
  misc_feature: MA Experiment 108668 PARAMETER Experiment Name: At_2mM_SA_cDNA_P Parameter: Timepoint (hr) Value: 6
  misc_feature: MA Experiment 108668 PARAMETER Experiment Name: At_2mM_SA_cDNA_P Parameter: Treatment Value: 2mM SA vs. No Treatment
  misc_feature: MA Experiment ID: 20000113 Result: Down-regulated in Transcription
  misc_feature: MA Experiment 20000113 PARAMETER Experiment Name: At_42deg_Heat_cDNA_P Parameter: Temperature (deg C) Value: 42 vs. 22
  misc_feature: MA Experiment 20000113 PARAMETER Experiment Name: At_42deg_Heat_cDNA_P Parameter: Timepoint (hr) Value: 8
  misc_feature: MA Experiment 20000113 PARAMETER Experiment Name: At_42deg_Heat_cDNA_P Parameter: Tissue Value: Aerial
  misc_feature: MA Experiment ID: 20000180 Result: Down-regulated in Transcription
  misc_feature: MA Experiment 20000180 PARAMETER Experiment Name: At_Germinating_Seeds_P Parameter: Age (hr) Value: 24 vs. 0
  misc_feature: MA Experiment 20000180 PARAMETER Experiment Name: At_Germinating_Seeds_P Parameter: Tissue Value: Germinating Seeds
  misc_feature: MA Experiment ID: 20000184 Result: Down-regulated in Transcription
  misc_feature: MA Experiment 20000184 PARAMETER Experiment Name: At_Shoots__P Parameter: Age (day) Value: 7
  misc_feature: MA Experiment 20000184 PARAMETER Experiment Name: At_Shoots__P Parameter: Tissue Value: Shoots vs. Whole Plant
  misc_feature: MA Experiment ID: 20000224 Result: Down-regulated in Transcription
  misc_feature: MA Experiment ID: 20000234 Result: Down-regulated in Transcription
  misc_feature: MA Experiment 20000234 PARAMETER Experiment Name: At_Siliques_P Parameter: Age (day) Value: 21
  misc_feature: MA Experiment 20000234 PARAMETER Experiment Name: At_Siliques_P Parameter: Organism Value: A. thaliana
  misc_feature: MA Experiment 20000234 PARAMETER Experiment Name: At_Siliques_P Parameter: Plant Line Value: WS
  misc_feature: MA Experiment 20000234 PARAMETER Experiment Name: At_Siliques_P Parameter: Tissue Value: Less Than 5mm Siliques vs. Whole Plant
  misc_feature: MA Experiment ID: 20000235 Result: Down-regulated in Transcription
  misc_feature: MA Experiment 20000235 PARAMETER Experiment Name: At_Siliques_P Parameter: Age (day) Value: 21
  misc_feature: MA Experiment 20000235 PARAMETER Experiment Name: At_Siliques_P Parameter: Organism Value: A. thaliana
  misc_feature: MA Experiment 20000235 PARAMETER Experiment Name: At_Siliques_P Parameter: Plant Line Value: WS
  misc_feature: MA Experiment 20000235 PARAMETER Experiment Name: At_Siliques_P Parameter: Tissue Value: 5-10mm Siliques vs. Whole Plant
  misc_feature: MA Experiment ID: 20000441 Result: Up-regulated in Transcription
  misc_feature: MA Experiment 20000441 PARAMETER Experiment Name: At_1uM_BR-BRZ__P Parameter: Tissue Value: Shoot Apices
  misc_feature: MA Experiment 20000441 PARAMETER Experiment Name: At_1uM_BR-BRZ__P Parameter: Treatment Value: 1uM BR vs. No Treatment
aaaacctttgacttcaaatttgttcttcctcttattagtcttcgtcatattttcttccttcttccatcttttagttctgataagttaacattttcataagacctcaaaaatagctcctacatttgttatcttccttttgaagtaaacaatctttttttttgttctgttatcaaagactccttcttttggtgattaaactctgttcaacttctgaaaaaaagttttgatttttcttttgtctgtagtacacaaagatctcaaagtggaggaacctcggtgttttaacatctttacgaagatgaaatgcttcttattccctcttggggacaagaaagatgaaccgagaagccctaaaccggtttcaccaacgtctaacttcagtgacgtaaacaaaagcggttcagatttcagtccccgggatgtctctggaacgagcacagtatcatccactggaaggaactcgaacacaagcatgtcagctagagaaaacaacctcagagagttcaccattggtgatcttaaatctgccacaaggaacttcagcaggtctggtatgatcggggaaggcggttttggttgtgtcttctggggaacaatcaagaacttagaagacccgtcaaagaaaatcgaagtcgcggttaaacagctcggcaaaagagggttgcagggtcataaagaatgggtgactgaagtggactttctcggtgtagtcgagcattcaaacttggtgaagttgctgggacattgtgcagaagacgatgaacgtggaatccaaaggcttttggtttatgaatatatgccaaaccaaagtgtcgagttccatttatctccgcggtcaccgacagtacttacttgggacctcaggttgagaatagcacaagacgcagctcgaggtttaacataccttcatgaagaaatggactttcagataatctttcgtgatttcaagtcatccaacattctactagacgagaattggacagcgaagctttcggatttcggtttggctcgcttaggtccttcaccaggatcaagccatgtttctactgatgtagttggaacaatgggttacgcagctccagagtatatccaaaccggtcgtctcacgtcgaaaagcgatgtgtggggatacggagttttcatctatgagctcattacaggaaggaggccactagaccggaacaagcctaaaggagagcagaagcttttagaatgggtgagaccttacttatccgacacaagaaggttccggctcatagtagacccgaggctcgaggggaagtacatgatcaagtcagtgcagaaactcgcggttgtagccaacctttgccttactagaaacgc

SEQ ID NO: 35186 - protein, 348 aa, Arabidopsis thaliana
  peptide (1)..(348): Ceres Seq. ID no. 12333672
  misc_feature (24)..(347): Homolog of NCBI NO: 15242204 NR Description: serine/threonine specific protein kinase -like
  misc_feature (122)..(347): Homolog of NCBI NO: 30684071 NR Description: protein kinase family [Arabidopsis thaliana]
  misc_feature (63)..(347): Homolog of NCBI NO: 7488278 NR Description: probable protein kinase [imported] - Arabidopsis
  misc_feature (17)..(347): Homolog of NCBI NO: 37534774 NR Description: putative serine/threonine kinase
  misc_feature (1)..(347): Homolog of NCBI NO: 7248457 NR Description: protein serine/threonine kinase [Lophopyrum
  misc_feature (1)..(345): Homolog of NCBI NO: 25287613 NR Description: probable protein kinase [imported] - Arabidopsis
  misc_feature (1)..(345): Homolog of NCBI NO: 28416693 NR Description: At2g39110 [Arabidopsis thaliana]
  misc_feature (1)..(345): Homolog of NCBI NO: 30687780 NR Description: protein kinase, putative [Arabidopsis thaliana]
  misc_feature (1)..(347): Homolog of NCBI NO: 15232764 NR Description: putative protein kinase
  misc_feature (1)..(347): Homolog of NCBI NO: 15242720 NR Description: putative protein; protein id: At5g03320.1
MKCFLFPLGDKKDEPRSPKPVSPTSNFSDVNKSGSDFSPRDVSGTSTVSSTGRNSNTSMSARENNLREFTIGDLKSATRNFSRSGMIGEGGFGCVFWGTIKNLEDPSKKIEVAVKQLGKRGLQGHKEWVTEVDFLGVVEHSNLVKLLGHCAEDDERGIQRLLVYEYMPNQSVEFHLSPRSPTVLTWDLRLRIAQDAARGLTYLHEEMDFQIIFRDFKSSNILLDENWTAKLSDFGLARLGPSPGSSHVSTDVVGTMGYAAPEYIQTGRLTSKSDVWGYGVFIYELITGRRPLDRNKPKGEQKLLEWVRPYLSDTRRFRLIVDPRLEGKYMIKSVQKLAVVANLCLTRN

SEQ ID NO: 35187 - protein, 290 aa, Arabidopsis thaliana
  peptide (1)..(290): Ceres Seq. ID no. 12333673
  misc_feature (1)..(289): Homolog of NCBI NO: 15242204 NR Description: serine/threonine specific protein kinase -like
  misc_feature (64)..(289): Homolog of NCBI NO: 30684071 NR Description: protein kinase family [Arabidopsis thaliana]
  misc_feature (5)..(289): Homolog of NCBI NO: 7488278 NR Description: probable protein kinase [imported] - Arabidopsis
  misc_feature (1)..(289): Homolog of NCBI NO: 37534774 NR Description: putative serine/threonine kinase
  misc_feature (1)..(289): Homolog of NCBI NO: 7248457 NR Description: protein serine/threonine kinase [Lophopyrum
  misc_feature (1)..(287): Homolog of NCBI NO: 25287613 NR Description: probable protein kinase [imported] - Arabidopsis
  misc_feature (1)..(287): Homolog of NCBI NO: 28416693 NR Description: At2g39110 [Arabidopsis thaliana]
  misc_feature (1)..(287): Homolog of NCBI NO: 30687780 NR Description: protein kinase, putative [Arabidopsis thaliana]
  misc_feature (1)..(289): Homolog of NCBI NO: 15232764 NR Description: putative protein kinase
  misc_feature (1)..(289): Homolog of NCBI NO: 15242720 NR Description: putative protein; protein id: At5g03320.1
MSARENNLREFTIGDLKSATRNFSRSGMIGEGGFGCVFWGTIKNLEDPSKKIEVAVKQLGKRGLQGHKEWVTEVDFLGVVEHSNLVKLLGHCAEDDERGIQRLLVYEYMPNQSVEFHLSPRSPTVLTWDLRLRIAQDAARGLTYLHEEMDFQIIFRDFKSSNILLDENWTAKLSDFGLARLGPSPGSSHVSTDVVGTMGYAAPEYIQTGRLTSKSDVWGYGVFIYELITGRRPLDRNKPKGEQKLLEWVRPYLSDTRRFRLIVDPRLEGKYMIKSVQKLAVVANLCLTRN

SEQ ID NO: 35188 - protein, 263 aa, Arabidopsis thaliana
  peptide (1)..(263): Ceres Seq. ID no. 12333674
  misc_feature (1)..(262): Homolog of NCBI NO: 15242204 NR Description: serine/threonine specific protein kinase -like
  misc_feature (37)..(262): Homolog of NCBI NO: 30684071 NR Description: protein kinase family [Arabidopsis thaliana]
  misc_feature (1)..(262): Homolog of NCBI NO: 7488278 NR Description: probable protein kinase [imported] - Arabidopsis
  misc_feature (1)..(262): Homolog of NCBI NO: 37534774 NR Description: putative serine/threonine kinase
  misc_feature (1)..(262): Homolog of NCBI NO: 7248457 NR Description: protein serine/threonine kinase [Lophopyrum
  misc_feature (1)..(260): Homolog of NCBI NO: 25287613 NR Description: probable protein kinase [imported] - Arabidopsis
  misc_feature (1)..(260): Homolog of NCBI NO: 28416693 NR Description: At2g39110 [Arabidopsis thaliana]
  misc_feature (1)..(260): Homolog of NCBI NO: 30687780 NR Description: protein kinase, putative [Arabidopsis thaliana]
  misc_feature (1)..(262): Homolog of NCBI NO: 15232764 NR Description: putative protein kinase
  misc_feature (1)..(262): Homolog of NCBI NO: 15242720 NR Description: putative protein; protein id: At5g03320.1
MIGEGGFGCVFWGTIKNLEDPSKKIEVAVKQLGKRGLQGHKEWVTEVDFLGVVEHSNLVKLLGHCAEDDERGIQRLLVYEYMPNQSVEFHLSPRSPTVLTWDLRLRIAQDAARGLTYLHEEMDFQIIFRDFKSSNILLDENWTAKLSDFGLARLGPSPGSSHVSTDVVGTMGYAAPEYIQTGRLTSKSDVWGYGVFIYELITGRRPLDRNKPKGEQKLLEWVRPYLSDTRRFRLIVDPRLEGKYMIKSVQKLAVVANLCLTRN

SEQ ID NO: 35189 - DNA, 1643 bp, Arabidopsis thaliana
  misc_feature (1)..(1643): Ceres Seq. ID no. 12335609
  misc_feature: MA Experiment ID: 108433 Result: Down-regulated in Transcription
  misc_feature: MA Experiment 108433 PARAMETER Experiment Name: At_rhl_Mutant2_cDNA_P Parameter: Age (day) Value: 7
  misc_feature: MA Experiment 108433 PARAMETER Experiment Name: At_rhl_Mutant2_cDNA_P Parameter: Organism Value: A. thaliana
  misc_feature: MA Experiment 108433 PARAMETER Experiment Name: At_rhl_Mutant2_cDNA_P Parameter: Plant Line Value: rhl Mutant vs. wt landsburg
  misc_feature: MA Experiment 108433 PARAMETER Experiment Name: At_rhl_Mutant2_cDNA_P Parameter: Tissue Value: Roots
  misc_feature: MA Experiment ID: 108569 Result: Up-regulated in Transcription
  misc_feature: MA Experiment 108569 PARAMETER Experiment Name: At_0.001%_MeJA__cDNA_P Parameter: Timepoint (hr) Value: 6
  misc_feature: MA Experiment 108569 PARAMETER Experiment Name: At_0.001%_MeJA__cDNA_P Parameter: Tissue Value: Aerial
  misc_feature: MA Experiment 108569 PARAMETER Experiment Name: At_0.001%_MeJA__cDNA_P Parameter: Treatment Value: 0.001% MeJA vs. No Treatment
  misc_feature: MA Experiment ID: 108576 Result: Down-regulated in Transcription
  misc_feature: MA Experiment 108576 PARAMETER Experiment Name: At_42deg_Heat_cDNA_P Parameter: Temperature (deg C) Value: 42 vs. 22
  misc_feature: MA Experiment 108576 PARAMETER Experiment Name: At_42deg_Heat_cDNA_P Parameter: Timepoint (hr) Value: 1
  misc_feature: MA Experiment 108576 PARAMETER Experiment Name: At_42deg_Heat_cDNA_P Parameter: Tissue Value: Aerial
  misc_feature: MA Experiment ID: 108577 Result: Down-regulated in Transcription
  misc_feature: MA Experiment 108577 PARAMETER Experiment Name: At_42deg_Heat_cDNA_P Parameter: Temperature (deg C) Value: 42 vs. 22
  misc_feature: MA Experiment 108577 PARAMETER Experiment Name: At_42deg_Heat_cDNA_P Parameter: Timepoint (hr) Value: 6
  misc_feature: MA Experiment 108577 PARAMETER Experiment Name: At_42deg_Heat_cDNA_P Parameter: Tissue Value: Aerial
  misc_feature: MA Experiment ID: 108585 Result: Down-regulated in Transcription
  misc_feature: MA Experiment 108585 PARAMETER Experiment Name: At_5mM_NaNP_cDNA_P Parameter: Timepoint (hr) Value: 6
  misc_feature: MA Experiment 108585 PARAMETER Experiment Name: At_5mM_NaNP_cDNA_P Parameter: Tissue Value: Aerial
  misc_feature: MA Experiment 108585 PARAMETER Experiment Name: At_5mM_NaNP_cDNA_P Parameter: Treatment Value: null
  misc_feature: MA Experiment ID: 108595 Result: Down-regulated in Transcription
  misc_feature: MA Experiment 108595 PARAMETER Experiment Name: At_Ler-pi_Ovule_cDNA_P Parameter: Plant Line Value: null
  misc_feature: MA Experiment ID: 20000087 Result: Down-regulated in Transcription
  misc_feature: MA Experiment 20000087 PARAMETER Experiment Name: At_100uM_ABA_Mutants_cDNA_P Parameter: Plant Line Value: WS
  misc_feature: MA Experiment 20000087 PARAMETER Experiment Name: At_100uM_ABA_Mutants_cDNA_P Parameter: Timepoint (hr) Value: 6
  misc_feature: MA Experiment 20000087 PARAMETER Experiment Name: At_100uM_ABA_Mutants_cDNA_P Parameter: Tissue Value: Aerial
  misc_feature: MA Experiment 20000087 PARAMETER Experiment Name: At_100uM_ABA_Mutants_cDNA_P Parameter: Treatment Value: 100uM ABA vs. No Treatment
  misc_feature: MA Experiment ID: 20000171 Result: Down-regulated in Transcription
  misc_feature: MA Experiment 20000171 PARAMETER Experiment Name: At_42deg_Heat_P Parameter: Age (day) Value: 14
  misc_feature: MA Experiment 20000171 PARAMETER Experiment Name: At_42deg_Heat_P Parameter: Organism Value: A. thaliana
  misc_feature: MA Experiment 20000171 PARAMETER Experiment Name: At_42deg_Heat_P Parameter: Plant Line Value: WS
  misc_feature: MA Experiment 20000171 PARAMETER Experiment Name: At_42deg_Heat_P Parameter: Temperature (deg C) Value: 42 vs. 22
  misc_feature: MA Experiment 20000171 PARAMETER Experiment Name: At_42deg_Heat_P Parameter: Timepoint (hr) Value: 1
  misc_feature: MA Experiment 20000171 PARAMETER Experiment Name: At_42deg_Heat_P Parameter: Tissue Value: Aerial
  misc_feature: MA Experiment ID: 20000173 Result: Down-regulated in Transcription
  misc_feature: MA Experiment 20000173 PARAMETER Experiment Name: At_42deg_Heat_P Parameter: Age (day) Value: 14
  misc_feature: MA Experiment 20000173 PARAMETER Experiment Name: At_42deg_Heat_P Parameter: Organism Value: A. thaliana
  misc_feature: MA Experiment 20000173 PARAMETER Experiment Name: At_42deg_Heat_P Parameter: Plant Line Value: WS
  misc_feature: MA Experiment 20000173 PARAMETER Experiment Name: At_42deg_Heat_P Parameter: Temperature (deg C) Value: 42 vs. 22
  misc_feature: MA Experiment 20000173 PARAMETER Experiment Name: At_42deg_Heat_P Parameter: Timepoint (hr) Value: 6
  misc_feature: MA Experiment 20000173 PARAMETER Experiment Name: At_42deg_Heat_P Parameter: Tissue Value: Aerial
  misc_feature: MA Experiment ID: 20000179 Result: Up-regulated in Transcription
  misc_feature: MA Experiment 20000179 PARAMETER Experiment Name: At_Germinating_Seeds_P Parameter: Age (hr) Value: 6 vs. 0
  misc_feature: MA Experiment 20000179 PARAMETER Experiment Name: At_Germinating_Seeds_P Parameter: Tissue Value: Germinating Seeds
  misc_feature: MA Experiment ID: 20000180 Result: Up-regulated in Transcription
  misc_feature: MA Experiment 20000180 PARAMETER Experiment Name: At_Germinating_Seeds_P Parameter: Age (hr) Value: 24 vs. 0
  misc_feature: MA Experiment 20000180 PARAMETER Experiment Name: At_Germinating_Seeds_P Parameter: Tissue Value: Germinating Seeds
  misc_feature: MA Experiment ID: 20000227 Result: Up-regulated in Transcription
  misc_feature: MA Experiment 20000227 PARAMETER Experiment Name: At_Root-Tips-vs-Tops_P Parameter: Tissue Value: Root Tips vs. Root Tops
  misc_feature: MA Experiment ID: 20000235 Result: Up-regulated in Transcription
  misc_feature: MA Experiment 20000235 PARAMETER Experiment Name: At_Siliques_P Parameter: Age (day) Value: 21
  misc_feature: MA Experiment 20000235 PARAMETER Experiment Name: At_Siliques_P Parameter: Organism Value: A. thaliana
  misc_feature: MA Experiment 20000235 PARAMETER Experiment Name: At_Siliques_P Parameter: Plant Line Value: WS
  misc_feature: MA Experiment 20000235 PARAMETER Experiment Name: At_Siliques_P Parameter: Tissue Value: 5-10mm Siliques vs. Whole Plant
  misc_feature: MA Experiment ID: 20000437 Result: Down-regulated in Transcription
  misc_feature: MA Experiment 20000437 PARAMETER Experiment Name: At_Drought_P Parameter: Age (day) Value: 8
  misc_feature: MA Experiment 20000437 PARAMETER Experiment Name: At_Drought_P Parameter: Organism Value: A. thaliana
  misc_feature: MA Experiment 20000437 PARAMETER Experiment Name: At_Drought_P Parameter: Plant Line Value: WS
  misc_feature: MA Experiment 20000437 PARAMETER Experiment Name: At_Drought_P Parameter: Timepoint (hr) Value: 24
  misc_feature: MA Experiment 20000437 PARAMETER Experiment Name: At_Drought_P Parameter: Tissue Value: Whole Plant
  misc_feature: MA Experiment 20000437 PARAMETER Experiment Name: At_Drought_P Parameter: Treatment Value: Drought vs. No Drought
  misc_feature: MA Experiment ID: 20001247 Result: Up-regulated in Transcription
  misc_feature: MA Experiment 20001247 PARAMETER Experiment Name: At_Far-red-induction_P Parameter: Age (day) Value: 7
  misc_feature: MA Experiment 20001247 PARAMETER Experiment Name: At_Far-red-induction_P Parameter: Light Value: Far-red vs. White
  misc_feature: MA Experiment 20001247 PARAMETER Experiment Name: At_Far-red-induction_P Parameter: Organism Value: A. thaliana
  misc_feature: MA Experiment 20001247 PARAMETER Experiment Name: At_Far-red-induction_P Parameter: Plant Line Value: Columbia
  misc_feature: MA Experiment 20001247 PARAMETER Experiment Name: At_Far-red-induction_P Parameter: Timepoint (hr) Value: 1
  misc_feature: MA Experiment 20001247 PARAMETER Experiment Name: At_Far-red-induction_P Parameter: Tissue Value: Whole Plant
  misc_feature: MA Experiment ID: 20001554 Result: Down-regulated in Transcription
  misc_feature: MA Experiment 20001554 PARAMETER Experiment Name: At_Drought_Soil_Dry_P Parameter: Age (day) Value: 21
  misc_feature: MA Experiment 20001554 PARAMETER Experiment Name: At_Drought_Soil_Dry_P Parameter: Organism Value: A. thaliana
  misc_feature: MA Experiment 20001554 PARAMETER Experiment Name: At_Drought_Soil_Dry_P Parameter: Plant Line Value: WS
  misc_feature: MA Experiment 20001554 PARAMETER Experiment Name: At_Drought_Soil_Dry_P Parameter: Post Timepoint (hr) Value: None
  misc_feature: MA Experiment 20001554 PARAMETER Experiment Name: At_Drought_Soil_Dry_P Parameter: Post-Treatment Value: None
  misc_feature: MA Experiment 20001554 PARAMETER Experiment Name: At_Drought_Soil_Dry_P Parameter: Timepoint (day) Value: 7
  misc_feature: MA Experiment 20001554 PARAMETER Experiment Name: At_Drought_Soil_Dry_P Parameter: Treatment Value: Drought vs. No Drought
  misc_feature: MA Experiment ID: 20001555 Result: Down-regulated in Transcription
  misc_feature: MA Experiment 20001555 PARAMETER Experiment Name: At_Drought_Soil_Dry_P Parameter: Age (day) Value: 24
  misc_feature: MA Experiment 20001555 PARAMETER Experiment Name: At_Drought_Soil_Dry_P Parameter: Organism Value: A. thaliana
  misc_feature: MA Experiment 20001555 PARAMETER Experiment Name: At_Drought_Soil_Dry_P Parameter: Plant Line Value: WS
  misc_feature: MA Experiment 20001555 PARAMETER Experiment Name: At_Drought_Soil_Dry_P Parameter: Post Timepoint (hr) Value: None
  misc_feature: MA Experiment 20001555 PARAMETER Experiment Name: At_Drought_Soil_Dry_P Parameter: Post-Treatment Value: None
  misc_feature: MA Experiment 20001555 PARAMETER Experiment Name: At_Drought_Soil_Dry_P Parameter: Timepoint (day) Value: 10
  misc_feature: MA Experiment 20001555 PARAMETER Experiment Name: At_Drought_Soil_Dry_P Parameter: Treatment Value: Drought vs. No Drought
  misc_feature: MA Experiment ID: 20001557 Result: Up-regulated in Transcription
  misc_feature: MA Experiment 20001557 PARAMETER Experiment Name: At_Drought_Soil_Dry_P Parameter: Age (day) Value: 27
  misc_feature: MA Experiment 20001557 PARAMETER Experiment Name: At_Drought_Soil_Dry_P Parameter: Organism Value: A. thaliana
  misc_feature: MA Experiment 20001557 PARAMETER Experiment Name: At_Drought_Soil_Dry_P Parameter: Plant Line Value: WS
  misc_feature: MA Experiment 20001557 PARAMETER Experiment Name: At_Drought_Soil_Dry_P Parameter: Post Timepoint (hr) Value: 3
  misc_feature: MA Experiment 20001557 PARAMETER Experiment Name: At_Drought_Soil_Dry_P Parameter: Post-Treatment Value: Re-Water vs. No Drought
  misc_feature: MA Experiment 20001557 PARAMETER Experiment Name: At_Drought_Soil_Dry_P Parameter: Timepoint (day) Value: 13
  misc_feature: MA Experiment 20001557 PARAMETER Experiment Name: At_Drought_Soil_Dry_P Parameter: Treatment Value: Drought vs. No Drought
  misc_feature: MA Experiment ID: 20001558 Result: Up-regulated in Transcription
  misc_feature: MA Experiment 20001558 PARAMETER Experiment Name: At_Drought_Soil_Dry_P Parameter: Age (day) Value: 27
  misc_feature: MA Experiment 20001558 PARAMETER Experiment Name: At_Drought_Soil_Dry_P Parameter: Organism Value: A. thaliana
  misc_feature: MA Experiment 20001558 PARAMETER Experiment Name: At_Drought_Soil_Dry_P Parameter: Plant Line Value: WS
  misc_feature: MA Experiment 20001558 PARAMETER Experiment Name: At_Drought_Soil_Dry_P Parameter: Post Timepoint (hr) Value: 6
  misc_feature: MA Experiment 20001558 PARAMETER Experiment Name: At_Drought_Soil_Dry_P Parameter: Post-Treatment Value: Re-Water vs. No Drought
  misc_feature: MA Experiment 20001558 PARAMETER Experiment Name: At_Drought_Soil_Dry_P Parameter: Timepoint (day) Value: 13
  misc_feature: MA Experiment 20001558 PARAMETER Experiment Name: At_Drought_Soil_Dry_P Parameter: Treatment Value: Drought vs. No Drought
  misc_feature: MA Experiment ID: 20001906 Result: Down-regulated in Transcription
  misc_feature: MA Experiment 20001906 PARAMETER Experiment Name: At_Drought_Reproduction_P Parameter: Age (day) Value: 35
  misc_feature: MA Experiment 20001906 PARAMETER Experiment Name: At_Drought_Reproduction_P Parameter: Organism Value: A. thaliana
  misc_feature: MA Experiment 20001906 PARAMETER Experiment Name: At_Drought_Reproduction_P Parameter: Plant Line Value: WS
  misc_feature: MA Experiment 20001906 PARAMETER Experiment Name: At_Drought_Reproduction_P Parameter: Timepoint (day) Value: 5
  misc_feature: MA Experiment 20001906 PARAMETER Experiment Name: At_Drought_Reproduction_P Parameter: Tissue Value: Siliques
  misc_feature: MA Experiment 20001906 PARAMETER Experiment Name: At_Drought_Reproduction_P Parameter: Treatment Value: Drought vs. No Drought
  misc_feature: MA Experiment ID: 20001911 Result: Down-regulated in Transcription
  misc_feature: MA Experiment 20001911 PARAMETER Experiment Name: At_Drought_Reproduction_P Parameter: Age (day) Value: 40
  misc_feature: MA Experiment 20001911 PARAMETER Experiment Name: At_Drought_Reproduction_P Parameter: Organism Value: A. thaliana
  misc_feature: MA Experiment 20001911 PARAMETER Experiment Name: At_Drought_Reproduction_P Parameter: Plant Line Value: WS
  misc_feature: MA Experiment 20001911 PARAMETER Experiment Name: At_Drought_Reproduction_P Parameter: Timepoint (day) Value: 10
  misc_feature: MA Experiment 20001911 PARAMETER Experiment Name: At_Drought_Reproduction_P Parameter: Tissue Value: Flowers
  misc_feature: MA Experiment 20001911 PARAMETER Experiment Name: At_Drought_Reproduction_P Parameter: Treatment Value: Drought vs. No Drought
ttcttcttcgtttatttcaccttttttggtttctttagctcagaaaaagcccattctttttttctattcttgtttattttaatcatactgtgcgtttctacaaagtttgttcctttcttcttcaactctctcactcacggtcacagactcacagagatctgtttctttcttttatttttgctttcactcttctcttccagtgagagagagtgagagaaaacaaaatggtgaagcttttgttagtagggtttgttgtggctggtataatactgggaactcaagcaaatgaatatttagatttcaatgtgacagaaatagatcgcattgaggaattagagtttggattttccaaatatagctccaatttgaaccctttaatggttggtctcacccttatcagaggagctgattctggagctgtttgtttggatggaacattgcctggatatcacttgcaccgtggacatggatctggagctaatagctggctcattcaattggagggaggaggatggtgcaacaacatcaggacctgtgtatacaggaagactactcgacgtggttcctctaattatatggagaaacagcttcagtttacaggaatactgagtgacaaagctcaagaaaatcctgactttttcaactggaatagagttaagcttcgttactgcgatggcgcttctttcagtggagatggccagaatcaggctgcacaacttcagtttagaggagagcgtatctggagagccgcaatagatgatttgaaggcgaatggaatgcgatacgccaatcaggcacttctctccggatgctctgctggtggtttagcagcaatcttgcgctgcgatgagtttaggaacttattccctggatcaaccaaagtcaagtgcttgagtgatgcaggcttgttcttggacactgccgatgtttcaggcggccgcacaatcaggaacttatacaatggtgtcgtagaattgcagagtgtgaagaacaatcttccacgtatatgcacaaaccatcttgatccaacctcgtgtttcttcccacaaaatctgatcagtcaaatgaaaactccactttttatcgtcaacgcagcatatgatacatggcagattcaaagcagtatagctccaacatcagctgatcctagtggattttggcatgactgcagactaaaccatggaaaatgtactcctgcacagttgagattcttgcaaggattcagggaacagatgcttagagtagtcaagggcttctcaatgtctagacagaatggattgttcatcaattcttgctttgctcactgccaaaccgagagacaagatacttggtttgccgatgattctcctgttatcaggaaaaaggcggtggcaatagctgtaggagattggtatttcgatagagcggaagtgaagttagtcgattgcccatacccgtgtgacaagagctgccacaacttggtgttcagatgattgtttgactatgttctttattctctctcatatatacataccttagaaaatttctttctttcaaaaggaaagattttgtatcctttggtagtaaccaatgcctcattggtatatgattaagtgtatcgtggaaaatcataataaaaaaacaaaacaaaacaaagtttgctt

SEQ ID NO: 35190 - protein, 415 aa, Arabidopsis thaliana
  peptide (1)..(415): Ceres Seq. ID no. 12335610
  misc_feature (37)..(399): Pfam Name: Pectinacetylesterase Pfam Description: Pectinacetylesterase
  misc_feature (51)..(415): Homolog of NCBI NO: 15226462 NR Description: pectinacetylesterase, putative
  misc_feature (118)..(415): Homolog of NCBI NO: 30690308 NR Description: pectinacetylesterase, putative [Arabidopsis
  misc_feature (52)..(414): Homolog of NCBI NO: 28392968 NR Description: putative pectinacetylesterase [Arabidopsis
  misc_feature (1)..(415): Homolog of NCBI NO: 21703105 NR Description: At1g57590/T8L23_6 [Arabidopsis thaliana]
  misc_feature (4)..(415): Homolog of NCBI NO: 25347293 NR Description: probable pectinacetylesterase precursor T8L23.6
  misc_feature (1)..(415): Homolog of NCBI NO: 30696158 NR Description: pectinacetylesterase, putative [Arabidopsis
  misc_feature (1)..(415): Homolog of NCBI NO: 7487997 NR Description: pectin acetylesterase homolog F21E10.11 -
  misc_feature (296)..(415): Homolog of NCBI NO: 6714404 NR Description: putative pectinacetylesterase [Arabidopsis
  misc_feature (1)..(252): Homolog of NCBI NO: 6714404 NR Description: putative pectinacetylesterase [Arabidopsis
  misc_feature (1)..(415): Homolog of NCBI NO: 18397406 NR Description: pectinacetylesterase, putative
MVKLLLVGFVVAGIILGTQANEYLDFNVTEIDRIEELEFGFSKYSSNLNPLMVGLTLIRGADSGAVCLDGTLPGYHLHRGHGSGANSWLIQLEGGGWCNNIRTCVYRKTTRRGSSNYMEKQLQFTGILSDKAQENPDFFNWNRVKLRYCDGASFSGDGQNQAAQLQFRGERIWRAAIDDLKANGMRYANQALLSGCSAGGLAAILRCDEFRNLFPGSTKVKCLSDAGLFLDTADVSGGRTIRNLYNGVVELQSVKNNLPRICTNHLDPTSCFFPQNLISQMKTPLFIVNAAYDTWQIQSSIAPTSADPSGFWHDCRLNHGKCTPAQLRFLQGFREQMLRVVKGFSMSRQNGLFINSCFAHCQTERQDTWFADDSPVIRKKAVAIAVGDWYFDRAEVKLVDCPYPCDKSCHNLVFR

SEQ ID NO: 35191 - protein, 364 aa, Arabidopsis thaliana
  peptide (1)..(364): Ceres Seq. ID no. 12335611
  misc_feature (1)..(348): Pfam Name: Pectinacetylesterase Pfam Description: Pectinacetylesterase
  misc_feature (1)..(364): Homolog of NCBI NO: 15226462 NR Description: pectinacetylesterase, putative
  misc_feature (67)..(364): Homolog of NCBI NO: 30690308 NR Description: pectinacetylesterase, putative [Arabidopsis
  misc_feature (1)..(363): Homolog of NCBI NO: 28392968 NR Description: putative pectinacetylesterase [Arabidopsis
  misc_feature (1)..(364): Homolog of NCBI NO: 21703105 NR Description: At1g57590/T8L23_6 [Arabidopsis thaliana]
  misc_feature (1)..(364): Homolog of NCBI NO: 25347293 NR Description: probable pectinacetylesterase precursor T8L23.6
  misc_feature (1)..(364): Homolog of NCBI NO: 30696158 NR Description: pectinacetylesterase, putative [Arabidopsis
  misc_feature (1)..(364): Homolog of NCBI NO: 7487997 NR Description: pectin acetylesterase homolog F21E10.11 -
  misc_feature (245)..(364): Homolog of NCBI NO: 6714404 NR Description: putative pectinacetylesterase [Arabidopsis
  misc_feature (1)..(201): Homolog of NCBI NO: 6714404 NR Description: putative pectinacetylesterase [Arabidopsis
  misc_feature (1)..(364): Homolog of NCBI NO: 18397406 NR Description: pectinacetylesterase, putative
MVGLTLIRGADSGAVCLDGTLPGYHLHRGHGSGANSWLIQLEGGGWCNNIRTCVYRKTTRRGSSNYMEKQLQFTGILSDKAQENPDFFNWNRVKLRYCDGASFSGDGQNQAAQLQFRGERIWRAAIDDLKANGMRYANQALLSGCSAGGLAAILRCDEFRNLFPGSTKVKCLSDAGLFLDTADVSGGRTIRNLYNGVVELQSVKNNLPRICTNHLDPTSCFFPQNLISQMKTPLFIVNAAYDTWQIQSSIAPTSADPSGFWHDCRLNHGKCTPAQLRFLQGFREQMLRVVKGFSMSRQNGLFINSCFAHCQTERQDTWFADDSPVIRKKAVAIAVGDWYFDRAEVKLVDCPYPCDKSCHNLVFR

SEQ ID NO: 35192 - protein, 298 aa, Arabidopsis thaliana
  peptide (1)..(298): Ceres Seq. ID no. 12335612
  misc_feature (1)..(282): Pfam Name: Pectinacetylesterase Pfam Description: Pectinacetylesterase
  misc_feature (1)..(298): Homolog of NCBI NO: 15226462 NR Description: pectinacetylesterase, putative
  misc_feature (1)..(298): Homolog of NCBI NO: 30690308 NR Description: pectinacetylesterase, putative [Arabidopsis
  misc_feature (1)..(297): Homolog of NCBI NO: 28392968 NR Description: putative pectinacetylesterase [Arabidopsis
  misc_feature (1)..(298): Homolog of NCBI NO: 21703105 NR Description: At1g57590/T8L23_6 [Arabidopsis thaliana]
  misc_feature (1)..(298): Homolog of NCBI NO: 25347293 NR Description: probable pectinacetylesterase precursor T8L23.6
  misc_feature (1)..(298): Homolog of NCBI NO: 30696158 NR Description: pectinacetylesterase, putative [Arabidopsis
  misc_feature (1)..(298): Homolog of NCBI NO: 7487997 NR Description: pectin acetylesterase homolog F21E10.11 -
  misc_feature (179)..(298): Homolog of NCBI NO: 6714404 NR Description: putative pectinacetylesterase [Arabidopsis
  misc_feature (1)..(135): Homolog of NCBI NO: 6714404 NR Description: putative pectinacetylesterase [Arabidopsis
  misc_feature (1)..(298): Homolog of NCBI NO: 18397406 NR Description: pectinacetylesterase, putative
MEKQLQFTGILSDKAQENPDFFNWNRVKLRYCDGASFSGDGQNQAAQLQFRGERIWRAAIDDLKANGMRYANQALLSGCSAGGLAAILRCDEFRNLFPGSTKVKCLSDAGLFLDTADVSGGRTIRNLYNGVVELQSVKNNLPRICTNHLDPTSCFFPQNLISQMKTPLFIVNAAYDTWQIQSSIAPTSADPSGFWHDCRLNHGKCTPAQLRFLQGFREQMLRVVKGFSMSRQNGLFINSCFAHCQTERQDTWFADDSPVIRKKAVAIAVGDWYFDRAEVKLVDCPYPCDKSCHNLVFR

SEQ ID NO: 35193 - DNA, 2303 bp, Arabidopsis thaliana
  misc_feature (1)..(2303): Ceres Seq. ID no. 13490817
  misc_feature: MA Experiment ID: 108434 Result: Down-regulated in Transcription
  misc_feature: MA Experiment 108434 PARAMETER Experiment Name: At_Root_Tips_cDNA_P Parameter: Tissue Value: Root Tips
  misc_feature: MA Experiment ID: 108435 Result: Up-regulated in Transcription
  misc_feature: MA Experiment 108435 PARAMETER Experiment Name: At_stm_Mutants_cDNA_P Parameter: Plant Line Value: wt Landsburg vs stm
  misc_feature: MA Experiment 108435 PARAMETER Experiment Name: At_stm_Mutants_cDNA_P Parameter: Tissue Value: Shoot Apical Meristem Region
  misc_feature: MA Experiment ID: 108461 Result: Down-regulated in Transcription
  misc_feature: MA Experiment 108461 PARAMETER Experiment Name: At_Germinating_Seeds_cDNA_P Parameter: Age (day) Value: 1 vs. 0
  misc_feature: MA Experiment 108461 PARAMETER Experiment Name: At_Germinating_Seeds_cDNA_P Parameter: Tissue Value: Germinating Seeds
  misc_feature: MA Experiment ID: 108462 Result: Down-regulated in Transcription
  misc_feature: MA Experiment 108462 PARAMETER Experiment Name: At_Germinating_Seeds_cDNA_P Parameter: Age (day) Value: 2 vs. 0
  misc_feature: MA Experiment 108462 PARAMETER Experiment Name: At_Germinating_Seeds_cDNA_P Parameter: Tissue Value: Germinating Seeds
  misc_feature: MA Experiment ID: 108463 Result: Down-regulated in Transcription
  misc_feature: MA Experiment 108463 PARAMETER Experiment Name: At_Germinating_Seeds_cDNA_P Parameter: Age (day) Value: 3 vs. 0
  misc_feature: MA Experiment 108463 PARAMETER Experiment Name: At_Germinating_Seeds_cDNA_P Parameter: Tissue Value: Germinating Seeds
  misc_feature: MA Experiment ID: 108464 Result: Down-regulated in Transcription
  misc_feature: MA Experiment 108464 PARAMETER Experiment Name: At_Germinating_Seeds_cDNA_P Parameter: Age (day) Value: 4 vs. 0
  misc_feature: MA Experiment 108464 PARAMETER Experiment Name: At_Germinating_Seeds_cDNA_P Parameter: Tissue Value: Germinating Seeds
  misc_feature: MA Experiment ID: 108501 Result: Up-regulated in Transcription
  misc_feature: MA Experiment 108501 PARAMETER Experiment Name: At_ap2_floral_buds_cDNA_P Parameter: Plant Line Value: ap2 (Ler.)
  misc_feature: MA Experiment 108501 PARAMETER Experiment Name: At_ap2_floral_buds_cDNA_P Parameter: Tissue Value: Closed Flower
  misc_feature: MA Experiment ID: 20000111 Result: Down-regulated in Transcription
  misc_feature: MA Experiment 20000111 PARAMETER Experiment Name: At_42deg_Heat_cDNA_P Parameter: Temperature (deg C) Value: 42 vs. 22
  misc_feature: MA Experiment 20000111 PARAMETER Experiment Name: At_42deg_Heat_cDNA_P Parameter: Timepoint (hr) Value: 6
  misc_feature: MA Experiment 20000111 PARAMETER Experiment Name: At_42deg_Heat_cDNA_P Parameter: Tissue Value: Aerial
  misc_feature: MA Experiment ID: 20000112 Result: Down-regulated in Transcription
  misc_feature: MA Experiment 20000112 PARAMETER Experiment Name: At_42deg_Heat_cDNA_P Parameter: Temperature (deg C) Value: 42 vs. 22
  misc_feature: MA Experiment 20000112 PARAMETER Experiment Name: At_42deg_Heat_cDNA_P Parameter: Timepoint (hr) Value: 2
  misc_feature: MA Experiment 20000112 PARAMETER Experiment Name: At_42deg_Heat_cDNA_P Parameter: Tissue Value: Aerial
  misc_feature: MA Experiment ID: 20000173 Result: Down-regulated in Transcription
  misc_feature: MA Experiment 20000173 PARAMETER Experiment Name: At_42deg_Heat_P Parameter: Age (day) Value: 14
  misc_feature: MA Experiment 20000173 PARAMETER Experiment Name: At_42deg_Heat_P Parameter: Organism Value: A. thaliana
  misc_feature: MA Experiment 20000173 PARAMETER Experiment Name: At_42deg_Heat_P Parameter: Plant Line Value: WS
  misc_feature: MA Experiment 20000173 PARAMETER Experiment Name: At_42deg_Heat_P Parameter: Temperature (deg C) Value: 42 vs. 22
  misc_feature: MA Experiment 20000173 PARAMETER Experiment Name: At_42deg_Heat_P Parameter: Timepoint (hr) Value: 6
  misc_feature: MA Experiment 20000173 PARAMETER Experiment Name: At_42deg_Heat_P Parameter: Tissue Value: Aerial
  misc_feature: MA Experiment ID: 20000184 Result: Down-regulated in Transcription
  misc_feature: MA Experiment 20000184 PARAMETER Experiment Name: At_Shoots__P Parameter: Age (day) Value: 7
  misc_feature: MA Experiment 20000184 PARAMETER Experiment Name: At_Shoots__P Parameter: Tissue Value: Shoots vs. Whole Plant
  misc_feature: MA Experiment ID: 20000265 Result: Up-regulated in Transcription
  misc_feature: MA Experiment 20000265 PARAMETER Experiment Name: At_Open_Flower_P Parameter: Age (day) Value: 21
  misc_feature: MA Experiment 20000265 PARAMETER Experiment Name: At_Open_Flower_P Parameter: Plant Line Value: WS
  misc_feature: MA Experiment 20000265 PARAMETER Experiment Name: At_Open_Flower_P Parameter: Tissue Value: Closed Flower vs. Whole Plant
  misc_feature: MA Experiment ID: 20000286 Result: Up-regulated in Transcription
  misc_feature: MA Experiment 20000286 PARAMETER Experiment Name: At_Open_Flower_P Parameter: Age (day) Value: 21
  misc_feature: MA Experiment 20000286 PARAMETER Experiment Name: At_Open_Flower_P Parameter: Plant Line Value: WS
  misc_feature: MA Experiment 20000286 PARAMETER Experiment Name: At_Open_Flower_P Parameter: Tissue Value: Half Open vs. Whole Plant
  misc_feature: MA Experiment ID: 20000439 Result: Up-regulated in Transcription
  misc_feature: MA Experiment 20000439 PARAMETER Experiment Name: At_Roots__P Parameter: Age (day) Value: 14 vs. 21
  misc_feature: MA Experiment 20000439 PARAMETER Experiment Name: At_Roots__P Parameter: Organism Value: A. thaliana
  misc_feature: MA Experiment 20000439 PARAMETER Experiment Name: At_Roots__P Parameter: Tissue Value: Roots vs. Whole Plant
  misc_feature: MA Experiment ID: 20000495 Result: Up-regulated in Transcription
  misc_feature: MA Experiment 20000495 PARAMETER Experiment Name: At_Guard_Cells_P Parameter: Harvest Date Value: 8/2/2002
  misc_feature: MA Experiment 20000495 PARAMETER Experiment Name: At_Guard_Cells_P Parameter: Organism Value: A. thaliana
  misc_feature: MA Experiment 20000495 PARAMETER Experiment Name: At_Guard_Cells_P Parameter: Tissue Value: Guard Cells vs. Leaves
  misc_feature: MA Experiment ID: 20000794 Result: Up-regulated in Transcription
  misc_feature: MA Experiment 20000794 PARAMETER Experiment Name: At_Petals_P Parameter: Age (day) Value: 23-25 days
  misc_feature: MA Experiment 20000794 PARAMETER Experiment Name: At_Petals_P Parameter: Plant Line Value: WS
  misc_feature: MA Experiment 20000794 PARAMETER Experiment Name: At_Petals_P Parameter: Tissue Value: Petals vs. Whole plant
  misc_feature: MA Experiment ID: 20001451 Result: Up-regulated in Transcription
  misc_feature: MA Experiment 20001451 PARAMETER Experiment Name: At_Far-red-induction_P Parameter: Age (day) Value: 7
  misc_feature: MA Experiment 20001451 PARAMETER Experiment Name: At_Far-red-induction_P Parameter: Light Value: Far-red vs. White
  misc_feature: MA Experiment 20001451 PARAMETER Experiment Name: At_Far-red-induction_P Parameter: Organism Value: A. thaliana
  misc_feature: MA Experiment 20001451 PARAMETER Experiment Name: At_Far-red-induction_P Parameter: Plant Line Value: Columbia
  misc_feature: MA Experiment 20001451 PARAMETER Experiment Name: At_Far-red-induction_P Parameter: Timepoint (hr) Value: 24
  misc_feature: MA Experiment 20001451 PARAMETER Experiment Name: At_Far-red-induction_P Parameter: Tissue Value: Whole Plant
  misc_feature: MA Experiment ID: 20001757 Result: Down-regulated in Transcription
  misc_feature: MA Experiment 20001757 PARAMETER Experiment Name: At_50mM_NH4NO3_L-to-H_P Parameter: Timepoint (hr) Value: 6
  misc_feature: MA Experiment 20001757 PARAMETER Experiment Name: At_50mM_NH4NO3_L-to-H_P Parameter: Tissue Value: Leaf
  misc_feature: MA Experiment 20001757 PARAMETER Experiment Name: At_50mM_NH4NO3_L-to-H_P Parameter: Treatment Value: 50mM NH4NO3 vs 100mM Mannitol
gtgcaacaacctaaccatggaaattgcaatttgcaaacatggcgctcgcgctctcgctgtcggcatgttctcctccactccgccgcactcgtcgtgccggttttcgaacaagctgctcgatcttcgcgaatccagcacagcgagccaagaggaagctgcttgagctgatctccgaggaggatcgaggtctgagaacccagaaagaccccaagaagcgagatgaaatcgtgaacgccatcgaatccatgacggttatcgggcgcagctccatcaccacagacgactctctatctgccacgtggcggctcttgtggacgacggagaaggaacagttgttcatcatagaaaaggcaggcttgtttgggacgaccgccggagacgttttgcaggtgatcgatgtgaataaacggatcctcaataacgtcatcactttcccgccggacggggttttcttcgtacgctccgatatcgatatcgcttccccgcagagagtcaatttcagattcaatagtgcggtattgagagggaagaactgggagctcccactgccaccatttgggaagggctggtttgagaatgtgtatatggacggtgagatcagagtggccaaggacatcagaggagactacttaattgttgatcgtgctccttataactggactgaatcatttgtataatttgtgatgctttttgcttcttgtataagttatacaccatttctgtctctctcctttatcattgggcctcaaatagatgatgcaggaatatagggaggaggaggaagaggaatttgaaggatcattcaaagtgtcatccttgagtttatttagggtttttgtctgtgtttgttacaaacacaccacccacattttctatgcccttttttaatgttattttcacaatccatgacttaaaaggccaacactaatcctttgtctcttatttcattgtgaactcacaaagatgttggtgtccgcaagggtagagaaacaaaagcgtgttgcttatcaggggaaggcgacagtgcttgctctcggtaaggccttgccgagcaatgttgtttcccaggagaatctcgtggaggagtatctccgtgaaatcaaatgcgataacctttctatcaaagacaagctgcaacacttgtgcaaaagcacaactgtcaagacacgctacacagtcatgtcacgggagacgctgcacaaataccctgaactagcaaccgagggttccccaaccatcaaacagaggcttgagattgcaaacgatgcggttgtgcagatggcatatgaagcgagcttggtttgcatcaaggaatggggaagggcagtggaagatatcactcatcttgtctacgtttcctccagtgagttccgtttgcccggaggtgatctttacctctcggcacagctgggccttagcaacgaggttcagagagtgatgctgtattttcttggatgctatggaggtttgagtgggctgcgcgtggccaaagacattgctgagaacaacccagggagccgtgtgttgctcaccacctctgagactaccgttctggggttccgcccacccaacaaagctcgtccttacaacttagtcggggctgcactctttggagatggagcagctgccctgatcatcggagcagaccctacagagtcggaatctcctttcatggagcttcactgtgctatgcagcagttcctgccccaaacacagggggtgatcgacgggcggctgtcagaagagggcataaccttcaagctaggaagagacctccctcagaagatcgaagacaacgtggaggagttctgcaagaagctagtggcaaaggctggctctggtgcgttggagttgaatgaccttttctgggcagttcatcctggtggaccagccatcctgagcgggctggagacaaagctgaagctgaagccggaaaagctggaatgcagcagaagggcgttgatggattatgggaacgtaagcagcaacaccatcttctacataatggacaaagtcagggatgagcttgagaagaaaggcacagagggagaagagtggggtctgggcttagctttcggaccgggaatcactttcgaaggctttctcatgaggaacctctaaatgtatatgaactggacatttctcaacaaataaaatatacaggaaccgatgctaacacacatacatcatgtaatggttgcattagttttgttctttaatggtaaatcacagaaatacatcaatacagtaagtttatatacataattgaagtattcttcaatggcatcttacttcatgcattc

SEQ ID NO: 35194 - protein, 385 aa, Arabidopsis thaliana
  peptide (1)..(385): Ceres Seq. ID no. 13490818
  misc_feature (3)..(229): Pfam Name: Chalcone and stilbene synthases, N-terminal domain Pfam Description: Chalcone and stilbene synthases, N-terminal
  misc_feature (16)..(385): Homolog of NCBI NO: 7433785 NR Description: chalcone synthase homolog - rice
  misc_feature (17)..(385): Homolog of NCBI NO: 34902722 NR Description: putative chalcone synthase
  misc_feature (16)..(385): Homolog of NCBI NO: 37535500 NR Description: anther-specific protein YY2
  misc_feature (9)..(385): Homolog of NCBI NO: 7433790 NR Description: chalcone synthase homolog ChS1 - Monterey pine
  misc_feature (3)..(385): Homolog of NCBI NO: 7433787 NR Description: anther-specific protein homolog T11I11.90 -
  misc_feature (3)..(385): Homolog of NCBI NO: 18418528 NR Description: chalcone and stilbene synthase family
  misc_feature (24)..(385): Homolog of NCBI NO: 7433783 NR Description: anther-specific protein - wood tobacco
  misc_feature (11)..(385): Homolog of NCBI NO: 15217605 NR Description: chalcone and stilbene synthase family
  misc_feature (1)..(385): Homolog of NCBI NO: 21554288 NR Description: putative chalcone synthase [Arabidopsis thaliana]
  misc_feature (1)..(385): Homolog of NCBI NO: 15236691 NR Description: chalcone and stilbene synthase family
MLVSARVEKQKRVAYQGKATVLALGKALPSNVVSQENLVEEYLREIKCDNLSIKDKLQHLCKSTTVKTRYTVMSRETLHKYPELATEGSPTIKQRLEIANDAVVQMAYEASLVCIKEWGRAVEDITHLVYVSSSEFRLPGGDLYLSAQLGLSNEVQRVMLYFLGCYGGLSGLRVAKDIAENNPGSRVLLTTSETTVLGFRPPNKARPYNLVGAALFGDGAAALIIGADPTESESPFMELHCAMQQFLPQTQGVIDGRLSEEGITFKLGRDLPQKIEDNVEEFCKKLVAKAGSGALELNDLFWAVHPGGPAILSGLETKLKLKPEKLECSRRALMDYGNVSSNTIFYIMDKVRDELEKKGTEGEEWGLGLAFGPGITFEGFLMRNL

SEQ ID NO: 35195 - protein, 313 aa, Arabidopsis thaliana
  peptide (1)..(313): Ceres Seq. ID no. 13490819
  misc_feature (1)..(157): Pfam Name: Chalcone and stilbene synthases, N-terminal domain Pfam Description: Chalcone and stilbene synthases, N-terminal
  misc_feature (1)..(313): Homolog of NCBI NO: 7433785 NR Description: chalcone synthase homolog - rice
  misc_feature (1)..(313): Homolog of NCBI NO: 34902722 NR Description: putative chalcone synthase
  misc_feature (1)..(313): Homolog of NCBI NO: 37535500 NR Description: anther-specific protein YY2
  misc_feature (1)..(313): Homolog of NCBI NO: 7433790 NR Description: chalcone synthase homolog ChS1 - Monterey pine
  misc_feature (1)..(313): Homolog of NCBI NO: 7433787 NR Description: anther-specific protein homolog T11I11.90 -
  misc_feature (1)..(313): Homolog of NCBI NO: 18418528 NR Description: chalcone and stilbene synthase family
  misc_feature (1)..(313): Homolog of NCBI NO: 7433783 NR Description: anther-specific protein - wood tobacco
  misc_feature (1)..(313): Homolog of NCBI NO: 15217605 NR Description: chalcone and stilbene synthase family
  misc_feature (1)..(313): Homolog of NCBI NO: 21554288 NR Description: putative chalcone synthase [Arabidopsis thaliana]
  misc_feature (1)..(313): Homolog of NCBI NO: 15236691 NR Description: chalcone and stilbene synthase family
MSRETLHKYPELATEGSPTIKQRLEIANDAVVQMAYEASLVCIKEWGRAVEDITHLVYVSSSEFRLPGGDLYLSAQLGLSNEVQRVMLYFLGCYGGLSGLRVAKDIAENNPGSRVLLTTSETTVLGFRPPNKARPYNLVGAALFGDGAAALIIGADPTESESPFMELHCAMQQFLPQTQGVIDGRLSEEGITFKLGRDLPQKIEDNVEEFCKKLVAKAGSGALELNDLFWAVHPGGPAILSGLETKLKLKPEKLECSRRALMDYGNVSSNTIFYIMDKVRDELEKKGTEGEEWGLGLAFGPGITFEGFLMRNL

SEQ ID NO: 35196 - protein, 280 aa, Arabidopsis thaliana
  peptide (1)..(280): Ceres Seq. ID no. 13490820
  misc_feature (1)..(124): Pfam Name: Chalcone and stilbene synthases, N-terminal domain Pfam Description: Chalcone and stilbene synthases, N-terminal
  misc_feature (1)..(280): Homolog of NCBI NO: 7433785 NR Description: chalcone synthase homolog - rice
  misc_feature (1)..(280): Homolog of NCBI NO: 34902722 NR Description: putative chalcone synthase
  misc_feature (1)..(280): Homolog of NCBI NO: 37535500 NR Description: anther-specific protein YY2
  misc_feature (1)..(280): Homolog of NCBI NO: 7433790 NR Description: chalcone synthase homolog ChS1 - Monterey pine
  misc_feature (1)..(280): Homolog of NCBI NO: 7433787 NR Description: anther-specific protein homolog T11I11.90 -
  misc_feature (1)..(280): Homolog of NCBI NO: 18418528 NR Description: chalcone and stilbene synthase family
  misc_feature (1)..(280): Homolog of NCBI NO: 7433783 NR Description: anther-specific protein - wood tobacco
  misc_feature (1)..(280): Homolog of NCBI NO: 15217605 NR Description: chalcone and stilbene synthase family
  misc_feature (1)..(280): Homolog of NCBI NO: 21554288 NR Description: putative chalcone synthase [Arabidopsis thaliana]
  misc_feature (1)..(280): Homolog of NCBI NO: 15236691 NR Description: chalcone and stilbene synthase family
MAYEASLVCIKEWGRAVEDITHLVYVSSSEFRLPGGDLYLSAQLGLSNEVQRVMLYFLGCYGGLSGLRVAKDIAENNPGSRVLLTTSETTVLGFRPPNKARPYNLVGAALFGDGAAALIIGADPTESESPFMELHCAMQQFLPQTQGVIDGRLSEEGITFKLGRDLPQKIEDNVEEFCKKLVAKAGSGALELNDLFWAVHPGGPAILSGLETKLKLKPEKLECSRRALMDYGNVSSNTIFYIMDKVRDELEKKGTEGEEWGLGLAFGPGITFEGFLMRNL

SEQ ID NO: 35197 - DNA, 1325 bp, Arabidopsis thaliana
  misc_feature (1)..(1325): Ceres Seq. ID no. 13499787
  misc_feature: MA Experiment ID: 108461 Result: Up-regulated in Transcription
  misc_feature: MA Experiment 108461 PARAMETER Experiment Name: At_Germinating_Seeds_cDNA_P Parameter: Age (day) Value: 1 vs. 0
  misc_feature: MA Experiment 108461 PARAMETER Experiment Name: At_Germinating_Seeds_cDNA_P Parameter: Tissue Value: Germinating Seeds
  misc_feature: MA Experiment ID: 108463 Result: Down-regulated in Transcription
  misc_feature: MA Experiment 108463 PARAMETER Experiment Name: At_Germinating_Seeds_cDNA_P Parameter: Age (day) Value: 3 vs. 0
  misc_feature: MA Experiment 108463 PARAMETER Experiment Name: At_Germinating_Seeds_cDNA_P Parameter: Tissue Value: Germinating Seeds
  misc_feature: MA Experiment ID: 108573 Result: Up-regulated in Transcription
  misc_feature: MA Experiment 108573 PARAMETER Experiment Name: At_Drought_cDNA_P Parameter: Timepoint (hr) Value: 6
  misc_feature: MA Experiment 108573 PARAMETER Experiment Name: At_Drought_cDNA_P Parameter: Tissue Value: Aerial
  misc_feature: MA Experiment 108573 PARAMETER Experiment Name: At_Drought_cDNA_P Parameter: Treatment Value: Drought vs. No Drought
  misc_feature: MA Experiment ID: 108595 Result: Down-regulated in Transcription
  misc_feature: MA Experiment 108595 PARAMETER Experiment Name: At_Ler-pi_Ovule_cDNA_P Parameter: Plant Line Value: null
  misc_feature: MA Experiment ID: 108609 Result: Down-regulated in Transcription
  misc_feature: MA Experiment 108609 PARAMETER Experiment Name: At_100uM_ABA_cDNA_P Parameter: Timepoint (hr) Value: 24
  misc_feature: MA Experiment 108609 PARAMETER Experiment Name: At_100uM_ABA_cDNA_P Parameter: Tissue Value: Aerial
  misc_feature: MA Experiment 108609 PARAMETER Experiment Name: At_100uM_ABA_cDNA_P Parameter: Treatment Value: 100uM ABA vs. No Treatment
  misc_feature: MA Experiment ID: 108668 Result: Up-regulated in Transcription
  misc_feature: MA Experiment 108668 PARAMETER Experiment Name: At_2mM_SA_cDNA_P Parameter: Plant Line Value: WS
  misc_feature: MA Experiment 108668 PARAMETER Experiment Name: At_2mM_SA_cDNA_P Parameter: Timepoint (hr) Value: 6
  misc_feature: MA Experiment 108668 PARAMETER Experiment Name: At_2mM_SA_cDNA_P Parameter: Treatment Value: 2mM SA vs. No Treatment
  misc_feature: MA Experiment ID: 20000112 Result: Down-regulated in Transcription
  misc_feature: MA Experiment 20000112 PARAMETER Experiment Name: At_42deg_Heat_cDNA_P Parameter: Temperature (deg C) Value: 42 vs. 22
  misc_feature: MA Experiment 20000112 PARAMETER Experiment Name: At_42deg_Heat_cDNA_P Parameter: Timepoint (hr) Value: 2
  misc_feature: MA Experiment 20000112 PARAMETER Experiment Name: At_42deg_Heat_cDNA_P Parameter: Tissue Value: Aerial
  misc_feature: MA Experiment ID: 20000173 Result: Down-regulated in Transcription
  misc_feature: MA Experiment 20000173 PARAMETER Experiment Name: At_42deg_Heat_P Parameter: Age (day) Value: 14
  misc_feature: MA Experiment 20000173 PARAMETER Experiment Name: At_42deg_Heat_P Parameter: Organism Value: A. thaliana
  misc_feature: MA Experiment 20000173 PARAMETER Experiment Name: At_42deg_Heat_P Parameter: Plant Line Value: WS
  misc_feature: MA Experiment 20000173 PARAMETER Experiment Name: At_42deg_Heat_P Parameter: Temperature (deg C) Value: 42 vs. 22
  misc_feature: MA Experiment 20000173 PARAMETER Experiment Name: At_42deg_Heat_P Parameter: Timepoint (hr) Value: 6
  misc_feature: MA Experiment 20000173 PARAMETER Experiment Name: At_42deg_Heat_P Parameter: Tissue Value: Aerial
  misc_feature: MA Experiment ID: 20000180 Result: Up-regulated in Transcription
  misc_feature: MA Experiment 20000180 PARAMETER Experiment Name: At_Germinating_Seeds_P Parameter: Age (hr) Value: 24 vs. 0
  misc_feature: MA Experiment 20000180 PARAMETER Experiment Name: At_Germinating_Seeds_P Parameter: Tissue Value: Germinating Seeds
  misc_feature: MA Experiment ID: 20000182 Result: Up-regulated in Transcription
  misc_feature: MA Experiment 20000182 PARAMETER Experiment Name: At_2mM_SA_P Parameter: Age (day) Value: 14
  misc_feature: MA Experiment 20000182 PARAMETER Experiment Name: At_2mM_SA_P Parameter: Organism Value: A. thaliana
  misc_feature: MA Experiment 20000182 PARAMETER Experiment Name: At_2mM_SA_P Parameter: Plant Line Value: WS
  misc_feature: MA Experiment 20000182 PARAMETER Experiment Name: At_2mM_SA_P Parameter: Timepoint (hr) Value: 6
  misc_feature: MA Experiment 20000182 PARAMETER Experiment Name: At_2mM_SA_P Parameter: Tissue Value: Aerial
  misc_feature: MA Experiment 20000182 PARAMETER Experiment Name: At_2mM_SA_P Parameter: Treatment Value: 2mM SA vs. No Treatment
  misc_feature: MA Experiment ID: 20000184 Result: Up-regulated in Transcription
  misc_feature: MA Experiment 20000184 PARAMETER Experiment Name: At_Shoots__P Parameter: Age (day) Value: 7
  misc_feature: MA Experiment 20000184 PARAMETER Experiment Name: At_Shoots__P Parameter: Tissue Value: Shoots vs. Whole Plant
  misc_feature: MA Experiment ID: 20000185 Result: Up-regulated in Transcription
  misc_feature: MA Experiment 20000185 PARAMETER Experiment Name: At_Roots__P Parameter: Age (day) Value: 7 vs. 21
  misc_feature: MA Experiment 20000185 PARAMETER Experiment Name: At_Roots__P Parameter: Organism Value: A. thaliana
  misc_feature: MA Experiment 20000185 PARAMETER Experiment Name: At_Roots__P Parameter: Tissue Value: Roots vs. Whole Plant
  misc_feature: MA Experiment ID: 20000224 Result: Up-regulated in Transcription
  misc_feature: MA Experiment ID: 20000227 Result: Down-regulated in Transcription
  misc_feature: MA Experiment 20000227 PARAMETER Experiment Name: At_Root-Tips-vs-Tops_P Parameter: Tissue Value: Root Tips vs. Root Tops
  misc_feature: MA Experiment ID: 20000264 Result: Up-regulated in Transcription
  misc_feature: MA Experiment 20000264 PARAMETER Experiment Name: At_Open_Flower_P Parameter: Age (day) Value: 21
  misc_feature: MA Experiment 20000264 PARAMETER Experiment Name: At_Open_Flower_P Parameter: Plant Line Value: WS
  misc_feature: MA Experiment 20000264 PARAMETER Experiment Name: At_Open_Flower_P Parameter: Tissue Value: Open Flower vs. Whole Plant
  misc_feature: MA Experiment ID: 20000265 Result: Up-regulated in Transcription
  misc_feature: MA Experiment 20000265 PARAMETER Experiment Name: At_Open_Flower_P Parameter: Age (day) Value: 21
  misc_feature: MA Experiment 20000265 PARAMETER Experiment Name: At_Open_Flower_P Parameter: Plant Line Value: WS
  misc_feature: MA Experiment 20000265 PARAMETER Experiment Name: At_Open_Flower_P Parameter: Tissue Value: Closed Flower vs. Whole Plant
  misc_feature: MA Experiment ID: 20000286 Result: Up-regulated in Transcription
  misc_feature: MA Experiment 20000286 PARAMETER Experiment Name: At_Open_Flower_P Parameter: Age (day) Value: 21
  misc_feature: MA Experiment 20000286 PARAMETER Experiment Name: At_Open_Flower_P Parameter: Plant Line Value: WS
  misc_feature: MA Experiment 20000286 PARAMETER Experiment Name: At_Open_Flower_P Parameter: Tissue Value: Half Open vs. Whole Plant
  misc_feature: MA Experiment ID: 20000437 Result: Down-regulated in Transcription
  misc_feature: MA Experiment 20000437 PARAMETER Experiment Name: At_Drought_P Parameter: Age (day) Value: 8
  misc_feature: MA Experiment 20000437 PARAMETER Experiment Name: At_Drought_P Parameter: Organism Value: A. thaliana
  misc_feature: MA Experiment 20000437 PARAMETER Experiment Name: At_Drought_P Parameter: Plant Line Value: WS
  misc_feature: MA Experiment 20000437 PARAMETER Experiment Name: At_Drought_P Parameter: Timepoint (hr) Value: 24
  misc_feature: MA Experiment 20000437 PARAMETER Experiment Name: At_Drought_P Parameter: Tissue Value: Whole Plant
  misc_feature: MA Experiment 20000437 PARAMETER Experiment Name: At_Drought_P Parameter: Treatment Value: Drought vs. No Drought
  misc_feature: MA Experiment ID: 20000438 Result: Up-regulated in Transcription
  misc_feature: MA Experiment 20000438 PARAMETER Experiment Name: At_Shoots__P Parameter: Age (day) Value: 14
  misc_feature: MA Experiment 20000438 PARAMETER Experiment Name: At_Shoots__P Parameter: Tissue Value: Shoots vs. Whole Plant
  misc_feature: MA Experiment ID: 20000439 Result: Up-regulated in Transcription
  misc_feature: MA Experiment 20000439 PARAMETER Experiment Name: At_Roots__P Parameter: Age (day) Value: 14 vs. 21
  misc_feature: MA Experiment 20000439 PARAMETER Experiment Name: At_Roots__P Parameter: Organism Value: A. thaliana
  misc_feature: MA Experiment 20000439 PARAMETER Experiment Name: At_Roots__P Parameter: Tissue Value: Roots vs. Whole Plant
  misc_feature: MA Experiment ID: 20000451 Result: Up-regulated in Transcription
  misc_feature: MA Experiment 20000451 PARAMETER Experiment Name: At_CS6879_Shoots-Roots_P Parameter: Age (day) Value: 14
  misc_feature: MA Experiment 20000451 PARAMETER Experiment Name: At_CS6879_Shoots-Roots_P Parameter: Organism Value: A. thaliana
  misc_feature: MA Experiment 20000451 PARAMETER Experiment Name: At_CS6879_Shoots-Roots_P Parameter: Plant Line Value: CS6879 vs. WS
  misc_feature: MA Experiment 20000451 PARAMETER Experiment Name: At_CS6879_Shoots-Roots_P Parameter: Tissue Value: Roots
  misc_feature: MA Experiment ID: 20000453 Result: Down-regulated in Transcription
  misc_feature: MA Experiment 20000453 PARAMETER Experiment Name: At_100uM_ABA_P Parameter: Age (day) Value: 15
  misc_feature: MA Experiment 20000453 PARAMETER Experiment Name: At_100uM_ABA_P Parameter: Organism Value: A. thaliana
  misc_feature: MA Experiment 20000453 PARAMETER Experiment Name: At_100uM_ABA_P Parameter: Plant Line Value: WS
  misc_feature: MA Experiment 20000453 PARAMETER Experiment Name: At_100uM_ABA_P Parameter: Timepoint (hr) Value: 24
  misc_feature: MA Experiment 20000453 PARAMETER Experiment Name: At_100uM_ABA_P Parameter: Tissue Value: Aerial
  misc_feature: MA Experiment 20000453 PARAMETER Experiment Name: At_100uM_ABA_P Parameter: Treatment Value: 100uM ABA vs. No Treatment
  misc_feature: MA Experiment ID: 20000794 Result: Up-regulated in Transcription
  misc_feature: MA Experiment 20000794 PARAMETER Experiment Name: At_Petals_P Parameter: Age (day) Value: 23-25 days
  misc_feature: MA Experiment 20000794 PARAMETER Experiment Name: At_Petals_P Parameter: Plant Line Value: WS
  misc_feature: MA Experiment 20000794 PARAMETER Experiment Name: At_Petals_P Parameter: Tissue Value: Petals vs. Whole plant
  misc_feature: MA Experiment ID: 20001910 Result: Up-regulated in Transcription
  misc_feature: MA Experiment 20001910 PARAMETER Experiment Name: At_Drought_Reproduction_P Parameter: Age (day) Value: 37
  misc_feature: MA Experiment 20001910 PARAMETER Experiment Name: At_Drought_Reproduction_P Parameter: Organism Value: A. thaliana
  misc_feature: MA Experiment 20001910 PARAMETER Experiment Name: At_Drought_Reproduction_P Parameter: Plant Line Value: WS
  misc_feature: MA Experiment 20001910 PARAMETER Experiment Name: At_Drought_Reproduction_P Parameter: Timepoint (day) Value: 7
  misc_feature: MA Experiment 20001910 PARAMETER Experiment Name: At_Drought_Reproduction_P Parameter: Tissue Value: Flowers
  misc_feature: MA Experiment 20001910 PARAMETER Experiment Name: At_Drought_Reproduction_P Parameter: Treatment Value: Drought vs. No Drought
  misc_feature: MA Experiment ID: 20001911 Result: Up-regulated in Transcription
  misc_feature: MA Experiment 20001911 PARAMETER Experiment Name: At_Drought_Reproduction_P Parameter: Age (day) Value: 40
  misc_feature: MA Experiment 20001911 PARAMETER Experiment Name: At_Drought_Reproduction_P Parameter: Organism Value: A. thaliana
  misc_feature: MA Experiment 20001911 PARAMETER Experiment Name: At_Drought_Reproduction_P Parameter: Plant Line Value: WS
  misc_feature: MA Experiment 20001911 PARAMETER Experiment Name: At_Drought_Reproduction_P Parameter: Timepoint (day) Value: 10
  misc_feature: MA Experiment 20001911 PARAMETER Experiment Name: At_Drought_Reproduction_P Parameter: Tissue Value: Flowers
  misc_feature: MA Experiment 20001911 PARAMETER Experiment Name: At_Drought_Reproduction_P Parameter: Treatment Value: Drought vs. No Drought
tcaagcaaaatcccctctaaccatcagacttacaaatctagtccatataatacaataagcccacttttcttcttctctcatcaagctttttcttctctcctcatttttcgtataattcgatttgcgaaaaatggtcgagggagagtccaaggcattgtggattattttggccaccgtgtttgcagtcgcggcggtggcaccagcggtgcatggacagcaaacgccgtgttacttcgtgtttggagactctgtcttcgacaacggtaacaacaatgccttgaacaccaaggccaaggtcaactatttaccttatggtatagattactttcaaggtccaaccggtcggtttagcaacggtcggaatattccagacgttatcgctgaactagcgggtttcaataacccaattccaccatttgccggagcatcacaggcacaagctaacatcggactcaactatgcttccggtgccggcggtatccgcgaagaaaccagcgaaaatatgggtgagagaatcagtttgagacagcaagtaaacaaccacttttccgctatcataaccgcggcggtgccactgagtcggttaaggcaatgtctatacacaatcaacatcggaagcaacgattacctcaacaactacttcttgtcgcctcctactctagctcgtcgtctatttaatcctgaccagtacgctcgatctctcataagcctctaccgtatctatctgacgcaattgtacgtactaggagcgaggaatgtagcgttgttcggtatcggtaagatcggatgtacaccacggattgttgctaccctcggtggcggcactggctgcgcagaagaagtgaaccaagccgtgatcatcttcaacactaaactcaaagccctagtcacagatttcaacaacaaaccgggagctatgttcacttatgttgatctcttctctggaaatgctgaagatttcgccgctctagggattacggttggtgataggagttgctgtacggttaatccgggtgaagaactttgtgcggcgaacggaccggtttgtccagacagaaacaaattcatattctgggataacgtgcatactacggaagtgataaatactgtggtggctaacgcagcgtttaacggacctatagctagtccgttcaacatatcccagttagtgaattaaaattagggctctattccattgttaaaatggcatagtccctttatttaaaacttggtttcgtctagattgaaaccatatatcagacacatatgtaataatgatggaataatatatcagatagactgaataatgaataaaacggattgac

SEQ ID NO: 35198 - protein, 348 aa, Arabidopsis thaliana
  peptide (1)..(348): Ceres Seq. ID no. 13499788
  misc_feature (34)..(332): Pfam Name: GDSL-like Lipase/Acylhydrolase Pfam Description: GDSL-like Lipase/Acylhydrolase
  misc_feature (8)..(346): Homolog of NCBI NO: 15220512 NR Description: GDSL-motif lipase/hydrolase protein [Arabidopsis
  misc_feature (8)..(346): Homolog of NCBI NO: 21594055 NR Description: lipase/hydrolase, putative [Arabidopsis thaliana]
  misc_feature (12)..(339): Homolog of NCBI NO: 34909504 NR Description: putative GDSL-motif lipase/hydrolase-like protein
  misc_feature (10)..(346): Homolog of NCBI NO: 15220514 NR Description: GDSL-motif lipase/hydrolase protein [Arabidopsis
  misc_feature (10)..(346): Homolog of NCBI NO: 21592417 NR Description: lipase/hydrolase, putative [Arabidopsis thaliana]
  misc_feature (13)..(347): Homolog of NCBI NO: 15224707 NR Description: GDSL-motif lipase/hydrolase protein [Arabidopsis
  misc_feature (6)..(346): Homolog of NCBI NO: 15224697 NR Description: GDSL-motif lipase hydrolase protein [Arabidopsis
  misc_feature (1)..(346): Homolog of NCBI NO: 15224705 NR Description: GDSL-motif lipase/hydrolase protein [Arabidopsis
  misc_feature (1)..(348): Homolog of NCBI NO: 21554289 NR Description: putative GDSL-motif lipase/hydrolase [Arabidopsis
  misc_feature (1)..(348): Homolog of NCBI NO: 15234641 NR Description: GDSL-motif lipase/hydrolase protein [Arabidopsis
MVEGESKALWIILATVFAVAAVAPAVHGQQTPCYFVFGDSVFDNGNNNALNTKAKVNYLPYGIDYFQGPTGRFSNGRNIPDVIAELAGFNNPIPPFAGASQAQANIGLNYASGAGGIREETSENMGERISLRQQVNNHFSAIITAAVPLSRLRQCLYTINIGSNDYLNNYFLSPPTLARRLFNPDQYARSLISLYRIYLTQLYVLGARNVALFGIGKIGCTPRIVATLGGGTGCAEEVNQAVIIFNTKLKALVTDFNNKPGAMFTYVDLFSGNAEDFAALGITVGDRSCCTVNPGEELCAANGPVCPDRNKFIFWDNVHTTEVINTVVANAAFNGPIASPFNISQLVN

SEQ ID NO: 35199 - protein, 224 aa, Arabidopsis thaliana
  peptide (1)..(224): Ceres Seq. ID no. 13499789
  misc_feature (1)..(208): Pfam Name: GDSL-like Lipase/Acylhydrolase Pfam Description: GDSL-like Lipase/Acylhydrolase
  misc_feature (1)..(222): Homolog of NCBI NO: 15220512 NR Description: GDSL-motif lipase/hydrolase protein [Arabidopsis
  misc_feature (1)..(222): Homolog of NCBI NO: 21594055 NR Description: lipase/hydrolase, putative [Arabidopsis thaliana]
  misc_feature (1)..(215): Homolog of NCBI NO: 34909504 NR Description: putative GDSL-motif lipase/hydrolase-like protein
  misc_feature (1)..(222): Homolog of NCBI NO: 15220514 NR Description: GDSL-motif lipase/hydrolase protein [Arabidopsis
  misc_feature (1)..(222): Homolog of NCBI NO: 21592417 NR Description: lipase/hydrolase, putative [Arabidopsis thaliana]
  misc_feature (1)..(223): Homolog of NCBI NO: 15224707 NR Description: GDSL-motif lipase/hydrolase protein [Arabidopsis
  misc_feature (1)..(222): Homolog of NCBI NO: 15224697 NR Description: GDSL-motif lipase hydrolase protein [Arabidopsis
  misc_feature (1)..(222): Homolog of NCBI NO: 15224705 NR Description: GDSL-motif lipase/hydrolase protein [Arabidopsis
  misc_feature (1)..(224): Homolog of NCBI NO: 21554289 NR Description: putative GDSL-motif lipase/hydrolase [Arabidopsis
  misc_feature (1)..(224): Homolog of NCBI NO: 15234641 NR Description: GDSL-motif lipase/hydrolase protein [Arabidopsis
MGERISLRQQVNNHFSAIITAAVPLSRLRQCLYTINIGSNDYLNNYFLSPPTLARRLFNPDQYARSLISLYRIYLTQLYVLGARNVALFGIGKIGCTPRIVATLGGGTGCAEEVNQAVIIFNTKLKALVTDFNNKPGAMFTYVDLFSGNAEDFAALGITVGDRSCCTVNPGEELCAANGPVCPDRNKFIFWDNVHTTEVINTVVANAAFNGPIASPFNISQLVN

SEQ ID NO: 35200 - DNA, 1197 bp, Arabidopsis thaliana
  misc_feature (1)..(1197): Ceres Seq. ID no. 12335613
  misc_feature: MA Experiment ID: 108433 Result: Down-regulated in Transcription
  misc_feature: MA Experiment 108433 PARAMETER Experiment Name: At_rhl_Mutant2_cDNA_P Parameter: Age (day) Value: 7
  misc_feature: MA Experiment 108433 PARAMETER Experiment Name: At_rhl_Mutant2_cDNA_P Parameter: Organism Value: A. thaliana
  misc_feature: MA Experiment 108433 PARAMETER Experiment Name: At_rhl_Mutant2_cDNA_P Parameter: Plant Line Value: rhl Mutant vs. wt landsburg
  misc_feature: MA Experiment 108433 PARAMETER Experiment Name: At_rhl_Mutant2_cDNA_P Parameter: Tissue Value: Roots
  misc_feature: MA Experiment ID: 108463 Result: Up-regulated in Transcription
  misc_feature: MA Experiment 108463 PARAMETER Experiment Name: At_Germinating_Seeds_cDNA_P Parameter: Age (day) Value: 3 vs. 0
  misc_feature: MA Experiment 108463 PARAMETER Experiment Name: At_Germinating_Seeds_cDNA_P Parameter: Tissue Value: Germinating Seeds
  misc_feature: MA Experiment ID: 20000089 Result: Down-regulated in Transcription
  misc_feature: MA Experiment ID: 20000224 Result: Down-regulated in Transcription
  misc_feature: MA Experiment ID: 20000437 Result: Down-regulated in Transcription
  misc_feature: MA Experiment 20000437 PARAMETER Experiment Name: At_Drought_P Parameter: Age (day) Value: 8
  misc_feature: MA Experiment 20000437 PARAMETER Experiment Name: At_Drought_P Parameter: Organism Value: A. thaliana
  misc_feature: MA Experiment 20000437 PARAMETER Experiment Name: At_Drought_P Parameter: Plant Line Value: WS
  misc_feature: MA Experiment 20000437 PARAMETER Experiment Name: At_Drought_P Parameter: Timepoint (hr) Value: 24
  misc_feature: MA Experiment 20000437 PARAMETER Experiment Name: At_Drought_P Parameter: Tissue Value: Whole Plant
  misc_feature: MA Experiment 20000437 PARAMETER Experiment Name: At_Drought_P Parameter: Treatment Value: Drought vs. No Drought
  misc_feature: MA Experiment ID: 20001450 Result: Up-regulated in Transcription
  misc_feature: MA Experiment 20001450 PARAMETER Experiment Name: At_Far-red-induction_P Parameter: Age (day) Value: 7
  misc_feature: MA Experiment 20001450 PARAMETER Experiment Name: At_Far-red-induction_P Parameter: Light Value: Far-red vs. White
  misc_feature: MA Experiment 20001450 PARAMETER Experiment Name: At_Far-red-induction_P Parameter: Organism Value: A. thaliana
  misc_feature: MA Experiment 20001450 PARAMETER Experiment Name: At_Far-red-induction_P Parameter: Plant Line Value: Columbia
  misc_feature: MA Experiment 20001450 PARAMETER Experiment Name: At_Far-red-induction_P Parameter: Timepoint (hr) Value: 8
  misc_feature: MA Experiment 20001450 PARAMETER Experiment Name: At_Far-red-induction_P Parameter: Tissue Value: Whole Plant
  misc_feature: MA Experiment ID: 20001451 Result: Up-regulated in Transcription
  misc_feature: MA Experiment 20001451 PARAMETER Experiment Name: At_Far-red-induction_P Parameter: Age (day) Value: 7
  misc_feature: MA Experiment 20001451 PARAMETER Experiment Name: At_Far-red-induction_P Parameter: Light Value: Far-red vs. White
  misc_feature: MA Experiment 20001451 PARAMETER Experiment Name: At_Far-red-induction_P Parameter: Organism Value: A. thaliana
  misc_feature: MA Experiment 20001451 PARAMETER Experiment Name: At_Far-red-induction_P Parameter: Plant Line Value: Columbia
  misc_feature: MA Experiment 20001451 PARAMETER Experiment Name: At_Far-red-induction_P Parameter: Timepoint (hr) Value: 24
  misc_feature: MA Experiment 20001451 PARAMETER Experiment Name: At_Far-red-induction_P Parameter: Tissue Value: Whole Plant
  misc_feature: MA Experiment ID: 20001555 Result: Down-regulated in Transcription
  misc_feature: MA Experiment 20001555 PARAMETER Experiment Name: At_Drought_Soil_Dry_P Parameter: Age (day) Value: 24
  misc_feature: MA Experiment 20001555 PARAMETER Experiment Name: At_Drought_Soil_Dry_P Parameter: Organism Value: A. thaliana
  misc_feature: MA Experiment 20001555 PARAMETER Experiment Name: At_Drought_Soil_Dry_P Parameter: Plant Line Value: WS
  misc_feature: MA Experiment 20001555 PARAMETER Experiment Name: At_Drought_Soil_Dry_P Parameter: Post Timepoint (hr) Value: None
  misc_feature: MA Experiment 20001555 PARAMETER Experiment Name: At_Drought_Soil_Dry_P Parameter: Post-Treatment Value: None
  misc_feature: MA Experiment 20001555 PARAMETER Experiment Name: At_Drought_Soil_Dry_P Parameter: Timepoint (day) Value: 10
  misc_feature: MA Experiment 20001555 PARAMETER Experiment Name: At_Drought_Soil_Dry_P Parameter: Treatment Value: Drought vs. No Drought
aaatttaatgtcgctctcaaaactcatttttttcatatgaattttctaacacaaacaattttccttggaaatctccgccttgtatctcttatataactcatctctctatactccgaacatgtccctctccgttaaccttaacggccatatcagccgccgcagctgaaaccgacgtctctctccgtcgcagatctaactctcttaacggaaaccacactaacggcgtcgccattgacggaaccctagacaacaacaaccgtcgcgtcggagatacaaacactcacatggatatatctgctaagaaaactgacaacggctacgccaatggtgtcggaggaggaggatggagaagcaaagcgtcgttcacgacgtggacggcgcgtgatatcgtctacgtggtgagataccattggataccgtgcatgttcgctgccggacttctgttcttcatgggcgtggagtacacgcttcagatgattcccgcgagatctgagccgttcgatcttgggtttgtggtcacgcgctctttgaatcgcgtattagcatcttcaccggatcttaacactgttttagccgcactaaacacggtgttcgtagggatgcaaacaacgtatattgtatggacatggttagtggaaggacgagcacgagccaccatcgcggctttattcatgttcacttgtcgcggcattctcggctactctactcagcttcctctccctcaggactttctaggatcaggggttgattttccggtgggaaatgtctctttcttcctcttcttctctggccatgtcgccggctcgatgatcgcatcattggacatgagaagaatgcagaggttgagacttgcaatggtctttgacatcctcaatgtattacagtcgatcagactgctcggtacaagaggacattacacaatcgaccttgcggttggagttggcgctgggattctcttcgactcattggccggaaagtacgaagagatgatgagcaagagacatttaggcactggttttagtttgatttcgaaagactctctagtcaattaaatttgttttctatcagaatgtttagttgagttgaatctagcgtaatgaatttttttgtttttctttgaaatggttctacttgactaccgttatttgaacctaactaagtgtgatcaatcttatgttaaggggtattacatagtct

SEQ ID NO: 35201 - protein, 255 aa, Arabidopsis thaliana
  peptide (1)..(255): Ceres Seq. ID no. 12335614
  misc_feature (1)..(254): Homolog of NCBI NO: 15232701 NR Description: unknown protein; protein id: At3g15830.1
  misc_feature (1)..(255): Homolog of NCBI NO: 13926235 NR Description: AT3g15820/MSJ11_22 [Arabidopsis thaliana]
  misc_feature (1)..(255): Homolog of NCBI NO: 18400910 NR Description: expressed protein
MDISAKKTDNGYANGVGGGGWRSKASFTTWTARDIVYVVRYHWIPCMFAAGLLFFMGVEYTLQMIPARSEPFDLGFVVTRSLNRVLASSPDLNTVLAALNTVFVGMQTTYIVWTWLVEGRARATIAALFMFTCRGILGYSTQLPLPQDFLGSGVDFPVGNVSFFLFFSGHVAGSMIASLDMRRMQRLRLAMVFDILNVLQSIRLLGTRGHYTIDLAVGVGAGILFDSLAGKYEEMMSKRHLGTGFSLISKDSLVN

SEQ ID NO: 35202 - protein, 209 aa, Arabidopsis thaliana
  peptide (1)..(209): Ceres Seq. ID no. 12335615
  misc_feature (1)..(208): Homolog of NCBI NO: 15232701 NR Description: unknown protein; protein id: At3g15830.1
  misc_feature (1)..(209): Homolog of NCBI NO: 13926235 NR Description: AT3g15820/MSJ11_22 [Arabidopsis thaliana]
  misc_feature (1)..(209): Homolog of NCBI NO: 18400910 NR Description: expressed protein
MFAAGLLFFMGVEYTLQMIPARSEPFDLGFVVTRSLNRVLASSPDLNTVLAALNTVFVGMQTTYIVWTWLVEGRARATIAALFMFTCRGILGYSTQLPLPQDFLGSGVDFPVGNVSFFLFFSGHVAGSMIASLDMRRMQRLRLAMVFDILNVLQSIRLLGTRGHYTIDLAVGVGAGILFDSLAGKYEEMMSKRHLGTGFSLISKDSLVN

SEQ ID NO: 35203 - protein, 200 aa, Arabidopsis thaliana
  peptide (1)..(200): Ceres Seq. ID no. 12335616
  misc_feature (1)..(199): Homolog of NCBI NO: 15232701 NR Description: unknown protein; protein id: At3g15830.1
  misc_feature (1)..(200): Homolog of NCBI NO: 13926235 NR Description: AT3g15820/MSJ11_22 [Arabidopsis thaliana]
  misc_feature (1)..(200): Homolog of NCBI NO: 18400910 NR Description: expressed protein
MGVEYTLQMIPARSEPFDLGFVVTRSLNRVLASSPDLNTVLAALNTVFVGMQTTYIVWTWLVEGRARATIAALFMFTCRGILGYSTQLPLPQDFLGSGVDFPVGNVSFFLFFSGHVAGSMIASLDMRRMQRLRLAMVFDILNVLQSIRLLGTRGHYTIDLAVGVGAGILFDSLAGKYEEMMSKRHLGTGFSLISKDSLVN

SEQ ID NO: 35204 - DNA, 1249 bp, Arabidopsis thaliana
  misc_feature (1)..(1249): Ceres Seq. ID no. 13491254
  misc_feature: MA Experiment ID: 108462 Result: Up-regulated in Transcription
  misc_feature: MA Experiment 108462 PARAMETER Experiment Name: At_Germinating_Seeds_cDNA_P Parameter: Age (day) Value: 2 vs. 0
  misc_feature: MA Experiment 108462 PARAMETER Experiment Name: At_Germinating_Seeds_cDNA_P Parameter: Tissue Value: Germinating Seeds
  misc_feature: MA Experiment ID: 108573 Result: Up-regulated in Transcription
  misc_feature: MA Experiment 108573 PARAMETER Experiment Name: At_Drought_cDNA_P Parameter: Timepoint (hr) Value: 6
  misc_feature: MA Experiment 108573 PARAMETER Experiment Name: At_Drought_cDNA_P Parameter: Tissue Value: Aerial
  misc_feature: MA Experiment 108573 PARAMETER Experiment Name: At_Drought_cDNA_P Parameter: Treatment Value: Drought vs. No Drought
aaaagtcaaagttgttcactttacctataaaaacgctctctcactttcttttcaatggcttcttcttcttgtttccttcgctcgattctcttctcttctcctactaaccttcgttcaaatcaccatctccccactttcttccccaagaattatctcatttgctctcattccacttcttctcgcttcgaatcgctctcggtttcatcgatcggaactggatctaccaagaaatcatccgatactcggagaaaggtaaagagcatggctacgacaaatataggaaaggaggagaagaaaagagtcgagatttatgatctcgaagagaatttagtgattgatttggctaaattcacagcagatctctccgataagttttgtaaagagagaggcgctttcaccgtcgttgtctccggtggctctctcatcaaatcactccggaaattagtagaatctccttacgttgattctatagattgggcaaggtggcattttttctgggttgacgagagagttgttcccaagaatcacgatgatagcaactataaactcgcttatgatagttttctatccaaggtaccaattccgcctggaaatgtatatgcaatcaacgaagccctctccgctgaggctgcagcggatgattacgagacctgcctcaaacatttggtcaacaccaacattctccgtgtatctgaatcaactggctttcccaaatttgatctcatgcttctaggtatgggacctgatggtcatgtggcatcattattccctgggcatggtctctgcaacgagagcaagaaatgggtagtttcaatctctgactctccaaaaccaccgtctgagagaatcaccttcacgttcccggtcatcaactcatctgcacatgtagctctagttgtttgcggttctgggaaagctgaagctgtggaggcagctttaaagaagactgggaatgtaccacctgctggttctgtttctgctgaagacgagttggtttggttcctggacaaaccagcatcttccaagctctaaaaacaggtggtatgcttcccattccagtgaacttaccaatgtgactagtccggtttagtttttggattttgactctttggttctctccatttatgttgtgggaagagactgttgtgataaaagcgtgtactttacatggaaataatgaactaatcaatggtttctctgatttgttttggtgtattttggttaaaatctatcggaaccaacactctcc

SEQ ID NO: 35205 - protein, 325 aa, Arabidopsis thaliana
  peptide (1)..(325): Ceres Seq. ID no. 13491255
  misc_feature (96)..(324): Pfam Name: Glucosamine-6-phosphate Pfam Description: Glucosamine-6-phosphate
  misc_feature (81)..(325): Homolog of NCBI NO: 14009294 NR Description: putative 6-phosphogluconolactonase [Brassica
  misc_feature (80)..(325): Homolog of NCBI NO: 15238526 NR Description: 6-phosphogluconolactonase-related protein
  misc_feature (80)..(325): Homolog of NCBI NO: 21537412 NR Description: 6-phosphogluconolactonase-like protein
  misc_feature (70)..(325): Homolog of NCBI NO: 15238523 NR Description: 6-phosphogluconolactonase-related protein
  misc_feature (80)..(325): Homolog of NCBI NO: 21536675 NR Description: 6-phosphogluconolactonase-like protein
  misc_feature (80)..(325): Homolog of NCBI NO: 15229127 NR Description: 6-phosphogluconolactonase - like protein
  misc_feature (80)..(325): Homolog of NCBI NO: 28140256 NR Description: putative 6-phosphogluconolactonase [Elaeis
  misc_feature (70)..(325): Homolog of NCBI NO: 10177901 NR Description: 6-phosphogluconolactonase-like protein
  misc_feature (1)..(325): Homolog of NCBI NO: 21554291 NR Description: 6-phosphogluconolactonase-like protein
  misc_feature (1)..(325): Homolog of NCBI NO: 18420789 NR Description: 6-phosphogluconolactonase-related protein
MASSSCFLRSILFSSPTNLRSNHHLPTFFPKNYLICSHSTSSRFESLSVSSIGTGSTKKSSDTRRKVKSMATTNIGKEEKKRVEIYDLEENLVIDLAKFTADLSDKFCKERGAFTVVVSGGSLIKSLRKLVESPYVDSIDWARWHFFWVDERVVPKNHDDSNYKLAYDSFLSKVPIPPGNVYAINEALSAEAAADDYETCLKHLVNTNILRVSESTGFPKFDLMLLGMGPDGHVASLFPGHGLCNESKKWVVSISDSPKPPSERITFTFPVINSSAHVALVVCGSGKAEAVEAALKKTGNVPPAGSVSAEDELVWFLDKPASSKL

SEQ ID NO: 35206 - protein, 256 aa, Arabidopsis thaliana
  peptide (1)..(256): Ceres Seq. ID no. 13491256
  misc_feature (27)..(255): Pfam Name: Glucosamine-6-phosphate Pfam Description: Glucosamine-6-phosphate
  misc_feature (12)..(256): Homolog of NCBI NO: 14009294 NR Description: putative 6-phosphogluconolactonase [Brassica
  misc_feature (11)..(256): Homolog of NCBI NO: 15238526 NR Description: 6-phosphogluconolactonase-related protein
  misc_feature (11)..(256): Homolog of NCBI NO: 21537412 NR Description: 6-phosphogluconolactonase-like protein
  misc_feature (1)..(256): Homolog of NCBI NO: 15238523 NR Description: 6-phosphogluconolactonase-related protein
  misc_feature (11)..(256): Homolog of NCBI NO: 21536675 NR Description: 6-phosphogluconolactonase-like protein
  misc_feature (11)..(256): Homolog of NCBI NO: 15229127 NR Description: 6-phosphogluconolactonase - like protein
  misc_feature (11)..(256): Homolog of NCBI NO: 28140256 NR Description: putative 6-phosphogluconolactonase [Elaeis
  misc_feature (1)..(256): Homolog of NCBI NO: 10177901 NR Description: 6-phosphogluconolactonase-like protein
  misc_feature (1)..(256): Homolog of NCBI NO: 21554291 NR Description: 6-phosphogluconolactonase-like protein
  misc_feature (1)..(256): Homolog of NCBI NO: 18420789 NR Description: 6-phosphogluconolactonase-related protein
MATTNIGKEEKKRVEIYDLEENLVIDLAKFTADLSDKFCKERGAFTVVVSGGSLIKSLRKLVESPYVDSIDWARWHFFWVDERVVPKNHDDSNYKLAYDSFLSKVPIPPGNVYAINEALSAEAAADDYETCLKHLVNTNILRVSESTGFPKFDLMLLGMGPDGHVASLFPGHGLCNESKKWVVSISDSPKPPSERITFTFPVINSSAHVALVVCGSGKAEAVEAALKKTGNVPPAGSVSAEDELVWFLDKPASSKL

SEQ ID NO: 35207 - DNA, 1337 bp, Arabidopsis thaliana
  misc_feature (1)..(1337): Ceres Seq. ID no. 12562139
  misc_feature: MA Experiment ID: 108433 Result: Up-regulated in Transcription
  misc_feature: MA Experiment 108433 PARAMETER Experiment Name: At_rhl_Mutant2_cDNA_P Parameter: Age (day) Value: 7
  misc_feature: MA Experiment 108433 PARAMETER Experiment Name: At_rhl_Mutant2_cDNA_P Parameter: Organism Value: A. thaliana
  misc_feature: MA Experiment 108433 PARAMETER Experiment Name: At_rhl_Mutant2_cDNA_P Parameter: Plant Line Value: rhl Mutant vs. wt landsburg
  misc_feature: MA Experiment 108433 PARAMETER Experiment Name: At_rhl_Mutant2_cDNA_P Parameter: Tissue Value: Roots
  misc_feature: MA Experiment ID: 108434 Result: Down-regulated in Transcription
  misc_feature: MA Experiment 108434 PARAMETER Experiment Name: At_Root_Tips_cDNA_P Parameter: Tissue Value: Root Tips
  misc_feature: MA Experiment ID: 108462 Result: Up-regulated in Transcription
  misc_feature: MA Experiment 108462 PARAMETER Experiment Name: At_Germinating_Seeds_cDNA_P Parameter: Age (day) Value: 2 vs. 0
  misc_feature: MA Experiment 108462 PARAMETER Experiment Name: At_Germinating_Seeds_cDNA_P Parameter: Tissue Value: Germinating Seeds
  misc_feature: MA Experiment ID: 108463 Result: Up-regulated in Transcription
  misc_feature: MA Experiment 108463 PARAMETER Experiment Name: At_Germinating_Seeds_cDNA_P Parameter: Age (day) Value: 3 vs. 0
  misc_feature: MA Experiment 108463 PARAMETER Experiment Name: At_Germinating_Seeds_cDNA_P Parameter: Tissue Value: Germinating Seeds
  misc_feature: MA Experiment ID: 108464 Result: Up-regulated in Transcription
  misc_feature: MA Experiment 108464 PARAMETER Experiment Name: At_Germinating_Seeds_cDNA_P Parameter: Age (day) Value: 4 vs. 0
  misc_feature: MA Experiment 108464 PARAMETER Experiment Name: At_Germinating_Seeds_cDNA_P Parameter: Tissue Value: Germinating Seeds
  misc_feature: MA Experiment ID: 108569 Result: Up-regulated in Transcription
  misc_feature: MA Experiment 108569 PARAMETER Experiment Name: At_0.001%_MeJA__cDNA_P Parameter: Timepoint (hr) Value: 6
  misc_feature: MA Experiment 108569 PARAMETER Experiment Name: At_0.001%_MeJA__cDNA_P Parameter: Tissue Value: Aerial
  misc_feature: MA Experiment 108569 PARAMETER Experiment Name: At_0.001%_MeJA__cDNA_P Parameter: Treatment Value: 0.001% MeJA vs. No Treatment
  misc_feature: MA Experiment ID: 108573 Result: Up-regulated in Transcription
  misc_feature: MA Experiment 108573 PARAMETER Experiment Name: At_Drought_cDNA_P Parameter: Timepoint (hr) Value: 6
  misc_feature: MA Experiment 108573 PARAMETER Experiment Name: At_Drought_cDNA_P Parameter: Tissue Value: Aerial
  misc_feature: MA Experiment 108573 PARAMETER Experiment Name: At_Drought_cDNA_P Parameter: Treatment Value: Drought vs. No Drought
  misc_feature: MA Experiment ID: 108577 Result: Down-regulated in Transcription
  misc_feature: MA Experiment 108577 PARAMETER Experiment Name: At_42deg_Heat_cDNA_P Parameter: Temperature (deg C) Value: 42 vs. 22
  misc_feature: MA Experiment 108577 PARAMETER Experiment Name: At_42deg_Heat_cDNA_P Parameter: Timepoint (hr) Value: 6
  misc_feature: MA Experiment 108577 PARAMETER Experiment Name: At_42deg_Heat_cDNA_P Parameter: Tissue Value: Aerial
  misc_feature: MA Experiment ID: 108585 Result: Up-regulated in Transcription
  misc_feature: MA Experiment 108585 PARAMETER Experiment Name: At_5mM_NaNP_cDNA_P Parameter: Timepoint (hr) Value: 6
  misc_feature: MA Experiment 108585 PARAMETER Experiment Name: At_5mM_NaNP_cDNA_P Parameter: Tissue Value: Aerial
  misc_feature: MA Experiment 108585 PARAMETER Experiment Name: At_5mM_NaNP_cDNA_P Parameter: Treatment Value: null
  misc_feature: MA Experiment ID: 108595 Result: Down-regulated in Transcription
  misc_feature: MA Experiment 108595 PARAMETER Experiment Name: At_Ler-pi_Ovule_cDNA_P Parameter: Plant Line Value: null
  misc_feature: MA Experiment ID: 20000224 Result: Down-regulated in Transcription
  misc_feature: MA Experiment ID: 20000227 Result: Down-regulated in Transcription
  misc_feature: MA Experiment 20000227 PARAMETER Experiment Name: At_Root-Tips-vs-Tops_P Parameter: Tissue Value: Root Tips vs. Root Tops
  misc_feature: MA Experiment ID: 20000234 Result: Down-regulated in Transcription
  misc_feature: MA Experiment 20000234 PARAMETER Experiment Name: At_Siliques_P Parameter: Age (day) Value: 21
  misc_feature: MA Experiment 20000234 PARAMETER Experiment Name: At_Siliques_P Parameter: Organism Value: A. thaliana
  misc_feature: MA Experiment 20000234 PARAMETER Experiment Name: At_Siliques_P Parameter: Plant Line Value: WS
  misc_feature: MA Experiment 20000234 PARAMETER Experiment Name: At_Siliques_P Parameter: Tissue Value: Less Than 5mm Siliques vs. Whole Plant
  misc_feature: MA Experiment ID: 20001557 Result: Down-regulated in Transcription
  misc_feature: MA Experiment 20001557 PARAMETER Experiment Name: At_Drought_Soil_Dry_P Parameter: Age (day) Value: 27
  misc_feature: MA Experiment 20001557 PARAMETER Experiment Name: At_Drought_Soil_Dry_P Parameter: Organism Value: A. thaliana
  misc_feature: MA Experiment 20001557 PARAMETER Experiment Name: At_Drought_Soil_Dry_P Parameter: Plant Line Value: WS
  misc_feature: MA Experiment 20001557 PARAMETER Experiment Name: At_Drought_Soil_Dry_P Parameter: Post Timepoint (hr) Value: 3
  misc_feature: MA Experiment 20001557 PARAMETER Experiment Name: At_Drought_Soil_Dry_P Parameter: Post-Treatment Value: Re-Water vs. No Drought
  misc_feature: MA Experiment 20001557 PARAMETER Experiment Name: At_Drought_Soil_Dry_P Parameter: Timepoint (day) Value: 13
  misc_feature: MA Experiment 20001557 PARAMETER Experiment Name: At_Drought_Soil_Dry_P Parameter: Treatment Value: Drought vs. No Drought
  misc_feature: MA Experiment ID: 20001558 Result: Down-regulated in Transcription
  misc_feature: MA Experiment 20001558 PARAMETER Experiment Name: At_Drought_Soil_Dry_P Parameter: Age (day) Value: 27
  misc_feature: MA Experiment 20001558 PARAMETER Experiment Name: At_Drought_Soil_Dry_P Parameter: Organism Value: A. thaliana
  misc_feature: MA Experiment 20001558 PARAMETER Experiment Name: At_Drought_Soil_Dry_P Parameter: Plant Line Value: WS
  misc_feature: MA Experiment 20001558 PARAMETER Experiment Name: At_Drought_Soil_Dry_P Parameter: Post Timepoint (hr) Value: 6
  misc_feature: MA Experiment 20001558 PARAMETER Experiment Name: At_Drought_Soil_Dry_P Parameter: Post-Treatment Value: Re-Water vs. No Drought
  misc_feature: MA Experiment 20001558 PARAMETER Experiment Name: At_Drought_Soil_Dry_P Parameter: Timepoint (day) Value: 13
  misc_feature: MA Experiment 20001558 PARAMETER Experiment Name: At_Drought_Soil_Dry_P Parameter: Treatment Value: Drought vs. No Drought
  misc_feature: MA Experiment ID: 20001560 Result: Down-regulated in Transcription
  misc_feature: MA Experiment 20001560 PARAMETER Experiment Name: At_Drought_Soil_Dry_P Parameter: Age (day) Value: 28
  misc_feature: MA Experiment 20001560 PARAMETER Experiment Name: At_Drought_Soil_Dry_P Parameter: Organism Value: A. thaliana
  misc_feature: MA Experiment 20001560 PARAMETER Experiment Name: At_Drought_Soil_Dry_P Parameter: Plant Line Value: WS
  misc_feature: MA Experiment 20001560 PARAMETER Experiment Name: At_Drought_Soil_Dry_P Parameter: Post Timepoint (hr) Value: None
  misc_feature: MA Experiment 20001560 PARAMETER Experiment Name: At_Drought_Soil_Dry_P Parameter: Post-Treatment Value: None
  misc_feature: MA Experiment 20001560 PARAMETER Experiment Name: At_Drought_Soil_Dry_P Parameter: Timepoint (day) Value: 14
  misc_feature: MA Experiment 20001560 PARAMETER Experiment Name: At_Drought_Soil_Dry_P Parameter: Treatment Value: Drought vs. No Drought
tggaaagacggaagatggtatccatcatttcggtgttctcgaaggatggtttggtcaccattggtggaatggaagagctgctattcttctgattactactcttggtgtgtntgctccattggcttgcttcaagcgaatcgattctttgaaatttacatcggccttatccgtggctctggcggttgtgtttctcattattactgcgggaatttcaattatgaagttgatcagtggcggtgtggcgatgccaagattgttaccagatgttactgacttaacatctttctggaatctcttcacagttgtacctgttcttgtcacagcattcatttgccattacaatgttcacagcatacagaacgagctcgaagactcctctcagataagacctgttgttcgatcagcacttatgctctgctcatctgtttacataatgacaagtattttcgggttcctcttgtttggtgatgatactcttgatgatgtccttgcaaactttgacactgatcttggaatcccttttggttctatccttaatgatgcggttcgagttagctacgcgcttcatttgatgctcgtgttcccgattgttttctaccctcttcggattaacattgacgggctcttgttcccttccgctcgatcattatctacctcaaatgtgaggttcggttgcctcactgccggtcttatctctgtaatcttcttgggtgcaaacttcatcccaagcatttgggatgctttccaattcactggagcaaccgccgctgtctgtctcggcttcatcttcccagcttctattatactaaaggatcgtcatgacaaagcaacaaacagggacacaaccttagctattttcatgattgttcttgcggtattgtccaatgcaatcgccatttacagcgatgcttatgcactattcaagaagaacgcgcctcgtgagtagtcccgggaatgagaaaatgtgcagtttggtgtttctgtatgaagaaggaaaaaagcgtttgttttgtcttctatgtgaaatcaaataatgaagaagacaagacttctcttctcttatatgtttgtactattgtcgttgagtgttctaagcggacttttgcttcggggttatataccaccatgagtgttgtttgtaaaaaactctgtataaaaattgtaatgcagatacatattttgccttttcatgactctcttagctattgcttcataactatatacatatttaggcacaaagccacctagatttctcttagaaatgccatgttctaggcgtaaacatatactaatctgttgtatcattcatagtttataataaccaaaccaagcttttg

SEQ ID NO: 35208 - protein, 314 aa, Arabidopsis thaliana
  peptide (1)..(314): Ceres Seq. ID no. 12562140
  misc_feature (7)..(188): Homolog of NCBI NO: 24461850 NR Description: CTV.3 [Poncirus trifoliata]
  misc_feature (1)..(304): Homolog of NCBI NO: 25408697 NR Description: hypothetical protein At2g40420 [imported] -
  misc_feature (7)..(310): Homolog of NCBI NO: 18412864 NR Description: expressed protein
  misc_feature (1)..(304): Homolog of NCBI NO: 30688270 NR Description: amino acid transporter family [Arabidopsis
  misc_feature (1)..(270): Homolog of NCBI NO: 34907894 NR Description: P0439E11.11 [Oryza sativa (japonica
  misc_feature (1)..(306): Homolog of NCBI NO: 15228851 NR Description: putative protein
  misc_feature (1)..(312): Homolog of NCBI NO: 34898706 NR Description: hypothetical protein [Oryza sativa (japonica
  misc_feature (1)..(310): Homolog of NCBI NO: 15241555 NR Description: transporter -like protein; protein id:
  misc_feature (1)..(310): Homolog of NCBI NO: 9758059 NR Description: amino acid transporter-like protein [Arabidopsis
  misc_feature (1)..(314): Homolog of NCBI NO: 18406463 NR Description: expressed protein
  misc_feature (7)..(188): Homolog of NCBI NO: 24461850 NR Description: CTV.3 [Poncirus trifoliata]
  misc_feature (1)..(304): Homolog of NCBI NO: 25408697 NR Description: hypothetical protein At2g40420 [imported] -
  misc_feature (7)..(310): Homolog of NCBI NO: 18412864 NR Description: expressed protein
  misc_feature (1)..(304): Homolog of NCBI NO: 30688270 NR Description: amino acid transporter family [Arabidopsis
  misc_feature (1)..(270): Homolog of NCBI NO: 34907894 NR Description: P0439E11.11 [Oryza sativa (japonica
  misc_feature (1)..(306): Homolog of NCBI NO: 15228851 NR Description: putative protein
  misc_feature (1)..(312): Homolog of NCBI NO: 34898706 NR Description: hypothetical protein [Oryza sativa (japonica
  misc_feature (1)..(310): Homolog of NCBI NO: 15241555 NR Description: transporter -like protein; protein id:
  misc_feature (1)..(310): Homolog of NCBI NO: 9758059 NR Description: amino acid transporter-like protein [Arabidopsis
  misc_feature (1)..(314): Homolog of NCBI NO: 18406463 NR Description: expressed protein
  misc_feature (37)..(37): Xaa is any aa, unknown or other
GKTEDGIHHFGVLEGWFGHHWWNGRAAILLITTLGVXAPLACFKRIDSLKFTSALSVALAVVFLIITAGISIMKLISGGVAMPRLLPDVTDLTSFWNLFTVVPVLVTAFICHYNVHSIQNELEDSSQIRPVVRSALMLCSSVYIMTSIFGFLLFGDDTLDDVLANFDTDLGIPFGSILNDAVRVSYALHLMLVFPIVFYPLRINIDGLLFPSARSLSTSNVRFGCLTAGLISVIFLGANFIPSIWDAFQFTGATAAVCLGFIFPASIILKDRHDKATNRDTTLAIFMIVLAVLSNAIAIYSDAYALFKKNAPRE

SEQ ID NO: 35209 - protein, 242 aa, Arabidopsis thaliana
  peptide (1)..(242): Ceres Seq. ID no. 12562141
  misc_feature (1)..(116): Homolog of NCBI NO: 24461850 NR Description: CTV.3 [Poncirus trifoliata]
  misc_feature (1)..(232): Homolog of NCBI NO: 25408697 NR Description: hypothetical protein At2g40420 [imported] -
  misc_feature (1)..(238): Homolog of NCBI NO: 18412864 NR Description: expressed protein
  misc_feature (1)..(232): Homolog of NCBI NO: 30688270 NR Description: amino acid transporter family [Arabidopsis
  misc_feature (1)..(198): Homolog of NCBI NO: 34907894 NR Description: P0439E11.11 [Oryza sativa (japonica
  misc_feature (1)..(234): Homolog of NCBI NO: 15228851 NR Description: putative protein
  misc_feature (1)..(240): Homolog of NCBI NO: 34898706 NR Description: hypothetical protein [Oryza sativa (japonica
  misc_feature (1)..(238): Homolog of NCBI NO: 15241555 NR Description: transporter -like protein; protein id:
  misc_feature (1)..(238): Homolog of NCBI NO: 9758059 NR Description: amino acid transporter-like protein [Arabidopsis
  misc_feature (1)..(242): Homolog of NCBI NO: 18406463 NR Description: expressed protein
  misc_feature (1)..(116): Homolog of NCBI NO: 24461850 NR Description: CTV.3 [Poncirus trifoliata]
  misc_feature (1)..(232): Homolog of NCBI NO: 25408697 NR Description: hypothetical protein At2g40420 [imported] -
  misc_feature (1)..(238): Homolog of NCBI NO: 18412864 NR Description: expressed protein
  misc_feature (1)..(232): Homolog of NCBI NO: 30688270 NR Description: amino acid transporter family [Arabidopsis
  misc_feature (1)..(198): Homolog of NCBI NO: 34907894 NR Description: P0439E11.11 [Oryza sativa (japonica
  misc_feature (1)..(234): Homolog of NCBI NO: 15228851 NR Description: putative protein
  misc_feature (1)..(240): Homolog of NCBI NO: 34898706 NR Description: hypothetical protein [Oryza sativa (japonica
  misc_feature (1)..(238): Homolog of NCBI NO: 15241555 NR Description: transporter -like protein; protein id:
  misc_feature (1)..(238): Homolog of NCBI NO: 9758059 NR Description: amino acid transporter-like protein [Arabidopsis
  misc_feature (1)..(242): Homolog of NCBI NO: 18406463 NR Description: expressed protein
MKLISGGVAMPRLLPDVTDLTSFWNLFTVVPVLVTAFICHYNVHSIQNELEDSSQIRPVVRSALMLCSSVYIMTSIFGFLLFGDDTLDDVLANFDTDLGIPFGSILNDAVRVSYALHLMLVFPIVFYPLRINIDGLLFPSARSLSTSNVRFGCLTAGLISVIFLGANFIPSIWDAFQFTGATAAVCLGFIFPASIILKDRHDKATNRDTTLAIFMIVLAVLSNAIAIYSDAYALFKKNAPRE

SEQ ID NO: 35210 - protein, 233 aa, Arabidopsis thaliana
  peptide (1)..(233): Ceres Seq. ID no. 12562142
  misc_feature (1)..(107): Homolog of NCBI NO: 24461850 NR Description: CTV.3 [Poncirus trifoliata]
  misc_feature (1)..(223): Homolog of NCBI NO: 25408697 NR Description: hypothetical protein At2g40420 [imported] -
  misc_feature (1)..(229): Homolog of NCBI NO: 18412864 NR Description: expressed protein
  misc_feature (1)..(223): Homolog of NCBI NO: 30688270 NR Description: amino acid transporter family [Arabidopsis
  misc_feature (1)..(189): Homolog of NCBI NO: 34907894 NR Description: P0439E11.11 [Oryza sativa (japonica
  misc_feature (1)..(225): Homolog of NCBI NO: 15228851 NR Description: putative protein
  misc_feature (1)..(231): Homolog of NCBI NO: 34898706 NR Description: hypothetical protein [Oryza sativa (japonica
  misc_feature (1)..(229): Homolog of NCBI NO: 15241555 NR Description: transporter -like protein; protein id:
  misc_feature (1)..(229): Homolog of NCBI NO: 9758059 NR Description: amino acid transporter-like protein [Arabidopsis
  misc_feature (1)..(233): Homolog of NCBI NO: 18406463 NR Description: expressed protein
  misc_feature (1)..(107): Homolog of NCBI NO: 24461850 NR Description: CTV.3 [Poncirus trifoliata]
  misc_feature (1)..(223): Homolog of NCBI NO: 25408697 NR Description: hypothetical protein At2g40420 [imported] -
  misc_feature (1)..(229): Homolog of NCBI NO: 18412864 NR Description: expressed protein
  misc_feature (1)..(223): Homolog of NCBI NO: 30688270 NR Description: amino acid transporter family [Arabidopsis
  misc_feature (1)..(189): Homolog of NCBI NO: 34907894 NR Description: P0439E11.11 [Oryza sativa (japonica
  misc_feature (1)..(225): Homolog of NCBI NO: 15228851 NR Description: putative protein
  misc_feature (1)..(231): Homolog of NCBI NO: 34898706 NR Description: hypothetical protein [Oryza sativa (japonica
  misc_feature (1)..(229): Homolog of NCBI NO: 15241555 NR Description: transporter -like protein; protein id:
  misc_feature (1)..(229): Homolog of NCBI NO: 9758059 NR Description: amino acid transporter-like protein [Arabidopsis
  misc_feature (1)..(233): Homolog of NCBI NO: 18406463 NR Description: expressed protein
MPRLLPDVTDLTSFWNLFTVVPVLVTAFICHYNVHSIQNELEDSSQIRPVVRSALMLCSSVYIMTSIFGFLLFGDDTLDDVLANFDTDLGIPFGSILNDAVRVSYALHLMLVFPIVFYPLRINIDGLLFPSARSLSTSNVRFGCLTAGLISVIFLGANFIPSIWDAFQFTGATAAVCLGFIFPASIILKDRHDKATNRDTTLAIFMIVLAVLSNAIAIYSDAYALFKKNAPRE

SEQ ID NO: 35211 - DNA, 1174 bp, Arabidopsis thaliana
  misc_feature (1)..(1174): Ceres Seq. ID no. 13591839
  misc_feature: MA Experiment ID: 108595 Result: Down-regulated in Transcription
  misc_feature: MA Experiment 108595 PARAMETER Experiment Name: At_Ler-pi_Ovule_cDNA_P Parameter: Plant Line Value: null
  misc_feature: MA Experiment ID: 20000113 Result: Up-regulated in Transcription
  misc_feature: MA Experiment 20000113 PARAMETER Experiment Name: At_42deg_Heat_cDNA_P Parameter: Temperature (deg C) Value: 42 vs. 22
  misc_feature: MA Experiment 20000113 PARAMETER Experiment Name: At_42deg_Heat_cDNA_P Parameter: Timepoint (hr) Value: 8
  misc_feature: MA Experiment 20000113 PARAMETER Experiment Name: At_42deg_Heat_cDNA_P Parameter: Tissue Value: Aerial
  misc_feature: MA Experiment ID: 20000173 Result: Up-regulated in Transcription
  misc_feature: MA Experiment 20000173 PARAMETER Experiment Name: At_42deg_Heat_P Parameter: Age (day) Value: 14
  misc_feature: MA Experiment 20000173 PARAMETER Experiment Name: At_42deg_Heat_P Parameter: Organism Value: A. thaliana
  misc_feature: MA Experiment 20000173 PARAMETER Experiment Name: At_42deg_Heat_P Parameter: Plant Line Value: WS
  misc_feature: MA Experiment 20000173 PARAMETER Experiment Name: At_42deg_Heat_P Parameter: Temperature (deg C) Value: 42 vs. 22
  misc_feature: MA Experiment 20000173 PARAMETER Experiment Name: At_42deg_Heat_P Parameter: Timepoint (hr) Value: 6
  misc_feature: MA Experiment 20000173 PARAMETER Experiment Name: At_42deg_Heat_P Parameter: Tissue Value: Aerial
  misc_feature: MA Experiment ID: 20000437 Result: Down-regulated in Transcription
  misc_feature: MA Experiment 20000437 PARAMETER Experiment Name: At_Drought_P Parameter: Age (day) Value: 8
  misc_feature: MA Experiment 20000437 PARAMETER Experiment Name: At_Drought_P Parameter: Organism Value: A. thaliana
  misc_feature: MA Experiment 20000437 PARAMETER Experiment Name: At_Drought_P Parameter: Plant Line Value: WS
  misc_feature: MA Experiment 20000437 PARAMETER Experiment Name: At_Drought_P Parameter: Timepoint (hr) Value: 24
  misc_feature: MA Experiment 20000437 PARAMETER Experiment Name: At_Drought_P Parameter: Tissue Value: Whole Plant
  misc_feature: MA Experiment 20000437 PARAMETER Experiment Name: At_Drought_P Parameter: Treatment Value: Drought vs. No Drought
gtgagggtggttttatctctttggcccaaatttcggtgtaaccaaaaaaatcttcacacacatccttgaccattttcttgttcatcgctctctttcttcttcacaaatcctaaacgagtaggagctatggctgcaccgattgttgatgcggagtacttgaaagagatcactaaggctcgccgtgagctccgttctctcatcgcgaacaagaactgtgctcctatcatgctccgattggcatggcacgatgctggaacctatgatgctcaatcgaagaccggtggacctaatggctctatcaggaacgaagaagagcacactcatggtgccaacagtggtttgaagatcgctctcgatctctgtgagggcgtgaaagctaagcatcccaaaatcacatacgcagacctgtatcagcttgctggtgtggtagcagttgaggttactggtggacctgacatcgtgttcgttcccgggagaaaggattcaaatgtctgccccaaggaaggaagacttcctgatgccaaacaaggtttccaacatctcagagatgtcttctaccgcatgggactatctgataaggatattgtggcactctcagggggtcatactctgggaagggctcacccagagaggtcaggctttgatggaccatggacccaagagccgctgaagtttgacaactcctacttcgtggaactgctgaaaggagaatcagagggcttgttgaaacttccaactgacaagaccttattggaagacccggagttccgtcgtcttgttgagctttatgcaaaggatgaagatgcattcttcagagactacgcggaatcgcacaagaaactctctgagcttggtttcaacccaaactcctcagcaggcaaagcagttgcagacagcacgattctggcacagagtgcgttcggggttgcagttgctgctgcggttgtggcatttggttacttttacgagatccggaagaggatgaagtaaacgaaataggaagtaaaacacgaagcaacgatgctcttatttgggtattaaagaaactattaatcgtctatcgaatctattttgctgctacaagattctaaactctttgaatccacgattctactgtttagtagtaaaaaagttaaaaagtcaatattttgggtccgtgattcatttttgcgat

SEQ ID NO: 35212 - protein, 287 aa, Arabidopsis thaliana
  peptide (1)..(287): Ceres Seq. ID no. 13591840
  misc_feature (17)..(224): Pfam Name: Peroxidase Pfam Description: Peroxidase
  misc_feature (17)..(224): Pfam Name: Peroxidase Pfam Description: Peroxidase
  misc_feature (2)..(286): Homolog of NCBI NO: 37030052 NR Description: putative peroxisome-bound ascorbate peroxidase
  misc_feature (2)..(286): Homolog of NCBI NO: 38344123 NR Description: OSJNBb0072N21.2 [Oryza sativa (japonica
  misc_feature (4)..(287): Homolog of NCBI NO: 4835909 NR Description: cytosolic ascorbate peroxidase [Mesembryanthemum
  misc_feature (1)..(287): Homolog of NCBI NO: 15080682 NR Description: peroxisome type ascorbate peroxidase
  misc_feature (1)..(287): Homolog of NCBI NO: 5442410 NR Description: ascorbate peroxidase [Zantedeschia aethiopica]
  misc_feature (2)..(286): Homolog of NCBI NO: 37030052 NR Description: putative peroxisome-bound ascorbate peroxidase
  misc_feature (4)..(287): Homolog of NCBI NO: 4835909 NR Description: cytosolic ascorbate peroxidase [Mesembryanthemum
  misc_feature (1)..(287): Homolog of NCBI NO: 5442410 NR Description: ascorbate peroxidase [Zantedeschia aethiopica]
  misc_feature (1)..(287): Homolog of NCBI NO: 15236239 NR Description: ascorbate peroxidase, putative (APX) [Arabidopsis
  misc_feature (1)..(287): Homolog of NCBI NO: 3288066 NR Description: ascorbate peroxidase [Arabidopsis thaliana]
  misc_feature (1)..(287): Homolog of NCBI NO: 7484726 NR Description: L-ascorbate peroxidase (EC 1.11.1.11),
  misc_feature (1)..(287): Homolog of NCBI NO: 17066705 NR Description: ascorbate peroxidase [Capsicum annuum]
  misc_feature (1)..(287): Homolog of NCBI NO: 15430584 NR Description: peroxisomal ascorbate peroxidase [Cucurbita cv.
  misc_feature (1)..(287): Homolog of NCBI NO: 15080682 NR Description: peroxisome type ascorbate peroxidase
  misc_feature (2)..(286): Homolog of NCBI NO: 38344123 NR Description: OSJNBb0072N21.2 [Oryza sativa (japonica
  misc_feature (1)..(287): Homolog of NCBI NO: 15430584 NR Description: peroxisomal ascorbate peroxidase [Cucurbita cv.
  misc_feature (1)..(287): Homolog of NCBI NO: 17066705 NR Description: ascorbate peroxidase [Capsicum annuum]
  misc_feature (1)..(287): Homolog of NCBI NO: 7484726 NR Description: L-ascorbate peroxidase (EC 1.11.1.11),
  misc_feature (1)..(287): Homolog of NCBI NO: 3288066 NR Description: ascorbate peroxidase [Arabidopsis thaliana]
  misc_feature (1)..(287): Homolog of NCBI NO: 15236239 NR Description: ascorbate peroxidase, putative (APX) [Arabidopsis
MAAPIVDAEYLKEITKARRELRSLIANKNCAPIMLRLAWHDAGTYDAQSKTGGPNGSIRNEEEHTHGANSGLKIALDLCEGVKAKHPKITYADLYQLAGVVAVEVTGGPDIVFVPGRKDSNVCPKEGRLPDAKQGFQHLRDVFYRMGLSDKDIVALSGGHTLGRAHPERSGFDGPWTQEPLKFDNSYFVELLKGESEGLLKLPTDKTLLEDPEFRRLVELYAKDEDAFFRDYAESHKKLSELGFNPNSSAGKAVADSTILAQSAFGVAVAAAVVAFGYFYEIRKRMK

SEQ ID NO: 35213 - protein, 254 aa, Arabidopsis thaliana
  peptide (1)..(254): Ceres Seq. ID no. 13591841
  misc_feature (1)..(191): Pfam Name: Peroxidase Pfam Description: Peroxidase
  misc_feature (1)..(191): Pfam Name: Peroxidase Pfam Description: Peroxidase
  misc_feature (1)..(253): Homolog of NCBI NO: 37030052 NR Description: putative peroxisome-bound ascorbate peroxidase
  misc_feature (1)..(253): Homolog of NCBI NO: 38344123 NR Description: OSJNBb0072N21.2 [Oryza sativa (japonica
  misc_feature (1)..(254): Homolog of NCBI NO: 4835909 NR Description: cytosolic ascorbate peroxidase [Mesembryanthemum
  misc_feature (1)..(254): Homolog of NCBI NO: 15080682 NR Description: peroxisome type ascorbate peroxidase
  misc_feature (1)..(254): Homolog of NCBI NO: 5442410 NR Description: ascorbate peroxidase [Zantedeschia aethiopica]
  misc_feature (1)..(253): Homolog of NCBI NO: 37030052 NR Description: putative peroxisome-bound ascorbate peroxidase
  misc_feature (1)..(254): Homolog of NCBI NO: 4835909 NR Description: cytosolic ascorbate peroxidase [Mesembryanthemum
  misc_feature (1)..(254): Homolog of NCBI NO: 5442410 NR Description: ascorbate peroxidase [Zantedeschia aethiopica]
  misc_feature (1)..(254): Homolog of NCBI NO: 15236239 NR Description: ascorbate peroxidase, putative (APX) [Arabidopsis
  misc_feature (1)..(254): Homolog of NCBI NO: 3288066 NR Description: ascorbate peroxidase [Arabidopsis thaliana]
  misc_feature (1)..(254): Homolog of NCBI NO: 7484726 NR Description: L-ascorbate peroxidase (EC 1.11.1.11),
  misc_feature (1)..(254): Homolog of NCBI NO: 17066705 NR Description: ascorbate peroxidase [Capsicum annuum]
  misc_feature (1)..(254): Homolog of NCBI NO: 15430584 NR Description: peroxisomal ascorbate peroxidase [Cucurbita cv.
  misc_feature (1)..(254): Homolog of NCBI NO: 15080682 NR Description: peroxisome type ascorbate peroxidase
  misc_feature (1)..(253): Homolog of NCBI NO: 38344123 NR Description: OSJNBb0072N21.2 [Oryza sativa (japonica
  misc_feature (1)..(254): Homolog of NCBI NO: 15430584 NR Description: peroxisomal ascorbate peroxidase [Cucurbita cv.
  misc_feature (1)..(254): Homolog of NCBI NO: 17066705 NR Description: ascorbate peroxidase [Capsicum annuum]
  misc_feature (1)..(254): Homolog of NCBI NO: 7484726 NR Description: L-ascorbate peroxidase (EC 1.11.1.11),
  misc_feature (1)..(254): Homolog of NCBI NO: 3288066 NR Description: ascorbate peroxidase [Arabidopsis thaliana]
  misc_feature (1)..(254): Homolog of NCBI NO: 15236239 NR Description: ascorbate peroxidase, putative (APX) [Arabidopsis
MLRLAWHDAGTYDAQSKTGGPNGSIRNEEEHTHGANSGLKIALDLCEGVKAKHPKITYADLYQLAGVVAVEVTGGPDIVFVPGRKDSNVCPKEGRLPDAKQGFQHLRDVFYRMGLSDKDIVALSGGHTLGRAHPERSGFDGPWTQEPLKFDNSYFVELLKGESEGLLKLPTDKTLLEDPEFRRLVELYAKDEDAFFRDYAESHKKLSELGFNPNSSAGKAVADSTILAQSAFGVAVAAAVVAFGYFYEIRKRMK

SEQ ID NO: 35214 - DNA, 941 bp, Arabidopsis thaliana
  misc_feature (1)..(941): Ceres Seq. ID no. 12322285
  misc_feature: MA Experiment ID: 108434 Result: Down-regulated in Transcription
  misc_feature: MA Experiment 108434 PARAMETER Experiment Name: At_Root_Tips_cDNA_P Parameter: Tissue Value: Root Tips
  misc_feature: MA Experiment ID: 108576 Result: Down-regulated in Transcription
  misc_feature: MA Experiment 108576 PARAMETER Experiment Name: At_42deg_Heat_cDNA_P Parameter: Temperature (deg C) Value: 42 vs. 22
  misc_feature: MA Experiment 108576 PARAMETER Experiment Name: At_42deg_Heat_cDNA_P Parameter: Timepoint (hr) Value: 1
  misc_feature: MA Experiment 108576 PARAMETER Experiment Name: At_42deg_Heat_cDNA_P Parameter: Tissue Value: Aerial
  misc_feature: MA Experiment ID: 20000069 Result: Up-regulated in Transcription
  misc_feature: MA Experiment 20000069 PARAMETER Experiment Name: At_100uM_ABA_Mutants_cDNA_P Parameter: Plant Line Value: CS23
  misc_feature: MA Experiment 20000069 PARAMETER Experiment Name: At_100uM_ABA_Mutants_cDNA_P Parameter: Timepoint (hr) Value: 6
  misc_feature: MA Experiment 20000069 PARAMETER Experiment Name: At_100uM_ABA_Mutants_cDNA_P Parameter: Tissue Value: Aerial
  misc_feature: MA Experiment 20000069 PARAMETER Experiment Name: At_100uM_ABA_Mutants_cDNA_P Parameter: Treatment Value: 100uM ABA vs. No Treatment
  misc_feature: MA Experiment ID: 20000070 Result: Up-regulated in Transcription
  misc_feature: MA Experiment 20000070 PARAMETER Experiment Name: At_100uM_ABA_Mutants_cDNA_P Parameter: Plant Line Value: CS24
  misc_feature: MA Experiment 20000070 PARAMETER Experiment Name: At_100uM_ABA_Mutants_cDNA_P Parameter: Timepoint (hr) Value: 6
  misc_feature: MA Experiment 20000070 PARAMETER Experiment Name: At_100uM_ABA_Mutants_cDNA_P Parameter: Tissue Value: Aerial
  misc_feature: MA Experiment 20000070 PARAMETER Experiment Name: At_100uM_ABA_Mutants_cDNA_P Parameter: Treatment Value: 100uM ABA vs. No Treatment
  misc_feature: MA Experiment ID: 20000111 Result: Down-regulated in Transcription
  misc_feature: MA Experiment 20000111 PARAMETER Experiment Name: At_42deg_Heat_cDNA_P Parameter: Temperature (deg C) Value: 42 vs. 22
  misc_feature: MA Experiment 20000111 PARAMETER Experiment Name: At_42deg_Heat_cDNA_P Parameter: Timepoint (hr) Value: 6
  misc_feature: MA Experiment 20000111 PARAMETER Experiment Name: At_42deg_Heat_cDNA_P Parameter: Tissue Value: Aerial
  misc_feature: MA Experiment ID: 20000113 Result: Down-regulated in Transcription
  misc_feature: MA Experiment 20000113 PARAMETER Experiment Name: At_42deg_Heat_cDNA_P Parameter: Temperature (deg C) Value: 42 vs. 22
  misc_feature: MA Experiment 20000113 PARAMETER Experiment Name: At_42deg_Heat_cDNA_P Parameter: Timepoint (hr) Value: 8
  misc_feature: MA Experiment 20000113 PARAMETER Experiment Name: At_42deg_Heat_cDNA_P Parameter: Tissue Value: Aerial
  misc_feature: MA Experiment ID: 20000234 Result: Up-regulated in Transcription
  misc_feature: MA Experiment 20000234 PARAMETER Experiment Name: At_Siliques_P Parameter: Age (day) Value: 21
  misc_feature: MA Experiment 20000234 PARAMETER Experiment Name: At_Siliques_P Parameter: Organism Value: A. thaliana
  misc_feature: MA Experiment 20000234 PARAMETER Experiment Name: At_Siliques_P Parameter: Plant Line Value: WS
  misc_feature: MA Experiment 20000234 PARAMETER Experiment Name: At_Siliques_P Parameter: Tissue Value: Less Than 5mm Siliques vs. Whole Plant
  misc_feature: MA Experiment ID: 20000264 Result: Up-regulated in Transcription
  misc_feature: MA Experiment 20000264 PARAMETER Experiment Name: At_Open_Flower_P Parameter: Age (day) Value: 21
  misc_feature: MA Experiment 20000264 PARAMETER Experiment Name: At_Open_Flower_P Parameter: Plant Line Value: WS
  misc_feature: MA Experiment 20000264 PARAMETER Experiment Name: At_Open_Flower_P Parameter: Tissue Value: Open Flower vs. Whole Plant
  misc_feature: MA Experiment ID: 20000265 Result: Up-regulated in Transcription
  misc_feature: MA Experiment 20000265 PARAMETER Experiment Name: At_Open_Flower_P Parameter: Age (day) Value: 21
  misc_feature: MA Experiment 20000265 PARAMETER Experiment Name: At_Open_Flower_P Parameter: Plant Line Value: WS
  misc_feature: MA Experiment 20000265 PARAMETER Experiment Name: At_Open_Flower_P Parameter: Tissue Value: Closed Flower vs. Whole Plant
  misc_feature: MA Experiment ID: 20000286 Result: Up-regulated in Transcription
  misc_feature: MA Experiment 20000286 PARAMETER Experiment Name: At_Open_Flower_P Parameter: Age (day) Value: 21
  misc_feature: MA Experiment 20000286 PARAMETER Experiment Name: At_Open_Flower_P Parameter: Plant Line Value: WS
  misc_feature: MA Experiment 20000286 PARAMETER Experiment Name: At_Open_Flower_P Parameter: Tissue Value: Half Open vs. Whole Plant
atagaatataaaagttgctaaatttgattaaagatatggacaaagttccaagattttttgtttgttaatcttaaaatgttttatgttattacttggttttggttttggtaggagttctcggtgatggatttatggctcgtgatttaactatagagaacacggcaggagcagatgcgcaccaagcggttgcgtttagatcagacagtgatttttcggtacttgaaaactgcgagtttcttgggaaccaagacactctttatgctcactctctccgtcagttctacaaacaatgtcgaatccaaggcaacgtagacttcatctttggtaactcagctgccgtattccaagattgtgatatcctaatcgcttcaaaacactccaaactcgagcaaggcggtgcaaacaacgcgatcacagcacacgggaggattgatgcgtcgcagtccacgggatttgtgtttttgaactgttcgattaacggaacagaggaatacatgaaggagtttcaagctaaccctgaaaggcataagaacttcttgggaagaccgtggaaggagttttcgaggacggtttttgtaaactgtaatcttgagtctttgattagtcctgatggatggatgccttggaacggggatttcgcattgaagactttgtattacggtgagtataagaatacgggtccgggatcggttagatcgagtagggttccatggagtagtgagataccagagaagcatgttgatgtttactctgttgccaattttattcaggctgatgagtgggcttccacgactgcttgatttttgttaaaggaaacatgaggttttaggattttgaaaagaagagaagagaagtcgtcattgtaactttattgtagtgtcaaatattagtgtggtttctttatcgctcattggggattcataatagattaataattgaag

SEQ ID NO: 35215 - protein, 222 aa, Arabidopsis thaliana
  peptide (1)..(222): Ceres Seq. ID no. 12322286
  misc_feature (1)..(215): Pfam Name: Pectinesterase Pfam Description: Pectinesterase
  misc_feature (1)..(221): Homolog of NCBI NO: 7447381 NR Description: pectinesterase (EC 3.1.1.11) PECS-c2 - sweet
  misc_feature (1)..(221): Homolog of NCBI NO: 6174914 NR Description: Pectinesterase 2.1 precursor (Pectin
  misc_feature (1)..(217): Homolog of NCBI NO: 38344075 NR Description: OSJNBa0006B20.19 [Oryza sativa (japonica
  misc_feature (1)..(217): Homolog of NCBI NO: 34907404 NR Description: putative pectin methylesterase
  misc_feature (1)..(222): Homolog of NCBI NO: 1552379 NR Description: pectin methylesterase [Silene latifolia subsp.
  misc_feature (1)..(222): Homolog of NCBI NO: 15242495 NR Description: pectin methylesterase - like protein
  misc_feature (1)..(222): Homolog of NCBI NO: 9759007 NR Description: pectin methylesterase-like protein [Arabidopsis
  misc_feature (1)..(222): Homolog of NCBI NO: 21554293 NR Description: pectin methylesterase-like protein [Arabidopsis
  misc_feature (1)..(222): Homolog of NCBI NO: 22328058 NR Description: pectinesterase family; protein id: At5g64640.1
  misc_feature (1)..(222): Homolog of NCBI NO: 22135882 NR Description: pectin methylesterase-like protein [Arabidopsis
MARDLTIENTAGADAHQAVAFRSDSDFSVLENCEFLGNQDTLYAHSLRQFYKQCRIQGNVDFIFGNSAAVFQDCDILIASKHSKLEQGGANNAITAHGRIDASQSTGFVFLNCSINGTEEYMKEFQANPERHKNFLGRPWKEFSRTVFVNCNLESLISPDGWMPWNGDFALKTLYYGEYKNTGPGSVRSSRVPWSSEIPEKHVDVYSVANFIQADEWASTTA

SEQ ID NO: 35216 - DNA, 785 bp, Arabidopsis thaliana
  misc_feature (1)..(785): Ceres Seq. ID no. 12325167
  misc_feature: MA Experiment ID: 108434 Result: Up-regulated in Transcription
  misc_feature: MA Experiment 108434 PARAMETER Experiment Name: At_Root_Tips_cDNA_P Parameter: Tissue Value: Root Tips
  misc_feature: MA Experiment ID: 108463 Result: Down-regulated in Transcription
  misc_feature: MA Experiment 108463 PARAMETER Experiment Name: At_Germinating_Seeds_cDNA_P Parameter: Age (day) Value: 3 vs. 0
  misc_feature: MA Experiment 108463 PARAMETER Experiment Name: At_Germinating_Seeds_cDNA_P Parameter: Tissue Value: Germinating Seeds
  misc_feature: MA Experiment ID: 108573 Result: Down-regulated in Transcription
  misc_feature: MA Experiment 108573 PARAMETER Experiment Name: At_Drought_cDNA_P Parameter: Timepoint (hr) Value: 6
  misc_feature: MA Experiment 108573 PARAMETER Experiment Name: At_Drought_cDNA_P Parameter: Tissue Value: Aerial
  misc_feature: MA Experiment 108573 PARAMETER Experiment Name: At_Drought_cDNA_P Parameter: Treatment Value: Drought vs. No Drought
  misc_feature: MA Experiment ID: 108577 Result: Down-regulated in Transcription
  misc_feature: MA Experiment 108577 PARAMETER Experiment Name: At_42deg_Heat_cDNA_P Parameter: Temperature (deg C) Value: 42 vs. 22
  misc_feature: MA Experiment 108577 PARAMETER Experiment Name: At_42deg_Heat_cDNA_P Parameter: Timepoint (hr) Value: 6
  misc_feature: MA Experiment 108577 PARAMETER Experiment Name: At_42deg_Heat_cDNA_P Parameter: Tissue Value: Aerial
gagaagaagaatggtgacaagaatggcgacgaaggtgagtttggaagggaagagagtggttttggtaccgtacatggcggaacatgtaccaaagtaccatcaatggatgcaagattcggctcttcttgaagctacgggatctgagccgttgagtcttgagcaagagtatgagatgcagctttcttggactcaagatcccaataagcggactttcattgtcttggacaaggatttcgttaagggagacctggctcatggccaacctcatgtagaagcaatgacaggtgatgtgaacatttacatgaatgatgtggatgatccaaaggttgcagaagttgaaataatgatagctgagcccagaagccgtggtaaaggactaggaaaggaatctgtgttgataatgatggcttatggtgtcaagaacttggagattcacaagtttacagccaaaattggggaatcaaacacagcttccctcagcttattccgcaaactaggtttcgaggagtcttcttacagcggtatcttcaaagaggttacactcgagtatccggtgactaatctccgtcgagaagagctcttgaagttattggatgaagtcattaggcacactcattcatcgaacaacccatcagactcactgctatcaggagaagctactgcataaagcattttcttcagtgtttattgttatttttctcttcaacttaggaaagaatttgaaatcattgtagcatgtatgagtttataaattatgattactaatatacatggtccattgtttc

SEQ ID NO: 35217 - protein, 221 aa, Arabidopsis thaliana
  peptide (1)..(221): Ceres Seq. ID no. 12325168
  misc_feature (89)..(168): Pfam Name: Acetyltransferase (GNAT) family Pfam Description: Acetyltransferase (GNAT) family
  misc_feature (16)..(186): Homolog of NCBI NO: 24651688 NR Description: CG11539-PA [Drosophila melanogaster]
  misc_feature (7)..(184): Homolog of NCBI NO: 39584036 NR Description: Hypothetical protein CBG11716 [Caenorhabditis
  misc_feature (14)..(195): Homolog of NCBI NO: 34875069 NR Description: similar to RIKEN cDNA 1110028N05 [Rattus
  misc_feature (14)..(195): Homolog of NCBI NO: 13384782 NR Description: RIKEN cDNA 1110028N05 [Mus musculus]
  misc_feature (7)..(200): Homolog of NCBI NO: 31542521 NR Description: DKFZP564C103 protein [Homo sapiens]
  misc_feature (7)..(200): Homolog of NCBI NO: 7512719 NR Description: hypothetical protein DKFZp564C103.1 - human
  misc_feature (7)..(200): Homolog of NCBI NO: 13278945 NR Description: DKFZP564C103 protein [Homo sapiens]
  misc_feature (16)..(178): Homolog of NCBI NO: 24414273 NR Description: Unknown protein [Oryza sativa (japonica
  misc_feature (8)..(221): Homolog of NCBI NO: 21554294 NR Description: unknown [Arabidopsis thaliana]
  misc_feature (4)..(221): Homolog of NCBI NO: 18395874 NR Description: Expressed protein
RRRMVTRMATKVSLEGKRVVLVPYMAEHVPKYHQWMQDSALLEATGSEPLSLEQEYEMQLSWTQDPNKRTFIVLDKDFVKGDLAHGQPHVEAMTGDVNIYMNDVDDPKVAEVEIMIAEPRSRGKGLGKESVLIMMAYGVKNLEIHKFTAKIGESNTASLSLFRKLGFEESSYSGIFKEVTLEYPVTNLRREELLKLLDEVIRHTHSSNNPSDSLLSGEATA

SEQ ID NO: 35218 - protein, 218 aa, Arabidopsis thaliana
  peptide (1)..(218): Ceres Seq. ID no. 12325169
  misc_feature (86)..(165): Pfam Name: Acetyltransferase (GNAT) family Pfam Description: Acetyltransferase (GNAT) family
  misc_feature (13)..(183): Homolog of NCBI NO: 24651688 NR Description: CG11539-PA [Drosophila melanogaster]
  misc_feature (4)..(181): Homolog of NCBI NO: 39584036 NR Description: Hypothetical protein CBG11716 [Caenorhabditis
  misc_feature (11)..(192): Homolog of NCBI NO: 34875069 NR Description: similar to RIKEN cDNA 1110028N05 [Rattus
  misc_feature (11)..(192): Homolog of NCBI NO: 13384782 NR Description: RIKEN cDNA 1110028N05 [Mus musculus]
  misc_feature (4)..(197): Homolog of NCBI NO: 31542521 NR Description: DKFZP564C103 protein [Homo sapiens]
  misc_feature (4)..(197): Homolog of NCBI NO: 7512719 NR Description: hypothetical protein DKFZp564C103.1 - human
  misc_feature (4)..(197): Homolog of NCBI NO: 13278945 NR Description: DKFZP564C103 protein [Homo sapiens]
  misc_feature (13)..(175): Homolog of NCBI NO: 24414273 NR Description: Unknown protein [Oryza sativa (japonica
  misc_feature (5)..(218): Homolog of NCBI NO: 21554294 NR Description: unknown [Arabidopsis thaliana]
  misc_feature (1)..(218): Homolog of NCBI NO: 18395874 NR Description: Expressed protein
MVTRMATKVSLEGKRVVLVPYMAEHVPKYHQWMQDSALLEATGSEPLSLEQEYEMQLSWTQDPNKRTFIVLDKDFVKGDLAHGQPHVEAMTGDVNIYMNDVDDPKVAEVEIMIAEPRSRGKGLGKESVLIMMAYGVKNLEIHKFTAKIGESNTASLSLFRKLGFEESSYSGIFKEVTLEYPVTNLRREELLKLLDEVIRHTHSSNNPSDSLLSGEATA

SEQ ID NO: 35219 - protein, 214 aa, Arabidopsis thaliana
  peptide (1)..(214): Ceres Seq. ID no. 12325170
  misc_feature (82)..(161): Pfam Name: Acetyltransferase (GNAT) family Pfam Description: Acetyltransferase (GNAT) family
  misc_feature (9)..(179): Homolog of NCBI NO: 24651688 NR Description: CG11539-PA [Drosophila melanogaster]
  misc_feature (1)..(177): Homolog of NCBI NO: 39584036 NR Description: Hypothetical protein CBG11716 [Caenorhabditis
  misc_feature (7)..(188): Homolog of NCBI NO: 34875069 NR Description: similar to RIKEN cDNA 1110028N05 [Rattus
  misc_feature (7)..(188): Homolog of NCBI NO: 13384782 NR Description: RIKEN cDNA 1110028N05 [Mus musculus]
  misc_feature (1)..(193): Homolog of NCBI NO: 31542521 NR Description: DKFZP564C103 protein [Homo sapiens]
  misc_feature (1)..(193): Homolog of NCBI NO: 7512719 NR Description: hypothetical protein DKFZp564C103.1 - human
  misc_feature (1)..(193): Homolog of NCBI NO: 13278945 NR Description: DKFZP564C103 protein [Homo sapiens]
  misc_feature (9)..(171): Homolog of NCBI NO: 24414273 NR Description: Unknown protein [Oryza sativa (japonica
  misc_feature (1)..(214): Homolog of NCBI NO: 21554294 NR Description: unknown [Arabidopsis thaliana]
  misc_feature (1)..(214): Homolog of NCBI NO: 18395874 NR Description: Expressed protein
MATKVSLEGKRVVLVPYMAEHVPKYHQWMQDSALLEATGSEPLSLEQEYEMQLSWTQDPNKRTFIVLDKDFVKGDLAHGQPHVEAMTGDVNIYMNDVDDPKVAEVEIMIAEPRSRGKGLGKESVLIMMAYGVKNLEIHKFTAKIGESNTASLSLFRKLGFEESSYSGIFKEVTLEYPVTNLRREELLKLLDEVIRHTHSSNNPSDSLLSGEATA

SEQ ID NO: 35220 - DNA, 765 bp, Arabidopsis thaliana
  misc_feature (1)..(765): Ceres Seq. ID no. 12322107
  misc_feature: MA Experiment ID: 108461 Result: Up-regulated in Transcription
  misc_feature: MA Experiment 108461 PARAMETER Experiment Name: At_Germinating_Seeds_cDNA_P Parameter: Age (day) Value: 1 vs. 0
  misc_feature: MA Experiment 108461 PARAMETER Experiment Name: At_Germinating_Seeds_cDNA_P Parameter: Tissue Value: Germinating Seeds
  misc_feature: MA Experiment ID: 108462 Result: Up-regulated in Transcription
  misc_feature: MA Experiment 108462 PARAMETER Experiment Name: At_Germinating_Seeds_cDNA_P Parameter: Age (day) Value: 2 vs. 0
  misc_feature: MA Experiment 108462 PARAMETER Experiment Name: At_Germinating_Seeds_cDNA_P Parameter: Tissue Value: Germinating Seeds
  misc_feature: MA Experiment ID: 108464 Result: Up-regulated in Transcription
  misc_feature: MA Experiment 108464 PARAMETER Experiment Name: At_Germinating_Seeds_cDNA_P Parameter: Age (day) Value: 4 vs. 0
  misc_feature: MA Experiment 108464 PARAMETER Experiment Name: At_Germinating_Seeds_cDNA_P Parameter: Tissue Value: Germinating Seeds
  misc_feature: MA Experiment ID: 108561 Result: Down-regulated in Transcription
  misc_feature: MA Experiment 108561 PARAMETER Experiment Name: At_100uM_ABA_cDNA_P Parameter: Timepoint (hr) Value: 6
  misc_feature: MA Experiment 108561 PARAMETER Experiment Name: At_100uM_ABA_cDNA_P Parameter: Tissue Value: Aerial
  misc_feature: MA Experiment 108561 PARAMETER Experiment Name: At_100uM_ABA_cDNA_P Parameter: Treatment Value: 100uM ABA vs. No Treatment
  misc_feature: MA Experiment ID: 20000069 Result: Down-regulated in Transcription
  misc_feature: MA Experiment 20000069 PARAMETER Experiment Name: At_100uM_ABA_Mutants_cDNA_P Parameter: Plant Line Value: CS23
  misc_feature: MA Experiment 20000069 PARAMETER Experiment Name: At_100uM_ABA_Mutants_cDNA_P Parameter: Timepoint (hr) Value: 6
  misc_feature: MA Experiment 20000069 PARAMETER Experiment Name: At_100uM_ABA_Mutants_cDNA_P Parameter: Tissue Value: Aerial
  misc_feature: MA Experiment 20000069 PARAMETER Experiment Name: At_100uM_ABA_Mutants_cDNA_P Parameter: Treatment Value: 100uM ABA vs. No Treatment
  misc_feature: MA Experiment ID: 20000071 Result: Down-regulated in Transcription
  misc_feature: MA Experiment 20000071 PARAMETER Experiment Name: At_100uM_ABA_Mutants_cDNA_P Parameter: Plant Line Value: CS8104
  misc_feature: MA Experiment 20000071 PARAMETER Experiment Name: At_100uM_ABA_Mutants_cDNA_P Parameter: Timepoint (hr) Value: 6
  misc_feature: MA Experiment 20000071 PARAMETER Experiment Name: At_100uM_ABA_Mutants_cDNA_P Parameter: Tissue Value: Aerial
  misc_feature: MA Experiment 20000071 PARAMETER Experiment Name: At_100uM_ABA_Mutants_cDNA_P Parameter: Treatment Value: 100uM ABA vs. No Treatment
  misc_feature: MA Experiment ID: 20000117 Result: Down-regulated in Transcription
  misc_feature: MA Experiment 20000117 PARAMETER Experiment Name: At_100uM_ABA_Mutants_cDNA_P Parameter: Plant Line Value: Columbia
  misc_feature: MA Experiment 20000117 PARAMETER Experiment Name: At_100uM_ABA_Mutants_cDNA_P Parameter: Timepoint (hr) Value: 6
  misc_feature: MA Experiment 20000117 PARAMETER Experiment Name: At_100uM_ABA_Mutants_cDNA_P Parameter: Tissue Value: Aerial
  misc_feature: MA Experiment 20000117 PARAMETER Experiment Name: At_100uM_ABA_Mutants_cDNA_P Parameter: Treatment Value: 100uM ABA vs. No Treatment
  misc_feature: MA Experiment ID: 20000180 Result: Up-regulated in Transcription
  misc_feature: MA Experiment 20000180 PARAMETER Experiment Name: At_Germinating_Seeds_P Parameter: Age (hr) Value: 24 vs. 0
  misc_feature: MA Experiment 20000180 PARAMETER Experiment Name: At_Germinating_Seeds_P Parameter: Tissue Value: Germinating Seeds
  misc_feature: MA Experiment ID: 20000185 Result: Up-regulated in Transcription
  misc_feature: MA Experiment 20000185 PARAMETER Experiment Name: At_Roots__P Parameter: Age (day) Value: 7 vs. 21
  misc_feature: MA Experiment 20000185 PARAMETER Experiment Name: At_Roots__P Parameter: Organism Value: A. thaliana
  misc_feature: MA Experiment 20000185 PARAMETER Experiment Name: At_Roots__P Parameter: Tissue Value: Roots vs. Whole Plant
  misc_feature: MA Experiment ID: 20000234 Result: Up-regulated in Transcription
  misc_feature: MA Experiment 20000234 PARAMETER Experiment Name: At_Siliques_P Parameter: Age (day) Value: 21
  misc_feature: MA Experiment 20000234 PARAMETER Experiment Name: At_Siliques_P Parameter: Organism Value: A. thaliana
  misc_feature: MA Experiment 20000234 PARAMETER Experiment Name: At_Siliques_P Parameter: Plant Line Value: WS
  misc_feature: MA Experiment 20000234 PARAMETER Experiment Name: At_Siliques_P Parameter: Tissue Value: Less Than 5mm Siliques vs. Whole Plant
  misc_feature: MA Experiment ID: 20000235 Result: Up-regulated in Transcription
  misc_feature: MA Experiment 20000235 PARAMETER Experiment Name: At_Siliques_P Parameter: Age (day) Value: 21
  misc_feature: MA Experiment 20000235 PARAMETER Experiment Name: At_Siliques_P Parameter: Organism Value: A. thaliana
  misc_feature: MA Experiment 20000235 PARAMETER Experiment Name: At_Siliques_P Parameter: Plant Line Value: WS
  misc_feature: MA Experiment 20000235 PARAMETER Experiment Name: At_Siliques_P Parameter: Tissue Value: 5-10mm Siliques vs. Whole Plant
  misc_feature: MA Experiment ID: 20000439 Result: Up-regulated in Transcription
  misc_feature: MA Experiment 20000439 PARAMETER Experiment Name: At_Roots__P Parameter: Age (day) Value: 14 vs. 21
  misc_feature: MA Experiment 20000439 PARAMETER Experiment Name: At_Roots__P Parameter: Organism Value: A. thaliana
  misc_feature: MA Experiment 20000439 PARAMETER Experiment Name: At_Roots__P Parameter: Tissue Value: Roots vs. Whole Plant
  misc_feature: MA Experiment ID: 20000452 Result: Up-regulated in Transcription
  misc_feature: MA Experiment 20000452 PARAMETER Experiment Name: At_CS6879_Shoots-Roots_P Parameter: Age (day) Value: 14
  misc_feature: MA Experiment 20000452 PARAMETER Experiment Name: At_CS6879_Shoots-Roots_P Parameter: Organism Value: A. thaliana
  misc_feature: MA Experiment 20000452 PARAMETER Experiment Name: At_CS6879_Shoots-Roots_P Parameter: Plant Line Value: CS6879 vs. WS
  misc_feature: MA Experiment 20000452 PARAMETER Experiment Name: At_CS6879_Shoots-Roots_P Parameter: Tissue Value: Shoots
  misc_feature: MA Experiment ID: 20000794 Result: Down-regulated in Transcription
  misc_feature: MA Experiment 20000794 PARAMETER Experiment Name: At_Petals_P Parameter: Age (day) Value: 23-25 days
  misc_feature: MA Experiment 20000794 PARAMETER Experiment Name: At_Petals_P Parameter: Plant Line Value: WS
  misc_feature: MA Experiment 20000794 PARAMETER Experiment Name: At_Petals_P Parameter: Tissue Value: Petals vs. Whole plant
  misc_feature: MA Experiment ID: 20001248 Result: Down-regulated in Transcription
  misc_feature: MA Experiment 20001248 PARAMETER Experiment Name: At_Far-red-induction_P Parameter: Age (day) Value: 7
  misc_feature: MA Experiment 20001248 PARAMETER Experiment Name: At_Far-red-induction_P Parameter: Light Value: Far-red vs. White
  misc_feature: MA Experiment 20001248 PARAMETER Experiment Name: At_Far-red-induction_P Parameter: Organism Value: A. thaliana
  misc_feature: MA Experiment 20001248 PARAMETER Experiment Name: At_Far-red-induction_P Parameter: Plant Line Value: Columbia
  misc_feature: MA Experiment 20001248 PARAMETER Experiment Name: At_Far-red-induction_P Parameter: Timepoint (hr) Value: 4
  misc_feature: MA Experiment 20001248 PARAMETER Experiment Name: At_Far-red-induction_P Parameter: Tissue Value: Whole Plant
  misc_feature: MA Experiment ID: 20001906 Result: Down-regulated in Transcription
  misc_feature: MA Experiment 20001906 PARAMETER Experiment Name: At_Drought_Reproduction_P Parameter: Age (day) Value: 35
  misc_feature: MA Experiment 20001906 PARAMETER Experiment Name: At_Drought_Reproduction_P Parameter: Organism Value: A. thaliana
  misc_feature: MA Experiment 20001906 PARAMETER Experiment Name: At_Drought_Reproduction_P Parameter: Plant Line Value: WS
  misc_feature: MA Experiment 20001906 PARAMETER Experiment Name: At_Drought_Reproduction_P Parameter: Timepoint (day) Value: 5
  misc_feature: MA Experiment 20001906 PARAMETER Experiment Name: At_Drought_Reproduction_P Parameter: Tissue Value: Siliques
  misc_feature: MA Experiment 20001906 PARAMETER Experiment Name: At_Drought_Reproduction_P Parameter: Treatment Value: Drought vs. No Drought
  misc_feature: MA Experiment ID: 20001911 Result: Down-regulated in Transcription
  misc_feature: MA Experiment 20001911 PARAMETER Experiment Name: At_Drought_Reproduction_P Parameter: Age (day) Value: 40
  misc_feature: MA Experiment 20001911 PARAMETER Experiment Name: At_Drought_Reproduction_P Parameter: Organism Value: A. thaliana
  misc_feature: MA Experiment 20001911 PARAMETER Experiment Name: At_Drought_Reproduction_P Parameter: Plant Line Value: WS
  misc_feature: MA Experiment 20001911 PARAMETER Experiment Name: At_Drought_Reproduction_P Parameter: Timepoint (day) Value: 10
  misc_feature: MA Experiment 20001911 PARAMETER Experiment Name: At_Drought_Reproduction_P Parameter: Tissue Value: Flowers
  misc_feature: MA Experiment 20001911 PARAMETER Experiment Name: At_Drought_Reproduction_P Parameter: Treatment Value: Drought vs. No Drought
atcttcgagggaaagagaaagatcacaagaaaaagctctctcagaataatcgcaatggcttcaaagctcgtgatcatcattgtgttcattctagatctcattgctgttggattagccattgctgccgaacaaagaagaagtgtcggtaaggttgttccggatggtgagaaggaatttgagcattgtgagtatggctcagacatagctacaagttatggagctggtgcatttgtgcttctcttcattagtcaagtcattattatggtggctagtcggtgtttctgctgcggcaaagctcttaaacccggtggttcaagagcttgtggcattatgctcttccttatttgctgggtgtttttcttgattgctgaggtatgtttctcgcgggatcaatcagaaacgcgtaccacactacgtacagaaggatgtggaacatcgaaaaccctcctagctgtgaagtgatccgtaaaggagtgtttgctgctggtgcttcctttgctctcttcactgctattgtctctcagttctattacatctcctattctcgtgcccgagacggttaccaaaccccacattactagtgagtagtgagatccagaacaagaaaagctaaaccctgaatgagtttgtccatttatccactcactgatcaataggatattaaaatttgatgatgttagtcattttgcttcttgcttgtatcacaattgtttttttttgttttcttgtgatgtataaaatcttattaatatagacagctattct

SEQ ID NO: 35221 - protein, 153 aa, Arabidopsis thaliana
  peptide (1)..(153): Ceres Seq. ID no. 12322108
  misc_feature (20)..(126): Homolog of NCBI NO: 18391509 NR Description: expressed protein
  misc_feature (19)..(126): Homolog of NCBI NO: 38344206 NR Description: OSJNBa0064G10.22 [Oryza sativa (japonica
  misc_feature (21)..(126): Homolog of NCBI NO: 22748411 NR Description: hypothetical protein [Oryza sativa (japonica
  misc_feature (19)..(126): Homolog of NCBI NO: 21554630 NR Description: unknown [Arabidopsis thaliana]
  misc_feature (19)..(126): Homolog of NCBI NO: 18407003 NR Description: Expressed protein
  misc_feature (19)..(126): Homolog of NCBI NO: 34394069 NR Description: unknown protein [Oryza sativa (japonica
  misc_feature (19)..(140): Homolog of NCBI NO: 18416991 NR Description: Expressed protein
  misc_feature (19)..(126): Homolog of NCBI NO: 38016521 NR Description: fiber protein Fb34 [Gossypium barbadense]
  misc_feature (19)..(126): Homolog of NCBI NO: 18400781 NR Description: expressed protein
  misc_feature (19)..(126): Homolog of NCBI NO: 18404242 NR Description: expressed protein
IFEGKRKITRKSSLRIIAMASKLVIIIVFILDLIAVGLAIAAEQRRSVGKVVPDGEKEFEHCEYGSDIATSYGAGAFVLLFISQVIIMVASRCFCCGKALKPGGSRACGIMLFLICWVFFLIAEVCFSRDQSETRTTLRTEGCGTSKTLLAVK

SEQ ID NO: 35222 - protein, 135 aa, Arabidopsis thaliana
  peptide (1)..(135): Ceres Seq. ID no. 12322109
  misc_feature (2)..(108): Homolog of NCBI NO: 18391509 NR Description: expressed protein
  misc_feature (1)..(108): Homolog of NCBI NO: 38344206 NR Description: OSJNBa0064G10.22 [Oryza sativa (japonica
  misc_feature (3)..(108): Homolog of NCBI NO: 22748411 NR Description: hypothetical protein [Oryza sativa (japonica
  misc_feature (1)..(108): Homolog of NCBI NO: 21554630 NR Description: unknown [Arabidopsis thaliana]
  misc_feature (1)..(108): Homolog of NCBI NO: 18407003 NR Description: Expressed protein
  misc_feature (1)..(108): Homolog of NCBI NO: 34394069 NR Description: unknown protein [Oryza sativa (japonica
  misc_feature (1)..(122): Homolog of NCBI NO: 18416991 NR Description: Expressed protein
  misc_feature (1)..(108): Homolog of NCBI NO: 38016521 NR Description: fiber protein Fb34 [Gossypium barbadense]
  misc_feature (1)..(108): Homolog of NCBI NO: 18400781 NR Description: expressed protein
  misc_feature (1)..(108): Homolog of NCBI NO: 18404242 NR Description: expressed protein
MASKLVIIIVFILDLIAVGLAIAAEQRRSVGKVVPDGEKEFEHCEYGSDIATSYGAGAFVLLFISQVIIMVASRCFCCGKALKPGGSRACGIMLFLICWVFFLIAEVCFSRDQSETRTTLRTEGCGTSKTLLAVK

SEQ ID NO: 35223 - DNA, 1377 bp, Arabidopsis thaliana
  misc_feature (1)..(1377): Ceres Seq. ID no. 13603958
  misc_feature: MA Experiment ID: 20000171 Result: Down-regulated in Transcription
  misc_feature: MA Experiment 20000171 PARAMETER Experiment Name: At_42deg_Heat_P Parameter: Age (day) Value: 14
  misc_feature: MA Experiment 20000171 PARAMETER Experiment Name: At_42deg_Heat_P Parameter: Organism Value: A. thaliana
  misc_feature: MA Experiment 20000171 PARAMETER Experiment Name: At_42deg_Heat_P Parameter: Plant Line Value: WS
  misc_feature: MA Experiment 20000171 PARAMETER Experiment Name: At_42deg_Heat_P Parameter: Temperature (deg C) Value: 42 vs. 22
  misc_feature: MA Experiment 20000171 PARAMETER Experiment Name: At_42deg_Heat_P Parameter: Timepoint (hr) Value: 1
  misc_feature: MA Experiment 20000171 PARAMETER Experiment Name: At_42deg_Heat_P Parameter: Tissue Value: Aerial
  misc_feature: MA Experiment ID: 20000173 Result: Down-regulated in Transcription
  misc_feature: MA Experiment 20000173 PARAMETER Experiment Name: At_42deg_Heat_P Parameter: Age (day) Value: 14
  misc_feature: MA Experiment 20000173 PARAMETER Experiment Name: At_42deg_Heat_P Parameter: Organism Value: A. thaliana
  misc_feature: MA Experiment 20000173 PARAMETER Experiment Name: At_42deg_Heat_P Parameter: Plant Line Value: WS
  misc_feature: MA Experiment 20000173 PARAMETER Experiment Name: At_42deg_Heat_P Parameter: Temperature (deg C) Value: 42 vs. 22
  misc_feature: MA Experiment 20000173 PARAMETER Experiment Name: At_42deg_Heat_P Parameter: Timepoint (hr) Value: 6
  misc_feature: MA Experiment 20000173 PARAMETER Experiment Name: At_42deg_Heat_P Parameter: Tissue Value: Aerial
  misc_feature: MA Experiment ID: 20000179 Result: Up-regulated in Transcription
  misc_feature: MA Experiment 20000179 PARAMETER Experiment Name: At_Germinating_Seeds_P Parameter: Age (hr) Value: 6 vs. 0
  misc_feature: MA Experiment 20000179 PARAMETER Experiment Name: At_Germinating_Seeds_P Parameter: Tissue Value: Germinating Seeds
  misc_feature: MA Experiment ID: 20000182 Result: Down-regulated in Transcription
  misc_feature: MA Experiment 20000182 PARAMETER Experiment Name: At_2mM_SA_P Parameter: Age (day) Value: 14
  misc_feature: MA Experiment 20000182 PARAMETER Experiment Name: At_2mM_SA_P Parameter: Organism Value: A. thaliana
  misc_feature: MA Experiment 20000182 PARAMETER Experiment Name: At_2mM_SA_P Parameter: Plant Line Value: WS
  misc_feature: MA Experiment 20000182 PARAMETER Experiment Name: At_2mM_SA_P Parameter: Timepoint (hr) Value: 6
  misc_feature: MA Experiment 20000182 PARAMETER Experiment Name: At_2mM_SA_P Parameter: Tissue Value: Aerial
  misc_feature: MA Experiment 20000182 PARAMETER Experiment Name: At_2mM_SA_P Parameter: Treatment Value: 2mM SA vs. No Treatment
  misc_feature: MA Experiment ID: 20000184 Result: Up-regulated in Transcription
  misc_feature: MA Experiment 20000184 PARAMETER Experiment Name: At_Shoots__P Parameter: Age (day) Value: 7
  misc_feature: MA Experiment 20000184 PARAMETER Experiment Name: At_Shoots__P Parameter: Tissue Value: Shoots vs. Whole Plant
  misc_feature: MA Experiment ID: 20000185 Result: Down-regulated in Transcription
  misc_feature: MA Experiment 20000185 PARAMETER Experiment Name: At_Roots__P Parameter: Age (day) Value: 7 vs. 21
  misc_feature: MA Experiment 20000185 PARAMETER Experiment Name: At_Roots__P Parameter: Organism Value: A. thaliana
  misc_feature: MA Experiment 20000185 PARAMETER Experiment Name: At_Roots__P Parameter: Tissue Value: Roots vs. Whole Plant
  misc_feature: MA Experiment ID: 20000234 Result: Up-regulated in Transcription
  misc_feature: MA Experiment 20000234 PARAMETER Experiment Name: At_Siliques_P Parameter: Age (day) Value: 21
  misc_feature: MA Experiment 20000234 PARAMETER Experiment Name: At_Siliques_P Parameter: Organism Value: A. thaliana
  misc_feature: MA Experiment 20000234 PARAMETER Experiment Name: At_Siliques_P Parameter: Plant Line Value: WS
  misc_feature: MA Experiment 20000234 PARAMETER Experiment Name: At_Siliques_P Parameter: Tissue Value: Less Than 5mm Siliques vs. Whole Plant
  misc_feature: MA Experiment ID: 20000264 Result: Up-regulated in Transcription
  misc_feature: MA Experiment 20000264 PARAMETER Experiment Name: At_Open_Flower_P Parameter: Age (day) Value: 21
  misc_feature: MA Experiment 20000264 PARAMETER Experiment Name: At_Open_Flower_P Parameter: Plant Line Value: WS
  misc_feature: MA Experiment 20000264 PARAMETER Experiment Name: At_Open_Flower_P Parameter: Tissue Value: Open Flower vs. Whole Plant
  misc_feature: MA Experiment ID: 20000265 Result: Up-regulated in Transcription
  misc_feature: MA Experiment 20000265 PARAMETER Experiment Name: At_Open_Flower_P Parameter: Age (day) Value: 21
  misc_feature: MA Experiment 20000265 PARAMETER Experiment Name: At_Open_Flower_P Parameter: Plant Line Value: WS
  misc_feature: MA Experiment 20000265 PARAMETER Experiment Name: At_Open_Flower_P Parameter: Tissue Value: Closed Flower vs. Whole Plant
  misc_feature: MA Experiment ID: 20000286 Result: Up-regulated in Transcription
  misc_feature: MA Experiment 20000286 PARAMETER Experiment Name: At_Open_Flower_P Parameter: Age (day) Value: 21
  misc_feature: MA Experiment 20000286 PARAMETER Experiment Name: At_Open_Flower_P Parameter: Plant Line Value: WS
  misc_feature: MA Experiment 20000286 PARAMETER Experiment Name: At_Open_Flower_P Parameter: Tissue Value: Half Open vs. Whole Plant
  misc_feature: MA Experiment ID: 20000436 Result: Down-regulated in Transcription
  misc_feature: MA Experiment 20000436 PARAMETER Experiment Name: At_Drought_P Parameter: Age (day) Value: 7
  misc_feature: MA Experiment 20000436 PARAMETER Experiment Name: At_Drought_P Parameter: Organism Value: A. thaliana
  misc_feature: MA Experiment 20000436 PARAMETER Experiment Name: At_Drought_P Parameter: Plant Line Value: WS
  misc_feature: MA Experiment 20000436 PARAMETER Experiment Name: At_Drought_P Parameter: Timepoint (hr) Value: 12
  misc_feature: MA Experiment 20000436 PARAMETER Experiment Name: At_Drought_P Parameter: Tissue Value: Whole Plant
  misc_feature: MA Experiment 20000436 PARAMETER Experiment Name: At_Drought_P Parameter: Treatment Value: Drought vs. No Drought
  misc_feature: MA Experiment ID: 20000437 Result: Down-regulated in Transcription
  misc_feature: MA Experiment 20000437 PARAMETER Experiment Name: At_Drought_P Parameter: Age (day) Value: 8
  misc_feature: MA Experiment 20000437 PARAMETER Experiment Name: At_Drought_P Parameter: Organism Value: A. thaliana
  misc_feature: MA Experiment 20000437 PARAMETER Experiment Name: At_Drought_P Parameter: Plant Line Value: WS
  misc_feature: MA Experiment 20000437 PARAMETER Experiment Name: At_Drought_P Parameter: Timepoint (hr) Value: 24
  misc_feature: MA Experiment 20000437 PARAMETER Experiment Name: At_Drought_P Parameter: Tissue Value: Whole Plant
  misc_feature: MA Experiment 20000437 PARAMETER Experiment Name: At_Drought_P Parameter: Treatment Value: Drought vs. No Drought
  misc_feature: MA Experiment ID: 20000438 Result: Up-regulated in Transcription
  misc_feature: MA Experiment 20000438 PARAMETER Experiment Name: At_Shoots__P Parameter: Age (day) Value: 14
  misc_feature: MA Experiment 20000438 PARAMETER Experiment Name: At_Shoots__P Parameter: Tissue Value: Shoots vs. Whole Plant
  misc_feature: MA Experiment ID: 20000439 Result: Down-regulated in Transcription
  misc_feature: MA Experiment 20000439 PARAMETER Experiment Name: At_Roots__P Parameter: Age (day) Value: 14 vs. 21
  misc_feature: MA Experiment 20000439 PARAMETER Experiment Name: At_Roots__P Parameter: Organism Value: A. thaliana
  misc_feature: MA Experiment 20000439 PARAMETER Experiment Name: At_Roots__P Parameter: Tissue Value: Roots vs. Whole Plant
  misc_feature: MA Experiment ID: 20000445 Result: Down-regulated in Transcription
  misc_feature: MA Experiment 20000445 PARAMETER Experiment Name: At_100uM_NAA__P Parameter: Age (day) Value: 14
  misc_feature: MA Experiment 20000445 PARAMETER Experiment Name: At_100uM_NAA__P Parameter: Organism Value: A. thaliana
  misc_feature: MA Experiment 20000445 PARAMETER Experiment Name: At_100uM_NAA__P Parameter: Plant Line Value: WS
  misc_feature: MA Experiment 20000445 PARAMETER Experiment Name: At_100uM_NAA__P Parameter: Timepoint (hr) Value: 6
  misc_feature: MA Experiment 20000445 PARAMETER Experiment Name: At_100uM_NAA__P Parameter: Tissue Value: Aerial
  misc_feature: MA Experiment 20000445 PARAMETER Experiment Name: At_100uM_NAA__P Parameter: Treatment Value: 100uM NAA vs. No Treatment
  misc_feature: MA Experiment ID: 20000451 Result: Up-regulated in Transcription
  misc_feature: MA Experiment 20000451 PARAMETER Experiment Name: At_CS6879_Shoots-Roots_P Parameter: Age (day) Value: 14
  misc_feature: MA Experiment 20000451 PARAMETER Experiment Name: At_CS6879_Shoots-Roots_P Parameter: Organism Value: A. thaliana
  misc_feature: MA Experiment 20000451 PARAMETER Experiment Name: At_CS6879_Shoots-Roots_P Parameter: Plant Line Value: CS6879 vs. WS
  misc_feature: MA Experiment 20000451 PARAMETER Experiment Name: At_CS6879_Shoots-Roots_P Parameter: Tissue Value: Roots
  misc_feature: MA Experiment ID: 20000453 Result: Down-regulated in Transcription
  misc_feature: MA Experiment 20000453 PARAMETER Experiment Name: At_100uM_ABA_P Parameter: Age (day) Value: 15
  misc_feature: MA Experiment 20000453 PARAMETER Experiment Name: At_100uM_ABA_P Parameter: Organism Value: A. thaliana
  misc_feature: MA Experiment 20000453 PARAMETER Experiment Name: At_100uM_ABA_P Parameter: Plant Line Value: WS
  misc_feature: MA Experiment 20000453 PARAMETER Experiment Name: At_100uM_ABA_P Parameter: Timepoint (hr) Value: 24
  misc_feature: MA Experiment 20000453 PARAMETER Experiment Name: At_100uM_ABA_P Parameter: Tissue Value: Aerial
  misc_feature: MA Experiment 20000453 PARAMETER Experiment Name: At_100uM_ABA_P Parameter: Treatment Value: 100uM ABA vs. No Treatment
  misc_feature: MA Experiment ID: 20000573 Result: Down-regulated in Transcription
  misc_feature: MA Experiment 20000573 PARAMETER Experiment Name: At_100uM_ABA_Mutants__P Parameter: Organism Value: A. thaliana
  misc_feature: MA Experiment 20000573 PARAMETER Experiment Name: At_100uM_ABA_Mutants__P Parameter: Plant Line Value: CS22 vs. Ler wt
  misc_feature: MA Experiment 20000573 PARAMETER Experiment Name: At_100uM_ABA_Mutants__P Parameter: Timepoint (hr) Value: N/A
  misc_feature: MA Experiment 20000573 PARAMETER Experiment Name: At_100uM_ABA_Mutants__P Parameter: Tissue Value: Whole Plant
  misc_feature: MA Experiment 20000573 PARAMETER Experiment Name: At_100uM_ABA_Mutants__P Parameter: Treatment Value: None
  misc_feature: MA Experiment ID: 20000574 Result: Down-regulated in Transcription
  misc_feature: MA Experiment 20000574 PARAMETER Experiment Name: At_100uM_ABA_Mutants__P Parameter: Organism Value: A. thaliana
  misc_feature: MA Experiment 20000574 PARAMETER Experiment Name: At_100uM_ABA_Mutants__P Parameter: Plant Line Value: CS23 vs. Ler wt
  misc_feature: MA Experiment 20000574 PARAMETER Experiment Name: At_100uM_ABA_Mutants__P Parameter: Timepoint (hr) Value: N/A
  misc_feature: MA Experiment 20000574 PARAMETER Experiment Name: At_100uM_ABA_Mutants__P Parameter: Tissue Value: Whole Plant
  misc_feature: MA Experiment 20000574 PARAMETER Experiment Name: At_100uM_ABA_Mutants__P Parameter: Treatment Value: None
  misc_feature: MA Experiment ID: 20000794 Result: Down-regulated in Transcription
  misc_feature: MA Experiment 20000794 PARAMETER Experiment Name: At_Petals_P Parameter: Age (day) Value: 23-25 days
  misc_feature: MA Experiment 20000794 PARAMETER Experiment Name: At_Petals_P Parameter: Plant Line Value: WS
  misc_feature: MA Experiment 20000794 PARAMETER Experiment Name: At_Petals_P Parameter: Tissue Value: Petals vs. Whole plant
  misc_feature: MA Experiment ID: 20001248 Result: Down-regulated in Transcription
  misc_feature: MA Experiment 20001248 PARAMETER Experiment Name: At_Far-red-induction_P Parameter: Age (day) Value: 7
  misc_feature: MA Experiment 20001248 PARAMETER Experiment Name: At_Far-red-induction_P Parameter: Light Value: Far-red vs. White
  misc_feature: MA Experiment 20001248 PARAMETER Experiment Name: At_Far-red-induction_P Parameter: Organism Value: A. thaliana
  misc_feature: MA Experiment 20001248 PARAMETER Experiment Name: At_Far-red-induction_P Parameter: Plant Line Value: Columbia
  misc_feature: MA Experiment 20001248 PARAMETER Experiment Name: At_Far-red-induction_P Parameter: Timepoint (hr) Value: 4
  misc_feature: MA Experiment 20001248 PARAMETER Experiment Name: At_Far-red-induction_P Parameter: Tissue Value: Whole Plant
  misc_feature: MA Experiment ID: 20001457 Result: Up-regulated in Transcription
  misc_feature: MA Experiment 20001457 PARAMETER Experiment Name: At_50mM_NH4NO3_L-to-H_P Parameter: Age (day) Value: Undefined
  misc_feature: MA Experiment 20001457 PARAMETER Experiment Name: At_50mM_NH4NO3_L-to-H_P Parameter: Organism Value: Undefined
  misc_feature: MA Experiment 20001457 PARAMETER Experiment Name: At_50mM_NH4NO3_L-to-H_P Parameter: Plant Line Value: Undefined
  misc_feature: MA Experiment 20001457 PARAMETER Experiment Name: At_50mM_NH4NO3_L-to-H_P Parameter: Timepoint (hr) Value: 0.5
  misc_feature: MA Experiment 20001457 PARAMETER Experiment Name: At_50mM_NH4NO3_L-to-H_P Parameter: Tissue Value: Siliques
  misc_feature: MA Experiment 20001457 PARAMETER Experiment Name: At_50mM_NH4NO3_L-to-H_P Parameter: Treatment Value: 50mM NH4NO3 vs. 100mM Manitol
  misc_feature: MA Experiment ID: 20001555 Result: Down-regulated in Transcription
  misc_feature: MA Experiment 20001555 PARAMETER Experiment Name: At_Drought_Soil_Dry_P Parameter: Age (day) Value: 24
  misc_feature: MA Experiment 20001555 PARAMETER Experiment Name: At_Drought_Soil_Dry_P Parameter: Organism Value: A. thaliana
  misc_feature: MA Experiment 20001555 PARAMETER Experiment Name: At_Drought_Soil_Dry_P Parameter: Plant Line Value: WS
  misc_feature: MA Experiment 20001555 PARAMETER Experiment Name: At_Drought_Soil_Dry_P Parameter: Post Timepoint (hr) Value: None
  misc_feature: MA Experiment 20001555 PARAMETER Experiment Name: At_Drought_Soil_Dry_P Parameter: Post-Treatment Value: None
  misc_feature: MA Experiment 20001555 PARAMETER Experiment Name: At_Drought_Soil_Dry_P Parameter: Timepoint (day) Value: 10
  misc_feature: MA Experiment 20001555 PARAMETER Experiment Name: At_Drought_Soil_Dry_P Parameter: Treatment Value: Drought vs. No Drought
  misc_feature: MA Experiment ID: 20001556 Result: Down-regulated in Transcription
  misc_feature: MA Experiment 20001556 PARAMETER Experiment Name: At_Drought_Soil_Dry_P Parameter: Age (day) Value: 26
  misc_feature: MA Experiment 20001556 PARAMETER Experiment Name: At_Drought_Soil_Dry_P Parameter: Organism Value: A. thaliana
  misc_feature: MA Experiment 20001556 PARAMETER Experiment Name: At_Drought_Soil_Dry_P Parameter: Plant Line Value: WS
  misc_feature: MA Experiment 20001556 PARAMETER Experiment Name: At_Drought_Soil_Dry_P Parameter: Post Timepoint (hr) Value: None
  misc_feature: MA Experiment 20001556 PARAMETER Experiment Name: At_Drought_Soil_Dry_P Parameter: Post-Treatment Value: None
  misc_feature: MA Experiment 20001556 PARAMETER Experiment Name: At_Drought_Soil_Dry_P Parameter: Timepoint (day) Value: 12
  misc_feature: MA Experiment 20001556 PARAMETER Experiment Name: At_Drought_Soil_Dry_P Parameter: Treatment Value: Drought vs. No Drought
  misc_feature: MA Experiment ID: 20001557 Result: Up-regulated in Transcription
  misc_feature: MA Experiment 20001557 PARAMETER Experiment Name: At_Drought_Soil_Dry_P Parameter: Age (day) Value: 27
  misc_feature: MA Experiment 20001557 PARAMETER Experiment Name: At_Drought_Soil_Dry_P Parameter: Organism Value: A. thaliana
  misc_feature: MA Experiment 20001557 PARAMETER Experiment Name: At_Drought_Soil_Dry_P Parameter: Plant Line Value: WS
  misc_feature: MA Experiment 20001557 PARAMETER Experiment Name: At_Drought_Soil_Dry_P Parameter: Post Timepoint (hr) Value: 3
  misc_feature: MA Experiment 20001557 PARAMETER Experiment Name: At_Drought_Soil_Dry_P Parameter: Post-Treatment Value: Re-Water vs. No Drought
  misc_feature: MA Experiment 20001557 PARAMETER Experiment Name: At_Drought_Soil_Dry_P Parameter: Timepoint (day) Value: 13
  misc_feature: MA Experiment 20001557 PARAMETER Experiment Name: At_Drought_Soil_Dry_P Parameter: Treatment Value: Drought vs. No Drought
  misc_feature: MA Experiment ID: 20001558 Result: Up-regulated in Transcription
  misc_feature: MA Experiment 20001558 PARAMETER Experiment Name: At_Drought_Soil_Dry_P Parameter: Age (day) Value: 27
  misc_feature: MA Experiment 20001558 PARAMETER Experiment Name: At_Drought_Soil_Dry_P Parameter: Organism Value: A. thaliana
  misc_feature: MA Experiment 20001558 PARAMETER Experiment Name: At_Drought_Soil_Dry_P Parameter: Plant Line Value: WS
  misc_feature: MA Experiment 20001558 PARAMETER Experiment Name: At_Drought_Soil_Dry_P Parameter: Post Timepoint (hr) Value: 6
  misc_feature: MA Experiment 20001558 PARAMETER Experiment Name: At_Drought_Soil_Dry_P Parameter: Post-Treatment Value: Re-Water vs. No Drought
  misc_feature: MA Experiment 20001558 PARAMETER Experiment Name: At_Drought_Soil_Dry_P Parameter: Timepoint (day) Value: 13
  misc_feature: MA Experiment 20001558 PARAMETER Experiment Name: At_Drought_Soil_Dry_P Parameter: Treatment Value: Drought vs. No Drought
  misc_feature: MA Experiment ID: 20001560 Result: Up-regulated in Transcription
  misc_feature: MA Experiment 20001560 PARAMETER Experiment Name: At_Drought_Soil_Dry_P Parameter: Age (day) Value: 28
  misc_feature: MA Experiment 20001560 PARAMETER Experiment Name: At_Drought_Soil_Dry_P Parameter: Organism Value: A. thaliana
  misc_feature: MA Experiment 20001560 PARAMETER Experiment Name: At_Drought_Soil_Dry_P Parameter: Plant Line Value: WS
  misc_feature: MA Experiment 20001560 PARAMETER Experiment Name: At_Drought_Soil_Dry_P Parameter: Post Timepoint (hr) Value: None
  misc_feature: MA Experiment 20001560 PARAMETER Experiment Name: At_Drought_Soil_Dry_P Parameter: Post-Treatment Value: None
  misc_feature: MA Experiment 20001560 PARAMETER Experiment Name: At_Drought_Soil_Dry_P Parameter: Timepoint (day) Value: 14
  misc_feature: MA Experiment 20001560 PARAMETER Experiment Name: At_Drought_Soil_Dry_P Parameter: Treatment Value: Drought vs. No Drought
  misc_feature: MA Experiment ID: 20001757 Result: Up-regulated in Transcription
  misc_feature: MA Experiment 20001757 PARAMETER Experiment Name: At_50mM_NH4NO3_L-to-H_P Parameter: Timepoint (hr) Value: 6
  misc_feature: MA Experiment 20001757 PARAMETER Experiment Name: At_50mM_NH4NO3_L-to-H_P Parameter: Tissue Value: Leaf
  misc_feature: MA Experiment 20001757 PARAMETER Experiment Name: At_50mM_NH4NO3_L-to-H_P Parameter: Treatment Value: 50mM NH4NO3 vs 100mM Mannitol
  misc_feature: MA Experiment ID: 20001911 Result: Down-regulated in Transcription
  misc_feature: MA Experiment 20001911 PARAMETER Experiment Name: At_Drought_Reproduction_P Parameter: Age (day) Value: 40
  misc_feature: MA Experiment 20001911 PARAMETER Experiment Name: At_Drought_Reproduction_P Parameter: Organism Value: A. thaliana
  misc_feature: MA Experiment 20001911 PARAMETER Experiment Name: At_Drought_Reproduction_P Parameter: Plant Line Value: WS
  misc_feature: MA Experiment 20001911 PARAMETER Experiment Name: At_Drought_Reproduction_P Parameter: Timepoint (day) Value: 10
  misc_feature: MA Experiment 20001911 PARAMETER Experiment Name: At_Drought_Reproduction_P Parameter: Tissue Value: Flowers
  misc_feature: MA Experiment 20001911 PARAMETER Experiment Name: At_Drought_Reproduction_P Parameter: Treatment Value: Drought vs. No Drought
attcttcaaaactatattatataaacacatttttcgtttcttcacattcacaaaacatctctctctttcttctcccattcactcactatcttgctcctagaaaaagatggcgagaatgagtttgatgatcatgatgattatggttgctgtgaccatgattaacattgctaagagtgatcccattgcaccatgttacttcatatttggtgactctttggttgataatggcaacaataatcagcttcagtcattagctagagctaattactttccttacggtattgactttgctgccggtccaaccggtcggtttagcaacggcttaaccactgtcgatgttatcgctcagcttttgggtttcgaggactacattacaccttacgcttctgcaagaggacaagacattctccgaggagttaactatgcttccgctgctgccggaatccgagacgaaaccggcagacaattgggaggtcgaatagcatttgcagggcaagtagcaaatcacgtgaacactgtgtcacaagtagtgaacatacttggtgatcaaaacgaagcctcgaattacctcagcaaatgcatttactctatcggattaggcagtaacgattatcttaacaactacttcatgcctactttttactctaccggtaaccagttctcccccgaatcctatgccgacgatctcgttgcccgttacaccgaacaactcagggtactgtataccaatggagcgaggaagtttgcgttgataggagtcggggcaatcggttgcagcccgaacgagctagctcaaaacagcagagacggaagaacgtgtgacgaaagaatcaactcagcgaacagaatctttaacagcaaactcatatctatagtcgacgcttttaaccagaacacaccagatgcaaaattcacttacatcaacgcttatggcatcttccaagacattattacaaaccctgctcgctacgggtttagagtgacaaatgcaggatgttgtggagttgggaggaacaatggacagataacttgtcttccaggtcaagcaccatgtctaaataggaatgagtatgtgttttgggatgcgtttcatcccggtgaagctgcgaatattgttattggaagacgatcttttaagcgagaagctgcttctgatgctcatccttatgatattcagcagctagcatctctctaaagagagaaagatcttttggttgtctaagtattttgatagttcttcaatggcagctgagttttggactcaagaagaagtgatttggtttgtgttgtgtgatgtcataactgtttatgtaatgatttggagttactgtttatctctttttctcttaacagttttataaatttgattctttcatt

SEQ ID NO: 35224 - protein, 362 aa, Arabidopsis thaliana; identical to SEQ ID NO: 30581
  peptide (1)..(362): Ceres Seq. ID no. 13603959
  misc_feature (30)..(342): Pfam Name: GDSL-like Lipase/Acylhydrolase Pfam Description: GDSL-like Lipase/Acylhydrolase
  misc_feature (5)..(338): Homolog of NCBI NO: 32489520 NR Description: OSJNBa0043L24.11 [Oryza sativa (japonica
  misc_feature (10)..(362): Homolog of NCBI NO: 21594055 NR Description: lipase/hydrolase, putative [Arabidopsis thaliana]
  misc_feature (10)..(362): Homolog of NCBI NO: 15220512 NR Description: GDSL-motif lipase/hydrolase protein [Arabidopsis
  misc_feature (1)..(362): Homolog of NCBI NO: 21592417 NR Description: lipase/hydrolase, putative [Arabidopsis thaliana]
  misc_feature (1)..(362): Homolog of NCBI NO: 15220514 NR Description: GDSL-motif lipase/hydrolase protein [Arabidopsis
  misc_feature (1)..(362): Homolog of NCBI NO: 21618199 NR Description: GDSL-motif lipase/hydrolase-like protein
  misc_feature (1)..(362): Homolog of NCBI NO: 18415211 NR Description: GDSL-motif lipase/hydrolase protein [Arabidopsis
  misc_feature (1)..(362): Homolog of NCBI NO: 7485419 NR Description: hypothetical protein F13C5.140 - Arabidopsis
  misc_feature (1)..(362): Homolog of NCBI NO: 21553940 NR Description: GDSL-motif lipase/hydrolase-like protein
  misc_feature (1)..(362): Homolog of NCBI NO: 15242458 NR Description: GDSL-motif lipase/hydrolase protein [Arabidopsis

SEQ ID NO: 35225 - protein, 359 aa, Arabidopsis thaliana; identical to SEQ ID NO: 30582
  peptide (1)..(359): Ceres Seq. ID no. 13603960
  misc_feature (27)..(339): Pfam Name: GDSL-like Lipase/Acylhydrolase Pfam Description: GDSL-like Lipase/Acylhydrolase
  misc_feature (2)..(335): Homolog of NCBI NO: 32489520 NR Description: OSJNBa0043L24.11 [Oryza sativa (japonica
  misc_feature (7)..(359): Homolog of NCBI NO: 21594055 NR Description: lipase/hydrolase, putative [Arabidopsis thaliana]
  misc_feature (7)..(359): Homolog of NCBI NO: 15220512 NR Description: GDSL-motif lipase/hydrolase protein [Arabidopsis
  misc_feature (1)..(359): Homolog of NCBI NO: 21592417 NR Description: lipase/hydrolase, putative [Arabidopsis thaliana]
  misc_feature (1)..(359): Homolog of NCBI NO: 15220514 NR Description: GDSL-motif lipase/hydrolase protein [Arabidopsis
  misc_feature (1)..(359): Homolog of NCBI NO: 21618199 NR Description: GDSL-motif lipase/hydrolase-like protein
  misc_feature (1)..(359): Homolog of NCBI NO: 18415211 NR Description: GDSL-motif lipase/hydrolase protein [Arabidopsis
  misc_feature (1)..(359): Homolog of NCBI NO: 7485419 NR Description: hypothetical protein F13C5.140 - Arabidopsis
  misc_feature (1)..(359): Homolog of NCBI NO: 21553940 NR Description: GDSL-motif lipase/hydrolase-like protein
  misc_feature (1)..(359): Homolog of NCBI NO: 15242458 NR Description: GDSL-motif lipase/hydrolase protein [Arabidopsis

SEQ ID NO: 35226 - protein, 356 aa, Arabidopsis thaliana; identical to SEQ ID NO: 30583
  peptide (1)..(356): Ceres Seq. ID no. 13603961
  misc_feature (24)..(336): Pfam Name: GDSL-like Lipase/Acylhydrolase Pfam Description: GDSL-like Lipase/Acylhydrolase
  misc_feature (1)..(332): Homolog of NCBI NO: 32489520 NR Description: OSJNBa0043L24.11 [Oryza sativa (japonica
  misc_feature (4)..(356): Homolog of NCBI NO: 21594055 NR Description: lipase/hydrolase, putative [Arabidopsis thaliana]
  misc_feature (4)..(356): Homolog of NCBI NO: 15220512 NR Description: GDSL-motif lipase/hydrolase protein [Arabidopsis
  misc_feature (1)..(356): Homolog of NCBI NO: 21592417 NR Description: lipase/hydrolase, putative [Arabidopsis thaliana]
  misc_feature (1)..(356): Homolog of NCBI NO: 15220514 NR Description: GDSL-motif lipase/hydrolase protein [Arabidopsis
  misc_feature (1)..(356): Homolog of NCBI NO: 21618199 NR Description: GDSL-motif lipase/hydrolase-like protein
  misc_feature (1)..(356): Homolog of NCBI NO: 18415211 NR Description: GDSL-motif lipase/hydrolase protein [Arabidopsis
  misc_feature (1)..(356): Homolog of NCBI NO: 7485419 NR Description: hypothetical protein F13C5.140 - Arabidopsis
  misc_feature (1)..(356): Homolog of NCBI NO: 21553940 NR Description: GDSL-motif lipase/hydrolase-like protein
  misc_feature (1)..(356): Homolog of NCBI NO: 15242458 NR Description: GDSL-motif lipase/hydrolase protein [Arabidopsis

SEQ ID NO: 35227 - DNA, 1244 bp, Arabidopsis thaliana
  misc_feature (1)..(1244): Ceres Seq. ID no. 13488403
  misc_feature: MA Experiment ID: 108435 Result: Down-regulated in Transcription
  misc_feature: MA Experiment 108435 PARAMETER Experiment Name: At_stm_Mutants_cDNA_P Parameter: Plant Line Value: wt Landsburg vs stm
  misc_feature: MA Experiment 108435 PARAMETER Experiment Name: At_stm_Mutants_cDNA_P Parameter: Tissue Value: Shoot Apical Meristem Region
  misc_feature: MA Experiment ID: 108464 Result: Up-regulated in Transcription
  misc_feature: MA Experiment 108464 PARAMETER Experiment Name: At_Germinating_Seeds_cDNA_P Parameter: Age (day) Value: 4 vs. 0
  misc_feature: MA Experiment 108464 PARAMETER Experiment Name: At_Germinating_Seeds_cDNA_P Parameter: Tissue Value: Germinating Seeds
  misc_feature: MA Experiment ID: 108579 Result: Up-regulated in Transcription
  misc_feature: MA Experiment 108579 PARAMETER Experiment Name: At_4deg_Cold_cDNA_P Parameter: Temperature (deg C) Value: 4 vs. 22
  misc_feature: MA Experiment 108579 PARAMETER Experiment Name: At_4deg_Cold_cDNA_P Parameter: Timepoint (hr) Value: 6
  misc_feature: MA Experiment 108579 PARAMETER Experiment Name: At_4deg_Cold_cDNA_P Parameter: Tissue Value: Aerial
  misc_feature: MA Experiment ID: 108595 Result: Down-regulated in Transcription
  misc_feature: MA Experiment 108595 PARAMETER Experiment Name: At_Ler-pi_Ovule_cDNA_P Parameter: Plant Line Value: null
  misc_feature: MA Experiment ID: 20000180 Result: Up-regulated in Transcription
  misc_feature: MA Experiment 20000180 PARAMETER Experiment Name: At_Germinating_Seeds_P Parameter: Age (hr) Value: 24 vs. 0
  misc_feature: MA Experiment 20000180 PARAMETER Experiment Name: At_Germinating_Seeds_P Parameter: Tissue Value: Germinating Seeds
  misc_feature: MA Experiment ID: 20000184 Result: Up-regulated in Transcription
  misc_feature: MA Experiment 20000184 PARAMETER Experiment Name: At_Shoots__P Parameter: Age (day) Value: 7
  misc_feature: MA Experiment 20000184 PARAMETER Experiment Name: At_Shoots__P Parameter: Tissue Value: Shoots vs. Whole Plant
  misc_feature: MA Experiment ID: 20000185 Result: Down-regulated in Transcription
  misc_feature: MA Experiment 20000185 PARAMETER Experiment Name: At_Roots__P Parameter: Age (day) Value: 7 vs. 21
  misc_feature: MA Experiment 20000185 PARAMETER Experiment Name: At_Roots__P Parameter: Organism Value: A. thaliana
  misc_feature: MA Experiment 20000185 PARAMETER Experiment Name: At_Roots__P Parameter: Tissue Value: Roots vs. Whole Plant
  misc_feature: MA Experiment ID: 20000224 Result: Up-regulated in Transcription
  misc_feature: MA Experiment ID: 20000439 Result: Down-regulated in Transcription
  misc_feature: MA Experiment 20000439 PARAMETER Experiment Name: At_Roots__P Parameter: Age (day) Value: 14 vs. 21
  misc_feature: MA Experiment 20000439 PARAMETER Experiment Name: At_Roots__P Parameter: Organism Value: A. thaliana
  misc_feature: MA Experiment 20000439 PARAMETER Experiment Name: At_Roots__P Parameter: Tissue Value: Roots vs. Whole Plant
  misc_feature: MA Experiment ID: 20001248 Result: Down-regulated in Transcription
  misc_feature: MA Experiment 20001248 PARAMETER Experiment Name: At_Far-red-induction_P Parameter: Age (day) Value: 7
  misc_feature: MA Experiment 20001248 PARAMETER Experiment Name: At_Far-red-induction_P Parameter: Light Value: Far-red vs. White
  misc_feature: MA Experiment 20001248 PARAMETER Experiment Name: At_Far-red-induction_P Parameter: Organism Value: A. thaliana
  misc_feature: MA Experiment 20001248 PARAMETER Experiment Name: At_Far-red-induction_P Parameter: Plant Line Value: Columbia
  misc_feature: MA Experiment 20001248 PARAMETER Experiment Name: At_Far-red-induction_P Parameter: Timepoint (hr) Value: 4
  misc_feature: MA Experiment 20001248 PARAMETER Experiment Name: At_Far-red-induction_P Parameter: Tissue Value: Whole Plant
  misc_feature: MA Experiment ID: 20001450 Result: Down-regulated in Transcription
  misc_feature: MA Experiment 20001450 PARAMETER Experiment Name: At_Far-red-induction_P Parameter: Age (day) Value: 7
  misc_feature: MA Experiment 20001450 PARAMETER Experiment Name: At_Far-red-induction_P Parameter: Light Value: Far-red vs. White
  misc_feature: MA Experiment 20001450 PARAMETER Experiment Name: At_Far-red-induction_P Parameter: Organism Value: A. thaliana
  misc_feature: MA Experiment 20001450 PARAMETER Experiment Name: At_Far-red-induction_P Parameter: Plant Line Value: Columbia
  misc_feature: MA Experiment 20001450 PARAMETER Experiment Name: At_Far-red-induction_P Parameter: Timepoint (hr) Value: 8
  misc_feature: MA Experiment 20001450 PARAMETER Experiment Name: At_Far-red-induction_P Parameter: Tissue Value: Whole Plant
aaaaaaaaaaaacgagcagctgtttatcttccaacaaagcttcttcgtgcatcttcgctcttctcaactcgtcatcctctccctctgattctcttaagtcgccttgaaaaattaagacaaaacaacaacaaaagaacaagagaagctctaaaatccagcagctatggcgtttcttctccccaatctctctccttctttccttcttccgaccggaaaatcactcaaagagaaacccatttccaaccaagctttatcatcatcatcatcatcgtccaatagctacgagtttgaagaagatagtctctctccactttctctctttagcgtccaggctcctcctcctgttcgaggtgcgcaggttaagaccaaaccaagtgcgcaggataagtaccagcacggcagcaaagatgacttctacatcaatctcggtttagctgtacgtacccttcgcgaagatttgcctctcctcttcaccaaagatctcaattacgacatttacagggatgatataacattagtggatccaatgaacacgttctctgggattgacaactacaaattgatcttctgggcacttagatttcatggcaagattctcttcagggatatctcacttgagatcttcagggtttggcaaccatcagagaacatgattctcatcaggtggaatcttaaaggtgtacctagagtcccatgggaggcaaagggagagtttcagggtacttctcgctataaactcgaccgaaatggcaaaatctatgagcataaggtcgataacttggccttcaacttccctcaccagctcaaacctgccacttctgttttggatatggtcaccgcttgccctgcaagtcccaatccaactttcatgtttggcgccatggattcatactcatcttcttggattgagttctacaaagcagtgcaaaggacactagacaagcaagaagagcaaatgcttgtgcaagaccatttcgtcccatgctcataatgccattaggtcacactcaggtgtatatatatatactgttacattgaagatacaatacatatatctatgtgtgcaggcatatgcatatgagtagatgtggttgacttagatatcaaagagggtagggaaccaagaatactcatgagcttgtacaacttgcctattgaatgtaaacagaattccttacagttgttttgttatgtaaaacacattgatgatttgtctttacgatcaagcgaaattatatcccttg

SEQ ID NO: 35228 - protein, 275 aa, Arabidopsis thaliana
  peptide (1)..(275): Ceres Seq. ID no. 13488404
  misc_feature (88)..(201): Homolog of NCBI NO: 37522054 NR Description: hypothetical protein glr2485 [Gloeobacter
  misc_feature (86)..(201): Homolog of NCBI NO: 17228448 NR Description: hypothetical protein [Nostoc sp. PCC 7120]
  misc_feature (92)..(201): Homolog of NCBI NO: 23040676 NR Description: hypothetical protein [Trichodesmium erythraeum
  misc_feature (92)..(201): Homolog of NCBI NO: 23126421 NR Description: hypothetical protein [Nostoc punctiforme]
  misc_feature (47)..(203): Homolog of NCBI NO: 34904098 NR Description: unnamed protein product [Oryza sativa (japonica
  misc_feature (73)..(202): Homolog of NCBI NO: 25408977 NR Description: hypothetical protein At2g46220 [imported] -
  misc_feature (73)..(238): Homolog of NCBI NO: 18407008 NR Description: expressed protein [Arabidopsis thaliana]
  misc_feature (1)..(261): Homolog of NCBI NO: 38347356 NR Description: OSJNBa0070C17.17 [Oryza sativa (japonica
  misc_feature (1)..(275): Homolog of NCBI NO: 15219209 NR Description: expressed protein [Arabidopsis thaliana]
  misc_feature (1)..(275): Homolog of NCBI NO: 18412399 NR Description: expressed protein [Arabidopsis thaliana]
MAFLLPNLSPSFLLPTGKSLKEKPISNQALSSSSSSSNSYEFEEDSLSPLSLFSVQAPPPVRGAQVKTKPSAQDKYQHGSKDDFYINLGLAVRTLREDLPLLFTKDLNYDIYRDDITLVDPMNTFSGIDNYKLIFWALRFHGKILFRDISLEIFRVWQPSENMILIRWNLKGVPRVPWEAKGEFQGTSRYKLDRNGKIYEHKVDNLAFNFPHQLKPATSVLDMVTACPASPNPTFMFGAMDSYSSSWIEFYKAVQRTLDKQEEQMLVQDHFVPCS

SEQ ID NO: 35229 - protein, 154 aa, Arabidopsis thaliana
  peptide (1)..(154): Ceres Seq. ID no. 13488405
  misc_feature (1)..(80): Homolog of NCBI NO: 37522054 NR Description: hypothetical protein glr2485 [Gloeobacter
  misc_feature (1)..(80): Homolog of NCBI NO: 17228448 NR Description: hypothetical protein [Nostoc sp. PCC 7120]
  misc_feature (1)..(80): Homolog of NCBI NO: 23040676 NR Description: hypothetical protein [Trichodesmium erythraeum
  misc_feature (1)..(80): Homolog of NCBI NO: 23126421 NR Description: hypothetical protein [Nostoc punctiforme]
  misc_feature (1)..(82): Homolog of NCBI NO: 34904098 NR Description: unnamed protein product [Oryza sativa (japonica
  misc_feature (1)..(81): Homolog of NCBI NO: 25408977 NR Description: hypothetical protein At2g46220 [imported] -
  misc_feature (1)..(117): Homolog of NCBI NO: 18407008 NR Description: expressed protein [Arabidopsis thaliana]
  misc_feature (1)..(140): Homolog of NCBI NO: 38347356 NR Description: OSJNBa0070C17.17 [Oryza sativa (japonica
  misc_feature (1)..(154): Homolog of NCBI NO: 15219209 NR Description: expressed protein [Arabidopsis thaliana]
  misc_feature (1)..(154): Homolog of NCBI NO: 18412399 NR Description: expressed protein [Arabidopsis thaliana]
MNTFSGIDNYKLIFWALRFHGKILFRDISLEIFRVWQPSENMILIRWNLKGVPRVPWEAKGEFQGTSRYKLDRNGKIYEHKVDNLAFNFPHQLKPATSVLDMVTACPASPNPTFMFGAMDSYSSSWIEFYKAVQRTLDKQEEQMLVQDHFVPCS

SEQ ID NO: 35230 - DNA, 1097 bp, Arabidopsis thaliana
  misc_feature (1)..(1097): Ceres Seq. ID no. 12334453
  misc_feature: MA Experiment ID: 108434 Result: Down-regulated in Transcription
  misc_feature: MA Experiment 108434 PARAMETER Experiment Name: At_Root_Tips_cDNA_P Parameter: Tissue Value: Root Tips
  misc_feature: MA Experiment ID: 108595 Result: Down-regulated in Transcription
  misc_feature: MA Experiment 108595 PARAMETER Experiment Name: At_Ler-pi_Ovule_cDNA_P Parameter: Plant Line Value: null
  misc_feature: MA Experiment ID: 20000234 Result: Down-regulated in Transcription
  misc_feature: MA Experiment 20000234 PARAMETER Experiment Name: At_Siliques_P Parameter: Age (day) Value: 21
  misc_feature: MA Experiment 20000234 PARAMETER Experiment Name: At_Siliques_P Parameter: Organism Value: A. thaliana
  misc_feature: MA Experiment 20000234 PARAMETER Experiment Name: At_Siliques_P Parameter: Plant Line Value: WS
  misc_feature: MA Experiment 20000234 PARAMETER Experiment Name: At_Siliques_P Parameter: Tissue Value: Less Than 5mm Siliques vs. Whole Plant
attcggtttcatttccacgagatctctttggctttcttgttgagatctttccacaagaaagtttagttgttttcttcttcctgtgatttcttcgcctaattttttctggatttaaaaacacgagaagtcaaggtgaaatattatcgaagtctctgaatctgtgtttgaatggaaccatcatctggaaccggtcctgagaagagaccaaccgttgacttggtcaaggatagaaatggaacggatcagattcttcttcagaatcctagaggcgcctctgtaaagattagtttacatggaggacaagttctttcatggaagactgacaagggtgatgaattgttattcaacagcaccaaggccaacttgaagcctccccatccggtacgaggaggaatccctatatgctttcctcagtttggaactcggggatcacttgagcaacacgggtttgcaagaaacaagatgtggcttgtagaaaacaatccacctgctttaccttcatttgactcaactggaaaagcctatgttgatttggtgcttaagtcatctgatgaagatacgatgaggatctggccttacagctttgagtttcatctgagagtctcattggcattagatgggaacctaacactgatatcacgagtcagaaacatcaattcaaagccttttagcttttccattgcttaccacacttacttctccatttccgatattagtgaagttagacttgaagggctggaaactcttgactatcttgataatatgcatgatagagagcggttcacagagcaaggcgatgcattaacctttgaatcagagatcgatagagtgtacctaaattctaaagacgtggttgccattttcgaccatgagagaaaacgcacattcctcatcaagaaagaaggtctacctgatgtcgtggtatggaatccatgggagaagaaagcgagagcattgacggatttgggagatgatgagtatagacacatgttgtgtgtggatggagcagccattgagaaacccatcaccttgaaaccgggtgaagaatggaccgggaaattacatctctcgcttgttctttccacctaaaacccggt

SEQ ID NO: 35231 - protein, 306 aa, Arabidopsis thaliana
  peptide (1)..(306): Ceres Seq. ID no. 12334454
  misc_feature (25)..(301): Pfam Name: Aldose 1-epimerase Pfam Description: Aldose 1-epimerase
  misc_feature (9)..(306): Homolog of NCBI NO: 11281678 NR Description: hypothetical protein F18O22.290 - Arabidopsis
  misc_feature (15)..(306): Homolog of NCBI NO: 28393808 NR Description: unknown protein [Arabidopsis thaliana]
  misc_feature (15)..(306): Homolog of NCBI NO: 18417396 NR Description: putative protein
  misc_feature (13)..(306): Homolog of NCBI NO: 2501555 NR Description: POSSIBLE APOSPORY-ASSOCIATED PROTEIN C
  misc_feature (9)..(306): Homolog of NCBI NO: 19387263 NR Description: putative apospory-associated protein C
  misc_feature (11)..(306): Homolog of NCBI NO: 15242099 NR Description: apospory-associated protein C
  misc_feature (3)..(306): Homolog of NCBI NO: 38344152 NR Description: OSJNBa0041A02.19 [Oryza sativa (japonica
  misc_feature (7)..(306): Homolog of NCBI NO: 40253263 NR Description: putative Aldose 1-epimerase
  misc_feature (10)..(306): Homolog of NCBI NO: 15233165 NR Description: putative protein; protein id: At3g61610.1
  misc_feature (1)..(306): Homolog of NCBI NO: 15236591 NR Description: putative protein
MEPSSGTGPEKRPTVDLVKDRNGTDQILLQNPRGASVKISLHGGQVLSWKTDKGDELLFNSTKANLKPPHPVRGGIPICFPQFGTRGSLEQHGFARNKMWLVENNPPALPSFDSTGKAYVDLVLKSSDEDTMRIWPYSFEFHLRVSLALDGNLTLISRVRNINSKPFSFSIAYHTYFSISDISEVRLEGLETLDYLDNMHDRERFTEQGDALTFESEIDRVYLNSKDVVAIFDHERKRTFLIKKEGLPDVVVWNPWEKKARALTDLGDDEYRHMLCVDGAAIEKPITLKPGEEWTGKLHLSLVLST

SEQ ID NO: 35232 - protein, 208 aa, Arabidopsis thaliana
  peptide (1)..(208): Ceres Seq. ID no. 12334455
  misc_feature (1)..(203): Pfam Name: Aldose 1-epimerase Pfam Description: Aldose 1-epimerase
  misc_feature (1)..(208): Homolog of NCBI NO: 11281678 NR Description: hypothetical protein F18O22.290 - Arabidopsis
  misc_feature (1)..(208): Homolog of NCBI NO: 28393808 NR Description: unknown protein [Arabidopsis thaliana]
  misc_feature (1)..(208): Homolog of NCBI NO: 18417396 NR Description: putative protein
  misc_feature (1)..(208): Homolog of NCBI NO: 2501555 NR Description: POSSIBLE APOSPORY-ASSOCIATED PROTEIN C
  misc_feature (1)..(208): Homolog of NCBI NO: 19387263 NR Description: putative apospory-associated protein C
  misc_feature (1)..(208): Homolog of NCBI NO: 15242099 NR Description: apospory-associated protein C
  misc_feature (1)..(208): Homolog of NCBI NO: 38344152 NR Description: OSJNBa0041A02.19 [Oryza sativa (japonica
  misc_feature (1)..(208): Homolog of NCBI NO: 40253263 NR Description: putative Aldose 1-epimerase
  misc_feature (1)..(208): Homolog of NCBI NO: 15233165 NR Description: putative protein; protein id: At3g61610.1
  misc_feature (1)..(208): Homolog of NCBI NO: 15236591 NR Description: putative protein
MWLVENNPPALPSFDSTGKAYVDLVLKSSDEDTMRIWPYSFEFHLRVSLALDGNLTLISRVRNINSKPFSFSIAYHTYFSISDISEVRLEGLETLDYLDNMHDRERFTEQGDALTFESEIDRVYLNSKDVVAIFDHERKRTFLIKKEGLPDVVVWNPWEKKARALTDLGDDEYRHMLCVDGAAIEKPITLKPGEEWTGKLHLSLVLST

SEQ ID NO: 35233 - protein, 175 aa, Arabidopsis thaliana
  peptide (1)..(175): Ceres Seq. ID no. 12334456
  misc_feature (1)..(170): Pfam Name: Aldose 1-epimerase Pfam Description: Aldose 1-epimerase
  misc_feature (1)..(175): Homolog of NCBI NO: 11281678 NR Description: hypothetical protein F18O22.290 - Arabidopsis
  misc_feature (1)..(175): Homolog of NCBI NO: 28393808 NR Description: unknown protein [Arabidopsis thaliana]
  misc_feature (1)..(175): Homolog of NCBI NO: 18417396 NR Description: putative protein
  misc_feature (1)..(175): Homolog of NCBI NO: 2501555 NR Description: POSSIBLE APOSPORY-ASSOCIATED PROTEIN C
  misc_feature (1)..(175): Homolog of NCBI NO: 19387263 NR Description: putative apospory-associated protein C
  misc_feature (1)..(175): Homolog of NCBI NO: 15242099 NR Description: apospory-associated protein C
  misc_feature (1)..(175): Homolog of NCBI NO: 38344152 NR Description: OSJNBa0041A02.19 [Oryza sativa (japonica
  misc_feature (1)..(175): Homolog of NCBI NO: 40253263 NR Description: putative Aldose 1-epimerase
  misc_feature (1)..(175): Homolog of NCBI NO: 15233165 NR Description: putative protein; protein id: At3g61610.1
  misc_feature (1)..(175): Homolog of NCBI NO: 15236591 NR Description: putative protein
MRIWPYSFEFHLRVSLALDGNLTLISRVRNINSKPFSFSIAYHTYFSISDISEVRLEGLETLDYLDNMHDRERFTEQGDALTFESEIDRVYLNSKDVVAIFDHERKRTFLIKKEGLPDVVVWNPWEKKARALTDLGDDEYRHMLCVDGAAIEKPITLKPGEEWTGKLHLSLVLST

SEQ ID NO: 35234 - DNA, 1683 bp, Arabidopsis thaliana
  misc_feature (1)..(1683): Ceres Seq. ID no. 13488989
  misc_feature: MA Experiment ID: 20000169 Result: Up-regulated in Transcription
  misc_feature: MA Experiment 20000169 PARAMETER Experiment Name: At_100uM_ABA_P Parameter: Age (day) Value: 14
  misc_feature: MA Experiment 20000169 PARAMETER Experiment Name: At_100uM_ABA_P Parameter: Organism Value: A. thaliana
  misc_feature: MA Experiment 20000169 PARAMETER Experiment Name: At_100uM_ABA_P Parameter: Plant Line Value: WS
  misc_feature: MA Experiment 20000169 PARAMETER Experiment Name: At_100uM_ABA_P Parameter: Timepoint (hr) Value: 6
  misc_feature: MA Experiment 20000169 PARAMETER Experiment Name: At_100uM_ABA_P Parameter: Tissue Value: Aerial
  misc_feature: MA Experiment 20000169 PARAMETER Experiment Name: At_100uM_ABA_P Parameter: Treatment Value: 100uM ABA vs. No Treatment
  misc_feature: MA Experiment ID: 20000171 Result: Down-regulated in Transcription
  misc_feature: MA Experiment 20000171 PARAMETER Experiment Name: At_42deg_Heat_P Parameter: Age (day) Value: 14
  misc_feature: MA Experiment 20000171 PARAMETER Experiment Name: At_42deg_Heat_P Parameter: Organism Value: A. thaliana
  misc_feature: MA Experiment 20000171 PARAMETER Experiment Name: At_42deg_Heat_P Parameter: Plant Line Value: WS
  misc_feature: MA Experiment 20000171 PARAMETER Experiment Name: At_42deg_Heat_P Parameter: Temperature (deg C) Value: 42 vs. 22
  misc_feature: MA Experiment 20000171 PARAMETER Experiment Name: At_42deg_Heat_P Parameter: Timepoint (hr) Value: 1
  misc_feature: MA Experiment 20000171 PARAMETER Experiment Name: At_42deg_Heat_P Parameter: Tissue Value: Aerial
  misc_feature: MA Experiment ID: 20000173 Result: Down-regulated in Transcription
  misc_feature: MA Experiment 20000173 PARAMETER Experiment Name: At_42deg_Heat_P Parameter: Age (day) Value: 14
  misc_feature: MA Experiment 20000173 PARAMETER Experiment Name: At_42deg_Heat_P Parameter: Organism Value: A. thaliana
  misc_feature: MA Experiment 20000173 PARAMETER Experiment Name: At_42deg_Heat_P Parameter: Plant Line Value: WS
  misc_feature: MA Experiment 20000173 PARAMETER Experiment Name: At_42deg_Heat_P Parameter: Temperature (deg C) Value: 42 vs. 22
  misc_feature: MA Experiment 20000173 PARAMETER Experiment Name: At_42deg_Heat_P Parameter: Timepoint (hr) Value: 6
  misc_feature: MA Experiment 20000173 PARAMETER Experiment Name: At_42deg_Heat_P Parameter: Tissue Value: Aerial
  misc_feature: MA Experiment ID: 20000179 Result: Up-regulated in Transcription
  misc_feature: MA Experiment 20000179 PARAMETER Experiment Name: At_Germinating_Seeds_P Parameter: Age (hr) Value: 6 vs. 0
  misc_feature: MA Experiment 20000179 PARAMETER Experiment Name: At_Germinating_Seeds_P Parameter: Tissue Value: Germinating Seeds
  misc_feature: MA Experiment ID: 20000180 Result: Up-regulated in Transcription
  misc_feature: MA Experiment 20000180 PARAMETER Experiment Name: At_Germinating_Seeds_P Parameter: Age (hr) Value: 24 vs. 0
  misc_feature: MA Experiment 20000180 PARAMETER Experiment Name: At_Germinating_Seeds_P Parameter: Tissue Value: Germinating Seeds
  misc_feature: MA Experiment ID: 20000185 Result: Down-regulated in Transcription
  misc_feature: MA Experiment 20000185 PARAMETER Experiment Name: At_Roots__P Parameter: Age (day) Value: 7 vs. 21
  misc_feature: MA Experiment 20000185 PARAMETER Experiment Name: At_Roots__P Parameter: Organism Value: A. thaliana
  misc_feature: MA Experiment 20000185 PARAMETER Experiment Name: At_Roots__P Parameter: Tissue Value: Roots vs. Whole Plant
  misc_feature: MA Experiment ID: 20000234 Result: Down-regulated in Transcription
  misc_feature: MA Experiment 20000234 PARAMETER Experiment Name: At_Siliques_P Parameter: Age (day) Value: 21
  misc_feature: MA Experiment 20000234 PARAMETER Experiment Name: At_Siliques_P Parameter: Organism Value: A. thaliana
  misc_feature: MA Experiment 20000234 PARAMETER Experiment Name: At_Siliques_P Parameter: Plant Line Value: WS
  misc_feature: MA Experiment 20000234 PARAMETER Experiment Name: At_Siliques_P Parameter: Tissue Value: Less Than 5mm Siliques vs. Whole Plant
  misc_feature: MA Experiment ID: 20000264 Result: Down-regulated in Transcription
  misc_feature: MA Experiment 20000264 PARAMETER Experiment Name: At_Open_Flower_P Parameter: Age (day) Value: 21
  misc_feature: MA Experiment 20000264 PARAMETER Experiment Name: At_Open_Flower_P Parameter: Plant Line Value: WS
  misc_feature: MA Experiment 20000264 PARAMETER Experiment Name: At_Open_Flower_P Parameter: Tissue Value: Open Flower vs. Whole Plant
  misc_feature: MA Experiment ID: 20000265 Result: Down-regulated in Transcription
  misc_feature: MA Experiment 20000265 PARAMETER Experiment Name: At_Open_Flower_P Parameter: Age (day) Value: 21
  misc_feature: MA Experiment 20000265 PARAMETER Experiment Name: At_Open_Flower_P Parameter: Plant Line Value: WS
  misc_feature: MA Experiment 20000265 PARAMETER Experiment Name: At_Open_Flower_P Parameter: Tissue Value: Closed Flower vs. Whole Plant
  misc_feature: MA Experiment ID: 20000286 Result: Down-regulated in Transcription
  misc_feature: MA Experiment 20000286 PARAMETER Experiment Name: At_Open_Flower_P Parameter: Age (day) Value: 21
  misc_feature: MA Experiment 20000286 PARAMETER Experiment Name: At_Open_Flower_P Parameter: Plant Line Value: WS
  misc_feature: MA Experiment 20000286 PARAMETER Experiment Name: At_Open_Flower_P Parameter: Tissue Value: Half Open vs. Whole Plant
  misc_feature: MA Experiment ID: 20000438 Result: Down-regulated in Transcription
  misc_feature: MA Experiment 20000438 PARAMETER Experiment Name: At_Shoots__P Parameter: Age (day) Value: 14
  misc_feature: MA Experiment 20000438 PARAMETER Experiment Name: At_Shoots__P Parameter: Tissue Value: Shoots vs. Whole Plant
  misc_feature: MA Experiment ID: 20000439 Result: Down-regulated in Transcription
  misc_feature: MA Experiment 20000439 PARAMETER Experiment Name: At_Roots__P Parameter: Age (day) Value: 14 vs. 21
  misc_feature: MA Experiment 20000439 PARAMETER Experiment Name: At_Roots__P Parameter: Organism Value: A. thaliana
  misc_feature: MA Experiment 20000439 PARAMETER Experiment Name: At_Roots__P Parameter: Tissue Value: Roots vs. Whole Plant
  misc_feature: MA Experiment ID: 20000453 Result: Up-regulated in Transcription
  misc_feature: MA Experiment 20000453 PARAMETER Experiment Name: At_100uM_ABA_P Parameter: Age (day) Value: 15
  misc_feature: MA Experiment 20000453 PARAMETER Experiment Name: At_100uM_ABA_P Parameter: Organism Value: A. thaliana
  misc_feature: MA Experiment 20000453 PARAMETER Experiment Name: At_100uM_ABA_P Parameter: Plant Line Value: WS
  misc_feature: MA Experiment 20000453 PARAMETER Experiment Name: At_100uM_ABA_P Parameter: Timepoint (hr) Value: 24
  misc_feature: MA Experiment 20000453 PARAMETER Experiment Name: At_100uM_ABA_P Parameter: Tissue Value: Aerial
  misc_feature: MA Experiment 20000453 PARAMETER Experiment Name: At_100uM_ABA_P Parameter: Treatment Value: 100uM ABA vs. No Treatment
  misc_feature: MA Experiment ID: 20000794 Result: Down-regulated in Transcription
  misc_feature: MA Experiment 20000794 PARAMETER Experiment Name: At_Petals_P Parameter: Age (day) Value: 23-25 days
  misc_feature: MA Experiment 20000794 PARAMETER Experiment Name: At_Petals_P Parameter: Plant Line Value: WS
  misc_feature: MA Experiment 20000794 PARAMETER Experiment Name: At_Petals_P Parameter: Tissue Value: Petals vs. Whole plant
  misc_feature: MA Experiment ID: 20001247 Result: Up-regulated in Transcription
  misc_feature: MA Experiment 20001247 PARAMETER Experiment Name: At_Far-red-induction_P Parameter: Age (day) Value: 7
  misc_feature: MA Experiment 20001247 PARAMETER Experiment Name: At_Far-red-induction_P Parameter: Light Value: Far-red vs. White
  misc_feature: MA Experiment 20001247 PARAMETER Experiment Name: At_Far-red-induction_P Parameter: Organism Value: A. thaliana
  misc_feature: MA Experiment 20001247 PARAMETER Experiment Name: At_Far-red-induction_P Parameter: Plant Line Value: Columbia
  misc_feature: MA Experiment 20001247 PARAMETER Experiment Name: At_Far-red-induction_P Parameter: Timepoint (hr) Value: 1
  misc_feature: MA Experiment 20001247 PARAMETER Experiment Name: At_Far-red-induction_P Parameter: Tissue Value: Whole Plant
  misc_feature: MA Experiment ID: 20001560 Result: Up-regulated in Transcription
  misc_feature: MA Experiment 20001560 PARAMETER Experiment Name: At_Drought_Soil_Dry_P Parameter: Age (day) Value: 28
  misc_feature: MA Experiment 20001560 PARAMETER Experiment Name: At_Drought_Soil_Dry_P Parameter: Organism Value: A. thaliana
  misc_feature: MA Experiment 20001560 PARAMETER Experiment Name: At_Drought_Soil_Dry_P Parameter: Plant Line Value: WS
  misc_feature: MA Experiment 20001560 PARAMETER Experiment Name: At_Drought_Soil_Dry_P Parameter: Post Timepoint (hr) Value: None
  misc_feature: MA Experiment 20001560 PARAMETER Experiment Name: At_Drought_Soil_Dry_P Parameter: Post-Treatment Value: None
  misc_feature: MA Experiment 20001560 PARAMETER Experiment Name: At_Drought_Soil_Dry_P Parameter: Timepoint (day) Value: 14
  misc_feature: MA Experiment 20001560 PARAMETER Experiment Name: At_Drought_Soil_Dry_P Parameter: Treatment Value: Drought vs. No Drought
  misc_feature: MA Experiment ID: 20001906 Result: Down-regulated in Transcription
  misc_feature: MA Experiment 20001906 PARAMETER Experiment Name: At_Drought_Reproduction_P Parameter: Age (day) Value: 35
  misc_feature: MA Experiment 20001906 PARAMETER Experiment Name: At_Drought_Reproduction_P Parameter: Organism Value: A. thaliana
  misc_feature: MA Experiment 20001906 PARAMETER Experiment Name: At_Drought_Reproduction_P Parameter: Plant Line Value: WS
  misc_feature: MA Experiment 20001906 PARAMETER Experiment Name: At_Drought_Reproduction_P Parameter: Timepoint (day) Value: 5
  misc_feature: MA Experiment 20001906 PARAMETER Experiment Name: At_Drought_Reproduction_P Parameter: Tissue Value: Siliques
  misc_feature: MA Experiment 20001906 PARAMETER Experiment Name: At_Drought_Reproduction_P Parameter: Treatment Value: Drought vs. No Drought
  misc_feature: MA Experiment ID: 20001911 Result: Down-regulated in Transcription
  misc_feature: MA Experiment 20001911 PARAMETER Experiment Name: At_Drought_Reproduction_P Parameter: Age (day) Value: 40
  misc_feature: MA Experiment 20001911 PARAMETER Experiment Name: At_Drought_Reproduction_P Parameter: Organism Value: A. thaliana
  misc_feature: MA Experiment 20001911 PARAMETER Experiment Name: At_Drought_Reproduction_P Parameter: Plant Line Value: WS
  misc_feature: MA Experiment 20001911 PARAMETER Experiment Name: At_Drought_Reproduction_P Parameter: Timepoint (day) Value: 10
  misc_feature: MA Experiment 20001911 PARAMETER Experiment Name: At_Drought_Reproduction_P Parameter: Tissue Value: Flowers
  misc_feature: MA Experiment 20001911 PARAMETER Experiment Name: At_Drought_Reproduction_P Parameter: Treatment Value: Drought vs. No Drought
gtcttcttcttcttcttctttttttttcgtaaaaattcttcttcttcttcttcttctccgagctccgtccgagcagagaagaagagtaaggtaagttttagagtgcacttgtgtggcactctcatttcttatcctgcgcctcttacgatttcttatggtgcgcttctccgactagtttcggtgtctaatggactcttcctcttcttctctatctctccaagaaaaaatctcttctggttatttctagggtttcgttggttcttttttcgaaatgctttggataacgagatttgctggattattctccgccgcgatggcagtgatcgtgttatctccgtcgcttcagtcatttcctccggcggcggcaatccgttcttctccatcaccgatcttcagaaaagctccagcggtgttcaacaacggcgacgaatgtctctcctccggcggcgtctgcaatccgtcgttggtccacgtggcgatcacgttagacgtagagtacctgcgtggctcaatcgcagccgttaactcgatccttcagcactcggtgtgtccagagagcgtcttcttccacttcatcgccgtctccgaggaaacaaacctgttggagtcgctggtgagatcggttttcccgagactgaaattcaatatttacgattttgcccctgagacagttcgtggtttgatttcttcttccgtgagacaagctctcgagcagcctctgaactacgctagaagctacttagcggatctgctggagccttgtgttaaccgtgtcatatacttggattcggatcttgtcgtcgtcgatgacatcgctaagctttggaaaactagcctaggctcgaggataatcggagctccggagtattgtcacgcgaatttcacgaaatacttcaccggaggattctggtcggaggagagattctccggtacctttagagggaggaagccatgttacttcaacacaggtgtgatggtgatagatcttaagaaatggagaagaggtggttacacgaaacgtatcgagaaatggatggagattcagagaagagagaggatttacgaactaggctcgcttccaccgtttcttctagttttctccggtcacgtggctcccatctctcaccggtggaaccagcatggacttggtggtgacaatgttagaggtagctgtcgtgatttgcatcctggtcctgtgagtttgctgcattggtctggtagtggcaagccctggataagactcgattccaaacggccttgtcccttagacgcattatggacgccttacgacttgtatcgacattcgcattgacgtttcagcgaatggtggtgctatatgaggagagagtagaggaaggtttcattggtcttgaccggcccagtctgaaagaaaatcaaaggtagcttttgtagtagaagatgaaaaccctttgccgataaaatgggtttggtttagccaaaccggagacacaactgagatgtgggaattttattttcaaaccggcgggttggatcatatttttttttgttttgttgggggacaagaaaaatcaatcagagttaggttattcatgtggatgagattctgtttttttttttatcattaatttgtgtttaaaaaacattctttcttattttgtgcagatacttattctctttgaaaaataataattagaattaccc

SEQ ID NO: 35235 - protein, 346 aa, Arabidopsis thaliana
  peptide (1)..(346): Ceres Seq. ID no. 13488990
  misc_feature (39)..(345): Homolog of NCBI NO: 21536997 NR Description: putative glycosyl transferase [Arabidopsis
  misc_feature (39)..(345): Homolog of NCBI NO: 18391493 NR Description: glycosyltransferase family 8 [Arabidopsis
  misc_feature (41)..(344): Homolog of NCBI NO: 15221684 NR Description: glycosyltransferase family 8 [Arabidopsis
  misc_feature (41)..(344): Homolog of NCBI NO: 18409445 NR Description: glycosyltransferase family 8 [Arabidopsis
  misc_feature (6)..(344): Homolog of NCBI NO: 11281926 NR Description: hypothetical protein F26K9.90 - Arabidopsis
  misc_feature (1)..(344): Homolog of NCBI NO: 22331906 NR Description: glycosyltransferase family 8 [Arabidopsis
  misc_feature (1)..(346): Homolog of NCBI NO: 15217851 NR Description: glycosyltransferase family 8 [Arabidopsis
  misc_feature (1)..(313): Homolog of NCBI NO: 20258800 NR Description: putative glycosyl transferase [Arabidopsis
  misc_feature (1)..(346): Homolog of NCBI NO: 21554300 NR Description: putative glycosyl transferase [Arabidopsis
  misc_feature (1)..(346): Homolog of NCBI NO: 15235247 NR Description: glycosyltransferase family 8 [Arabidopsis
MLWITRFAGLFSAAMAVIVLSPSLQSFPPAAAIRSSPSPIFRKAPAVFNNGDECLSSGGVCNPSLVHVAITLDVEYLRGSIAAVNSILQHSVCPESVFFHFIAVSEETNLLESLVRSVFPRLKFNIYDFAPETVRGLISSSVRQALEQPLNYARSYLADLLEPCVNRVIYLDSDLVVVDDIAKLWKTSLGSRIIGAPEYCHANFTKYFTGGFWSEERFSGTFRGRKPCYFNTGVMVIDLKKWRRGGYTKRIEKWMEIQRRERIYELGSLPPFLLVFSGHVAPISHRWNQHGLGGDNVRGSCRDLHPGPVSLLHWSGSGKPWIRLDSKRPCPLDALWTPYDLYRHSH

SEQ ID NO: 35236 - protein, 332 aa, Arabidopsis thaliana
  peptide (1)..(332): Ceres Seq. ID no. 13488991
  misc_feature (25)..(331): Homolog of NCBI NO: 21536997 NR Description: putative glycosyl transferase [Arabidopsis
  misc_feature (25)..(331): Homolog of NCBI NO: 18391493 NR Description: glycosyltransferase family 8 [Arabidopsis
  misc_feature (27)..(330): Homolog of NCBI NO: 15221684 NR Description: glycosyltransferase family 8 [Arabidopsis
  misc_feature (27)..(330): Homolog of NCBI NO: 18409445 NR Description: glycosyltransferase family 8 [Arabidopsis
  misc_feature (1)..(330): Homolog of NCBI NO: 11281926 NR Description: hypothetical protein F26K9.90 - Arabidopsis
  misc_feature (1)..(330): Homolog of NCBI NO: 22331906 NR Description: glycosyltransferase family 8 [Arabidopsis
  misc_feature (1)..(332): Homolog of NCBI NO: 15217851 NR Description: glycosyltransferase family 8 [Arabidopsis
  misc_feature (1)..(299): Homolog of NCBI NO: 20258800 NR Description: putative glycosyl transferase [Arabidopsis
  misc_feature (1)..(332): Homolog of NCBI NO: 21554300 NR Description: putative glycosyl transferase [Arabidopsis
  misc_feature (1)..(332): Homolog of NCBI NO: 15235247 NR Description: glycosyltransferase family 8 [Arabidopsis
MAVIVLSPSLQSFPPAAAIRSSPSPIFRKAPAVFNNGDECLSSGGVCNPSLVHVAITLDVEYLRGSIAAVNSILQHSVCPESVFFHFIAVSEETNLLESLVRSVFPRLKFNIYDFAPETVRGLISSSVRQALEQPLNYARSYLADLLEPCVNRVIYLDSDLVVVDDIAKLWKTSLGSRIIGAPEYCHANFTKYFTGGFWSEERFSGTFRGRKPCYFNTGVMVIDLKKWRRGGYTKRIEKWMEIQRRERIYELGSLPPFLLVFSGHVAPISHRWNQHGLGGDNVRGSCRDLHPGPVSLLHWSGSGKPWIRLDSKRPCPLDALWTPYDLYRHSH

SEQ ID NO: 35237 - protein, 174 aa, Arabidopsis thaliana
  peptide (1)..(174): Ceres Seq. ID no. 13488992
VFFFFFFFFRKNSSSSSSSPSSVRAEKKSKVSFRVHLCGTLISYPAPLTISYGALLRLVSVSNGLFLFFSISPRKNLFWLFLGFRWFFFRNALDNEICWIILRRDGSDRVISVASVISSGGGNPFFSITDLQKSSSGVQQRRRMSLLRRRLQSVVGPRGDHVRRRVPAWLNRSR

SEQ ID NO: 35238 - DNA, 1664 bp, Arabidopsis thaliana
  misc_feature (1)..(1664): Ceres Seq. ID no. 12334766
  misc_feature: MA Experiment ID: 108435 Result: Down-regulated in Transcription
  misc_feature: MA Experiment 108435 PARAMETER Experiment Name: At_stm_Mutants_cDNA_P Parameter: Plant Line Value: wt Landsburg vs stm
  misc_feature: MA Experiment 108435 PARAMETER Experiment Name: At_stm_Mutants_cDNA_P Parameter: Tissue Value: Shoot Apical Meristem Region
  misc_feature: MA Experiment ID: 108461 Result: Up-regulated in Transcription
  misc_feature: MA Experiment 108461 PARAMETER Experiment Name: At_Germinating_Seeds_cDNA_P Parameter: Age (day) Value: 1 vs. 0
  misc_feature: MA Experiment 108461 PARAMETER Experiment Name: At_Germinating_Seeds_cDNA_P Parameter: Tissue Value: Germinating Seeds
  misc_feature: MA Experiment ID: 108462 Result: Up-regulated in Transcription
  misc_feature: MA Experiment 108462 PARAMETER Experiment Name: At_Germinating_Seeds_cDNA_P Parameter: Age (day) Value: 2 vs. 0
  misc_feature: MA Experiment 108462 PARAMETER Experiment Name: At_Germinating_Seeds_cDNA_P Parameter: Tissue Value: Germinating Seeds
  misc_feature: MA Experiment ID: 108463 Result: Up-regulated in Transcription
  misc_feature: MA Experiment 108463 PARAMETER Experiment Name: At_Germinating_Seeds_cDNA_P Parameter: Age (day) Value: 3 vs. 0
  misc_feature: MA Experiment 108463 PARAMETER Experiment Name: At_Germinating_Seeds_cDNA_P Parameter: Tissue Value: Germinating Seeds
  misc_feature: MA Experiment ID: 108464 Result: Up-regulated in Transcription
  misc_feature: MA Experiment 108464 PARAMETER Experiment Name: At_Germinating_Seeds_cDNA_P Parameter: Age (day) Value: 4 vs. 0
  misc_feature: MA Experiment 108464 PARAMETER Experiment Name: At_Germinating_Seeds_cDNA_P Parameter: Tissue Value: Germinating Seeds
  misc_feature: MA Experiment ID: 108488 Result: Up-regulated in Transcription
  misc_feature: MA Experiment ID: 108595 Result: Down-regulated in Transcription
  misc_feature: MA Experiment 108595 PARAMETER Experiment Name: At_Ler-pi_Ovule_cDNA_P Parameter: Plant Line Value: null
  misc_feature: MA Experiment ID: 20000069 Result: Down-regulated in Transcription
  misc_feature: MA Experiment 20000069 PARAMETER Experiment Name: At_100uM_ABA_Mutants_cDNA_P Parameter: Plant Line Value: CS23
  misc_feature: MA Experiment 20000069 PARAMETER Experiment Name: At_100uM_ABA_Mutants_cDNA_P Parameter: Timepoint (hr) Value: 6
  misc_feature: MA Experiment 20000069 PARAMETER Experiment Name: At_100uM_ABA_Mutants_cDNA_P Parameter: Tissue Value: Aerial
  misc_feature: MA Experiment 20000069 PARAMETER Experiment Name: At_100uM_ABA_Mutants_cDNA_P Parameter: Treatment Value: 100uM ABA vs. No Treatment
  misc_feature: MA Experiment ID: 20000070 Result: Down-regulated in Transcription
  misc_feature: MA Experiment 20000070 PARAMETER Experiment Name: At_100uM_ABA_Mutants_cDNA_P Parameter: Plant Line Value: CS24
  misc_feature: MA Experiment 20000070 PARAMETER Experiment Name: At_100uM_ABA_Mutants_cDNA_P Parameter: Timepoint (hr) Value: 6
  misc_feature: MA Experiment 20000070 PARAMETER Experiment Name: At_100uM_ABA_Mutants_cDNA_P Parameter: Tissue Value: Aerial
  misc_feature: MA Experiment 20000070 PARAMETER Experiment Name: At_100uM_ABA_Mutants_cDNA_P Parameter: Treatment Value: 100uM ABA vs. No Treatment
  misc_feature: MA Experiment ID: 20000071 Result: Down-regulated in Transcription
  misc_feature: MA Experiment 20000071 PARAMETER Experiment Name: At_100uM_ABA_Mutants_cDNA_P Parameter: Plant Line Value: CS8104
  misc_feature: MA Experiment 20000071 PARAMETER Experiment Name: At_100uM_ABA_Mutants_cDNA_P Parameter: Timepoint (hr) Value: 6
  misc_feature: MA Experiment 20000071 PARAMETER Experiment Name: At_100uM_ABA_Mutants_cDNA_P Parameter: Tissue Value: Aerial
  misc_feature: MA Experiment 20000071 PARAMETER Experiment Name: At_100uM_ABA_Mutants_cDNA_P Parameter: Treatment Value: 100uM ABA vs. No Treatment
  misc_feature: MA Experiment ID: 20000087 Result: Down-regulated in Transcription
  misc_feature: MA Experiment 20000087 PARAMETER Experiment Name: At_100uM_ABA_Mutants_cDNA_P Parameter: Plant Line Value: WS
  misc_feature: MA Experiment 20000087 PARAMETER Experiment Name: At_100uM_ABA_Mutants_cDNA_P Parameter: Timepoint (hr) Value: 6
  misc_feature: MA Experiment 20000087 PARAMETER Experiment Name: At_100uM_ABA_Mutants_cDNA_P Parameter: Tissue Value: Aerial
  misc_feature: MA Experiment 20000087 PARAMETER Experiment Name: At_100uM_ABA_Mutants_cDNA_P Parameter: Treatment Value: 100uM ABA vs. No Treatment
  misc_feature: MA Experiment ID: 20000117 Result: Down-regulated in Transcription
  misc_feature: MA Experiment 20000117 PARAMETER Experiment Name: At_100uM_ABA_Mutants_cDNA_P Parameter: Plant Line Value: Columbia
  misc_feature: MA Experiment 20000117 PARAMETER Experiment Name: At_100uM_ABA_Mutants_cDNA_P Parameter: Timepoint (hr) Value: 6
  misc_feature: MA Experiment 20000117 PARAMETER Experiment Name: At_100uM_ABA_Mutants_cDNA_P Parameter: Tissue Value: Aerial
  misc_feature: MA Experiment 20000117 PARAMETER Experiment Name: At_100uM_ABA_Mutants_cDNA_P Parameter: Treatment Value: 100uM ABA vs. No Treatment
  misc_feature: MA Experiment ID: 20000179 Result: Up-regulated in Transcription
  misc_feature: MA Experiment 20000179 PARAMETER Experiment Name: At_Germinating_Seeds_P Parameter: Age (hr) Value: 6 vs. 0
  misc_feature: MA Experiment 20000179 PARAMETER Experiment Name: At_Germinating_Seeds_P Parameter: Tissue Value: Germinating Seeds
  misc_feature: MA Experiment ID: 20000180 Result: Up-regulated in Transcription
  misc_feature: MA Experiment 20000180 PARAMETER Experiment Name: At_Germinating_Seeds_P Parameter: Age (hr) Value: 24 vs. 0
  misc_feature: MA Experiment 20000180 PARAMETER Experiment Name: At_Germinating_Seeds_P Parameter: Tissue Value: Germinating Seeds
  misc_feature: MA Experiment ID: 20000184 Result: Up-regulated in Transcription
  misc_feature: MA Experiment 20000184 PARAMETER Experiment Name: At_Shoots__P Parameter: Age (day) Value: 7
  misc_feature: MA Experiment 20000184 PARAMETER Experiment Name: At_Shoots__P Parameter: Tissue Value: Shoots vs. Whole Plant
  misc_feature: MA Experiment ID: 20000185 Result: Down-regulated in Transcription
  misc_feature: MA Experiment 20000185 PARAMETER Experiment Name: At_Roots__P Parameter: Age (day) Value: 7 vs. 21
  misc_feature: MA Experiment 20000185 PARAMETER Experiment Name: At_Roots__P Parameter: Organism Value: A. thaliana
  misc_feature: MA Experiment 20000185 PARAMETER Experiment Name: At_Roots__P Parameter: Tissue Value: Roots vs. Whole Plant
  misc_feature: MA Experiment ID: 20000227 Result: Up-regulated in Transcription
  misc_feature: MA Experiment 20000227 PARAMETER Experiment Name: At_Root-Tips-vs-Tops_P Parameter: Tissue Value: Root Tips vs. Root Tops
  misc_feature: MA Experiment ID: 20000234 Result: Up-regulated in Transcription
  misc_feature: MA Experiment 20000234 PARAMETER Experiment Name: At_Siliques_P Parameter: Age (day) Value: 21
  misc_feature: MA Experiment 20000234 PARAMETER Experiment Name: At_Siliques_P Parameter: Organism Value: A. thaliana
  misc_feature: MA Experiment 20000234 PARAMETER Experiment Name: At_Siliques_P Parameter: Plant Line Value: WS
  misc_feature: MA Experiment 20000234 PARAMETER Experiment Name: At_Siliques_P Parameter: Tissue Value: Less Than 5mm Siliques vs. Whole Plant
  misc_feature: MA Experiment ID: 20000437 Result: Down-regulated in Transcription
  misc_feature: MA Experiment 20000437 PARAMETER Experiment Name: At_Drought_P Parameter: Age (day) Value: 8
  misc_feature: MA Experiment 20000437 PARAMETER Experiment Name: At_Drought_P Parameter: Organism Value: A. thaliana
  misc_feature: MA Experiment 20000437 PARAMETER Experiment Name: At_Drought_P Parameter: Plant Line Value: WS
  misc_feature: MA Experiment 20000437 PARAMETER Experiment Name: At_Drought_P Parameter: Timepoint (hr) Value: 24
  misc_feature: MA Experiment 20000437 PARAMETER Experiment Name: At_Drought_P Parameter: Tissue Value: Whole Plant
  misc_feature: MA Experiment 20000437 PARAMETER Experiment Name: At_Drought_P Parameter: Treatment Value: Drought vs. No Drought
  misc_feature: MA Experiment ID: 20000439 Result: Down-regulated in Transcription
  misc_feature: MA Experiment 20000439 PARAMETER Experiment Name: At_Roots__P Parameter: Age (day) Value: 14 vs. 21
  misc_feature: MA Experiment 20000439 PARAMETER Experiment Name: At_Roots__P Parameter: Organism Value: A. thaliana
  misc_feature: MA Experiment 20000439 PARAMETER Experiment Name: At_Roots__P Parameter: Tissue Value: Roots vs. Whole Plant
  misc_feature: MA Experiment ID: 20000451 Result: Up-regulated in Transcription
  misc_feature: MA Experiment 20000451 PARAMETER Experiment Name: At_CS6879_Shoots-Roots_P Parameter: Age (day) Value: 14
  misc_feature: MA Experiment 20000451 PARAMETER Experiment Name: At_CS6879_Shoots-Roots_P Parameter: Organism Value: A. thaliana
  misc_feature: MA Experiment 20000451 PARAMETER Experiment Name: At_CS6879_Shoots-Roots_P Parameter: Plant Line Value: CS6879 vs. WS
  misc_feature: MA Experiment 20000451 PARAMETER Experiment Name: At_CS6879_Shoots-Roots_P Parameter: Tissue Value: Roots
  misc_feature: MA Experiment ID: 20000452 Result: Up-regulated in Transcription
  misc_feature: MA Experiment 20000452 PARAMETER Experiment Name: At_CS6879_Shoots-Roots_P Parameter: Age (day) Value: 14
  misc_feature: MA Experiment 20000452 PARAMETER Experiment Name: At_CS6879_Shoots-Roots_P Parameter: Organism Value: A. thaliana
  misc_feature: MA Experiment 20000452 PARAMETER Experiment Name: At_CS6879_Shoots-Roots_P Parameter: Plant Line Value: CS6879 vs. WS
  misc_feature: MA Experiment 20000452 PARAMETER Experiment Name: At_CS6879_Shoots-Roots_P Parameter: Tissue Value: Shoots
  misc_feature: MA Experiment ID: 20000527 Result: Up-regulated in Transcription
  misc_feature: MA Experiment 20000527 PARAMETER Experiment Name: At_10percent_PEG_P Parameter: Age (day) Value: 20
  misc_feature: MA Experiment 20000527 PARAMETER Experiment Name: At_10percent_PEG_P Parameter: Organism Value: A. thaliana
  misc_feature: MA Experiment 20000527 PARAMETER Experiment Name: At_10percent_PEG_P Parameter: Plant Line Value: WS
  misc_feature: MA Experiment 20000527 PARAMETER Experiment Name: At_10percent_PEG_P Parameter: Timepoint (day) Value: 20
  misc_feature: MA Experiment 20000527 PARAMETER Experiment Name: At_10percent_PEG_P Parameter: Tissue Value: Whole Plant
  misc_feature: MA Experiment 20000527 PARAMETER Experiment Name: At_10percent_PEG_P Parameter: Treatment Value: 10percent PEG vs. No Treatment
  misc_feature: MA Experiment ID: 20001450 Result: Down-regulated in Transcription
  misc_feature: MA Experiment 20001450 PARAMETER Experiment Name: At_Far-red-induction_P Parameter: Age (day) Value: 7
  misc_feature: MA Experiment 20001450 PARAMETER Experiment Name: At_Far-red-induction_P Parameter: Light Value: Far-red vs. White
  misc_feature: MA Experiment 20001450 PARAMETER Experiment Name: At_Far-red-induction_P Parameter: Organism Value: A. thaliana
  misc_feature: MA Experiment 20001450 PARAMETER Experiment Name: At_Far-red-induction_P Parameter: Plant Line Value: Columbia
  misc_feature: MA Experiment 20001450 PARAMETER Experiment Name: At_Far-red-induction_P Parameter: Timepoint (hr) Value: 8
  misc_feature: MA Experiment 20001450 PARAMETER Experiment Name: At_Far-red-induction_P Parameter: Tissue Value: Whole Plant
  misc_feature: MA Experiment ID: 20001757 Result: Up-regulated in Transcription
  misc_feature: MA Experiment 20001757 PARAMETER Experiment Name: At_50mM_NH4NO3_L-to-H_P Parameter: Timepoint (hr) Value: 6
  misc_feature: MA Experiment 20001757 PARAMETER Experiment Name: At_50mM_NH4NO3_L-to-H_P Parameter: Tissue Value: Leaf
  misc_feature: MA Experiment 20001757 PARAMETER Experiment Name: At_50mM_NH4NO3_L-to-H_P Parameter: Treatment Value: 50mM NH4NO3 vs 100mM Mannitol
  misc_feature: MA Experiment ID: 20001905 Result: Down-regulated in Transcription
  misc_feature: MA Experiment 20001905 PARAMETER Experiment Name: At_Drought_Reproduction_P Parameter: Age (day) Value: 40
  misc_feature: MA Experiment 20001905 PARAMETER Experiment Name: At_Drought_Reproduction_P Parameter: Organism Value: A. thaliana
  misc_feature: MA Experiment 20001905 PARAMETER Experiment Name: At_Drought_Reproduction_P Parameter: Plant Line Value: WS
  misc_feature: MA Experiment 20001905 PARAMETER Experiment Name: At_Drought_Reproduction_P Parameter: Timepoint (day) Value: 10
  misc_feature: MA Experiment 20001905 PARAMETER Experiment Name: At_Drought_Reproduction_P Parameter: Tissue Value: Rosettes
  misc_feature: MA Experiment 20001905 PARAMETER Experiment Name: At_Drought_Reproduction_P Parameter: Treatment Value: Drought vs. No Drought
attgtgagtcactctctctgtttctcatctcctcatctttttatcttctttgattgatccacatggcttccgctgccgcaagttccgccttttcactccttaagtccaccggcgctgttgcttcctccgccggaactcgcgcacgtgcctcccttctgccaattccctctacctctgtttccgcgcgtcctctaggcttctccgccactctagattcccgtcgtttctctctccacgttgcttccaaagttgaatcggtgcgtgggaagggaagcagaggagtggtttctatggcgaagaagagcgtcggagatctgacctcagctgatttgaaggggaagaaggttttcgtgagagctgatctcaatgtacctctcgatgataatcagactatcactgacgataccagaatccgtgccgccattccaacgatcaagtatttgattgaaaatggtgctaaagttatcctctccactcatctgggaaggccaaagggagtcaccccaaagtttagtttggctcctcttgtccctaggctctccgagcttcttggtattgaggtcacgaaagctgatgattgtattggcccagaagtggaaagcttggtggcttctctacctgaaggtggagttttgcttcttgagaacgtcaggttttacaaggaggaagagaagaacgatcctgagtttgctaagaagcttgcttctctagctgacctttatgtcaatgatgctttcggaactgctcacagagctcatgcttctaccgaaggagtcactaagttcttgaagccttcagttgctggtttccttttgcaaaaggaactggactacctagttggtgctgtttcaaacccaaagagaccatttgcagccatagtgggtggttccaaagtctcatccaagattggagttattgaatcgcttctggagaagtgtgatattcttcttcttggtggtggaatgatcttcacattctacaaggcacagggtctttcagttggttcgtcccttgttgaagaagacaagcttgaattggctacagaactccttgccaaagctaaggccaaaggagtctctcttttgttgccaacagatgttgtagttgctgacaagtttgctcctgatgccaacagcaagattgtgcctgcatcaggcattgaggacggatggatgggactggacattggtccagactctatcaaaactttcaacgaagctctggacacaacacaaacagtcatttggaatggacctatgggagttttcgagatggaaaagtttgcggctggaacagaggcgatagcgaataaactagcagagctaagtgaaaaaggagtgacaacgataataggaggaggagactcagtggctgcagtggagaaagtaggagtagcaggagtcatgagtcacatctccactggtggtggagccagcttggagctgttggaaggaaaagtacttcccggtgtgatcgcccttgatgaagcaatcccagtcactgtttagaaactcttaccatctataaggcaaacgctgtatacttaaaagagtttctttcgctttaaatctacctatgcaaaactttactatgtatcagagtctcattccccggaaaagaaaactcacatattaaaattctgaaaaaaaatatcaagagataag

SEQ ID NO: 35239 - protein, 481 aa, Arabidopsis thaliana
  peptide (1)..(481): Ceres Seq. ID no. 12334767
  misc_feature (78)..(477): Pfam Name: Phosphoglycerate kinase Pfam Description: Phosphoglycerate kinase
  misc_feature (55)..(465): Homolog of NCBI NO: 282833 NR Description: phosphoglycerate kinase (EC 2.7.2.3) - spinach
  misc_feature (1)..(477): Homolog of NCBI NO: 129915 NR Description: Phosphoglycerate kinase, chloroplast precursor
  misc_feature (55)..(481): Homolog of NCBI NO: 1346698 NR Description: Phosphoglycerate kinase, chloroplast precursor
  misc_feature (1)..(481): Homolog of NCBI NO: 7434544 NR Description: phosphoglycerate kinase (EC 2.7.2.3) precursor,
  misc_feature (1)..(481): Homolog of NCBI NO: 2499497 NR Description: Phosphoglycerate kinase, chloroplast precursor
  misc_feature (1)..(481): Homolog of NCBI NO: 3738261 NR Description: chloroplast phosphoglycerate kinase [Populus
  misc_feature (83)..(481): Homolog of NCBI NO: 2129669 NR Description: phosphoglycerate kinase (EC 2.7.2.3) OBP44 -
  misc_feature (1)..(481): Homolog of NCBI NO: 15223484 NR Description: phosphoglycerate kinase, putative
  misc_feature (1)..(481): Homolog of NCBI NO: 12644295 NR Description: PHOSPHOGLYCERATE KINASE, CHLOROPLAST PRECURSOR
  misc_feature (1)..(481): Homolog of NCBI NO: 15230595 NR Description: phosphoglycerate kinase, putative
MASAAASSAFSLLKSTGAVASSAGTRARASLLPIPSTSVSARPLGFSATLDSRRFSLHVASKVESVRGKGSRGVVSMAKKSVGDLTSADLKGKKVFVRADLNVPLDDNQTITDDTRIRAAIPTIKYLIENGAKVILSTHLGRPKGVTPKFSLAPLVPRLSELLGIEVTKADDCIGPEVESLVASLPEGGVLLLENVRFYKEEEKNDPEFAKKLASLADLYVNDAFGTAHRAHASTEGVTKFLKPSVAGFLLQKELDYLVGAVSNPKRPFAAIVGGSKVSSKIGVIESLLEKCDILLLGGGMIFTFYKAQGLSVGSSLVEEDKLELATELLAKAKAKGVSLLLPTDVVVADKFAPDANSKIVPASGIEDGWMGLDIGPDSIKTFNEALDTTQTVIWNGPMGVFEMEKFAAGTEAIANKLAELSEKGVTTIIGGGDSVAAVEKVGVAGVMSHISTGGGASLELLEGKVLPGVIALDEAIPVTV

SEQ ID NO: 35240 - protein, 405 aa, Arabidopsis thaliana
  peptide (1)..(405): Ceres Seq. ID no. 12334768
  misc_feature (2)..(401): Pfam Name: Phosphoglycerate kinase Pfam Description: Phosphoglycerate kinase
  misc_feature (1)..(389): Homolog of NCBI NO: 282833 NR Description: phosphoglycerate kinase (EC 2.7.2.3) - spinach
  misc_feature (1)..(401): Homolog of NCBI NO: 129915 NR Description: Phosphoglycerate kinase, chloroplast precursor
  misc_feature (1)..(405): Homolog of NCBI NO: 1346698 NR Description: Phosphoglycerate kinase, chloroplast precursor
  misc_feature (1)..(405): Homolog of NCBI NO: 7434544 NR Description: phosphoglycerate kinase (EC 2.7.2.3) precursor,
  misc_feature (1)..(405): Homolog of NCBI NO: 2499497 NR Description: Phosphoglycerate kinase, chloroplast precursor
  misc_feature (1)..(405): Homolog of NCBI NO: 3738261 NR Description: chloroplast phosphoglycerate kinase [Populus
  misc_feature (7)..(405): Homolog of NCBI NO: 2129669 NR Description: phosphoglycerate kinase (EC 2.7.2.3) OBP44 -
  misc_feature (1)..(405): Homolog of NCBI NO: 15223484 NR Description: phosphoglycerate kinase, putative
  misc_feature (1)..(405): Homolog of NCBI NO: 12644295 NR Description: PHOSPHOGLYCERATE KINASE, CHLOROPLAST PRECURSOR
  misc_feature (1)..(405): Homolog of NCBI NO: 15230595 NR Description: phosphoglycerate kinase, putative
MAKKSVGDLTSADLKGKKVFVRADLNVPLDDNQTITDDTRIRAAIPTIKYLIENGAKVILSTHLGRPKGVTPKFSLAPLVPRLSELLGIEVTKADDCIGPEVESLVASLPEGGVLLLENVRFYKEEEKNDPEFAKKLASLADLYVNDAFGTAHRAHASTEGVTKFLKPSVAGFLLQKELDYLVGAVSNPKRPFAAIVGGSKVSSKIGVIESLLEKCDILLLGGGMIFTFYKAQGLSVGSSLVEEDKLELATELLAKAKAKGVSLLLPTDVVVADKFAPDANSKIVPASGIEDGWMGLDIGPDSIKTFNEALDTTQTVIWNGPMGVFEMEKFAAGTEAIANKLAELSEKGVTTIIGGGDSVAAVEKVGVAGVMSHISTGGGASLELLEGKVLPGVIALDEAIPVTV

SEQ ID NO: 35241 - DNA, 1351 bp, Arabidopsis thaliana
  misc_feature (1)..(1351): Ceres Seq. ID no. 12396093
  misc_feature: MA Experiment ID: 108434 Result: Up-regulated in Transcription
  misc_feature: MA Experiment 108434 PARAMETER Experiment Name: At_Root_Tips_cDNA_P Parameter: Tissue Value: Root Tips
  misc_feature: MA Experiment ID: 108461 Result: Down-regulated in Transcription
  misc_feature: MA Experiment 108461 PARAMETER Experiment Name: At_Germinating_Seeds_cDNA_P Parameter: Age (day) Value: 1 vs. 0
  misc_feature: MA Experiment 108461 PARAMETER Experiment Name: At_Germinating_Seeds_cDNA_P Parameter: Tissue Value: Germinating Seeds
  misc_feature: MA Experiment ID: 108462 Result: Down-regulated in Transcription
  misc_feature: MA Experiment 108462 PARAMETER Experiment Name: At_Germinating_Seeds_cDNA_P Parameter: Age (day) Value: 2 vs. 0
  misc_feature: MA Experiment 108462 PARAMETER Experiment Name: At_Germinating_Seeds_cDNA_P Parameter: Tissue Value: Germinating Seeds
  misc_feature: MA Experiment ID: 108463 Result: Down-regulated in Transcription
  misc_feature: MA Experiment 108463 PARAMETER Experiment Name: At_Germinating_Seeds_cDNA_P Parameter: Age (day) Value: 3 vs. 0
  misc_feature: MA Experiment 108463 PARAMETER Experiment Name: At_Germinating_Seeds_cDNA_P Parameter: Tissue Value: Germinating Seeds
  misc_feature: MA Experiment ID: 108464 Result: Down-regulated in Transcription
  misc_feature: MA Experiment 108464 PARAMETER Experiment Name: At_Germinating_Seeds_cDNA_P Parameter: Age (day) Value: 4 vs. 0
  misc_feature: MA Experiment 108464 PARAMETER Experiment Name: At_Germinating_Seeds_cDNA_P Parameter: Tissue Value: Germinating Seeds
  misc_feature: MA Experiment ID: 108572 Result: Down-regulated in Transcription
  misc_feature: MA Experiment 108572 PARAMETER Experiment Name: At_Drought_cDNA_P Parameter: Timepoint (hr) Value: 1
  misc_feature: MA Experiment 108572 PARAMETER Experiment Name: At_Drought_cDNA_P Parameter: Tissue Value: Aerial
  misc_feature: MA Experiment 108572 PARAMETER Experiment Name: At_Drought_cDNA_P Parameter: Treatment Value: Drought vs. No Drought
  misc_feature: MA Experiment ID: 20000180 Result: Down-regulated in Transcription
  misc_feature: MA Experiment 20000180 PARAMETER Experiment Name: At_Germinating_Seeds_P Parameter: Age (hr) Value: 24 vs. 0
  misc_feature: MA Experiment 20000180 PARAMETER Experiment Name: At_Germinating_Seeds_P Parameter: Tissue Value: Germinating Seeds
  misc_feature: MA Experiment ID: 20001557 Result: Up-regulated in Transcription
  misc_feature: MA Experiment 20001557 PARAMETER Experiment Name: At_Drought_Soil_Dry_P Parameter: Age (day) Value: 27
  misc_feature: MA Experiment 20001557 PARAMETER Experiment Name: At_Drought_Soil_Dry_P Parameter: Organism Value: A. thaliana
  misc_feature: MA Experiment 20001557 PARAMETER Experiment Name: At_Drought_Soil_Dry_P Parameter: Plant Line Value: WS
  misc_feature: MA Experiment 20001557 PARAMETER Experiment Name: At_Drought_Soil_Dry_P Parameter: Post Timepoint (hr) Value: 3
  misc_feature: MA Experiment 20001557 PARAMETER Experiment Name: At_Drought_Soil_Dry_P Parameter: Post-Treatment Value: Re-Water vs. No Drought
  misc_feature: MA Experiment 20001557 PARAMETER Experiment Name: At_Drought_Soil_Dry_P Parameter: Timepoint (day) Value: 13
  misc_feature: MA Experiment 20001557 PARAMETER Experiment Name: At_Drought_Soil_Dry_P Parameter: Treatment Value: Drought vs. No Drought
  misc_feature: MA Experiment ID: 20001558 Result: Up-regulated in Transcription
  misc_feature: MA Experiment 20001558 PARAMETER Experiment Name: At_Drought_Soil_Dry_P Parameter: Age (day) Value: 27
  misc_feature: MA Experiment 20001558 PARAMETER Experiment Name: At_Drought_Soil_Dry_P Parameter: Organism Value: A. thaliana
  misc_feature: MA Experiment 20001558 PARAMETER Experiment Name: At_Drought_Soil_Dry_P Parameter: Plant Line Value: WS
  misc_feature: MA Experiment 20001558 PARAMETER Experiment Name: At_Drought_Soil_Dry_P Parameter: Post Timepoint (hr) Value: 6
  misc_feature: MA Experiment 20001558 PARAMETER Experiment Name: At_Drought_Soil_Dry_P Parameter: Post-Treatment Value: Re-Water vs. No Drought
  misc_feature: MA Experiment 20001558 PARAMETER Experiment Name: At_Drought_Soil_Dry_P Parameter: Timepoint (day) Value: 13
  misc_feature: MA Experiment 20001558 PARAMETER Experiment Name: At_Drought_Soil_Dry_P Parameter: Treatment Value: Drought vs. No Drought
ccgtttgttcttcatctcctcgccgccgcctcctactctctctttctctctaaattgctcaattctctcggccacagttctgctatagacctagacaaggatggtgactaaagcagaaaaacaattcgccaaaaatttcaacatagacgatctccctgacgtccctgccggacttcctccacatctcaaagcccagcaaactcgtgtcgtctctaaaaacaacgctcctgctcatactgcgagtgccatttactcgggtacctatgtttcttctacggaagaggacgacaatgtgaagctaggaaacttctatgataacttcaaagttgatgtggttagtctcacaaagacagatatggaatttgatatgattggtattgatgcagcgtttgccaatgcattccgaagattccttatagctgaggttccttcaatggctattgaaaaagtgtttatagcgtacaacacatcggttattatagacgaagttcttgctcacaggatgggtcttattccaattgccgcagatccaagactttttgaatatttatccgaacatgatcaggcgaatgaaaagaacaccattgtattcaaactccatgtgaaatgtccgaaaaatagaccacgtcttaaagttttaacgagtgatttaaaatggttaccaaatggaagtgagcttctgagagaatcggaaaataaaacctcaaagctaaaaacttacacttcattcagttgcagccaagattcattacctgaatttgctaataatcctatcactccatgcgacctcgatatcttgatagcaaaactcgcccctggtcaggaaatcgagctcgaagctcatgcggttaagggcattggtaaaacacatgcaaagtggtctccagtagggactgcttggtatagaatgcatcctgaggtggttctacgtggggaagttgaggatgaacttgctgaacgacttgtaaacgtctgcccacagaatgttttcgacattgaagacatgggaaaaggtaagaaaagggcaacagtagcgcagccacgtaagtgcacattgtgtaaggaatgcgtaagagacgatgatttggtagaccatgtggatcttggcagtgttaagaaccattttatatttaacattgagtccaccggatcactgcctccagaggttctcttcactgaagctgtgaagatattggaagctaaatgtgaagctataaccgacttttgagttctggtttagttcaattttgaattgtctgtctatcaatgtttctcctcctattgataaattaccaacaaacaacattgacatatttatttatacggttgttgttcaatttggattttcatt

SEQ ID NO: 35242 - protein, 375 aa, Arabidopsis thaliana
  peptide (1)..(375): Ceres Seq. ID no. 12396094
  misc_feature (117)..(261): Pfam Name: RNA polymerase Rpb3/RpoA insert domain Pfam Description: RNA polymerase Rpb3/RpoA insert domain
  misc_feature (29)..(374): Homolog of NCBI NO: 18266895 NR Description: DNA-directed RNA polymerase I 40 kDa polypeptide
  misc_feature (29)..(374): Homolog of NCBI NO: 6677787 NR Description: RNA polymerase 1-1
  misc_feature (29)..(374): Homolog of NCBI NO: 34874462 NR Description: similar to DNA-directed RNA polymerase I 40 kDa
  misc_feature (45)..(374): Homolog of NCBI NO: 14198113 NR Description: Unknown (protein for IMAGE:3448039) [Homo sapiens]
  misc_feature (29)..(374): Homolog of NCBI NO: 3914807 NR Description: DNA-directed RNA polymerase I 40 kDa polypeptide
  misc_feature (45)..(370): Homolog of NCBI NO: 34193909 NR Description: RNA polymerase 1-1 [Danio rerio]
  misc_feature (1)..(372): Homolog of NCBI NO: 15219773 NR Description: RNA polymerase subunit
  misc_feature (1)..(375): Homolog of NCBI NO: 514322 NR Description: RNA polymerase subunit
  misc_feature (1)..(375): Homolog of NCBI NO: 15219820 NR Description: RNA polymerase subunit
  misc_feature (1)..(375): Homolog of NCBI NO: 21592304 NR Description: RNA polymerase subunit [Arabidopsis thaliana]
MVTKAEKQFAKNFNIDDLPDVPAGLPPHLKAQQTRVVSKNNAPAHTASAIYSGTYVSSTEEDDNVKLGNFYDNFKVDVVSLTKTDMEFDMIGIDAAFANAFRRFLIAEVPSMAIEKVFIAYNTSVIIDEVLAHRMGLIPIAADPRLFEYLSEHDQANEKNTIVFKLHVKCPKNRPRLKVLTSDLKWLPNGSELLRESENKTSKLKTYTSFSCSQDSLPEFANNPITPCDLDILIAKLAPGQEIELEAHAVKGIGKTHAKWSPVGTAWYRMHPEVVLRGEVEDELAERLVNVCPQNVFDIEDMGKGKKRATVAQPRKCTLCKECVRDDDLVDHVDLGSVKNHFIFNIESTGSLPPEVLFTEAVKILEAKCEAITDF

SEQ ID NO: 35243 - protein, 290 aa, Arabidopsis thaliana
  peptide (1)..(290): Ceres Seq. ID no. 12396095
  misc_feature (32)..(176): Pfam Name: RNA polymerase Rpb3/RpoA insert domain Pfam Description: RNA polymerase Rpb3/RpoA insert domain
  misc_feature (1)..(289): Homolog of NCBI NO: 18266895 NR Description: DNA-directed RNA polymerase I 40 kDa polypeptide
  misc_feature (1)..(289): Homolog of NCBI NO: 6677787 NR Description: RNA polymerase 1-1
  misc_feature (1)..(289): Homolog of NCBI NO: 34874462 NR Description: similar to DNA-directed RNA polymerase I 40 kDa
  misc_feature (1)..(289): Homolog of NCBI NO: 14198113 NR Description: Unknown (protein for IMAGE:3448039) [Homo sapiens]
  misc_feature (1)..(289): Homolog of NCBI NO: 3914807 NR Description: DNA-directed RNA polymerase I 40 kDa polypeptide
  misc_feature (1)..(285): Homolog of NCBI NO: 34193909 NR Description: RNA polymerase 1-1 [Danio rerio]
  misc_feature (1)..(287): Homolog of NCBI NO: 15219773 NR Description: RNA polymerase subunit
  misc_feature (1)..(290): Homolog of NCBI NO: 514322 NR Description: RNA polymerase subunit
  misc_feature (1)..(290): Homolog of NCBI NO: 15219820 NR Description: RNA polymerase subunit
  misc_feature (1)..(290): Homolog of NCBI NO: 21592304 NR Description: RNA polymerase subunit [Arabidopsis thaliana]
MEFDMIGIDAAFANAFRRFLIAEVPSMAIEKVFIAYNTSVIIDEVLAHRMGLIPIAADPRLFEYLSEHDQANEKNTIVFKLHVKCPKNRPRLKVLTSDLKWLPNGSELLRESENKTSKLKTYTSFSCSQDSLPEFANNPITPCDLDILIAKLAPGQEIELEAHAVKGIGKTHAKWSPVGTAWYRMHPEVVLRGEVEDELAERLVNVCPQNVFDIEDMGKGKKRATVAQPRKCTLCKECVRDDDLVDHVDLGSVKNHFIFNIESTGSLPPEVLFTEAVKILEAKCEAITDF

SEQ ID NO: 35244 - protein, 286 aa, Arabidopsis thaliana
  peptide (1)..(286): Ceres Seq. ID no. 12396096
  misc_feature (28)..(172): Pfam Name: RNA polymerase Rpb3/RpoA insert domain Pfam Description: RNA polymerase Rpb3/RpoA insert domain
  misc_feature (1)..(285): Homolog of NCBI NO: 18266895 NR Description: DNA-directed RNA polymerase I 40 kDa polypeptide
  misc_feature (1)..(285): Homolog of NCBI NO: 6677787 NR Description: RNA polymerase 1-1
  misc_feature (1)..(285): Homolog of NCBI NO: 34874462 NR Description: similar to DNA-directed RNA polymerase I 40 kDa
  misc_feature (1)..(285): Homolog of NCBI NO: 14198113 NR Description: Unknown (protein for IMAGE:3448039) [Homo sapiens]
  misc_feature (1)..(285): Homolog of NCBI NO: 3914807 NR Description: DNA-directed RNA polymerase I 40 kDa polypeptide
  misc_feature (1)..(281): Homolog of NCBI NO: 34193909 NR Description: RNA polymerase 1-1 [Danio rerio]
  misc_feature (1)..(283): Homolog of NCBI NO: 15219773 NR Description: RNA polymerase subunit
  misc_feature (1)..(286): Homolog of NCBI NO: 514322 NR Description: RNA polymerase subunit
  misc_feature (1)..(286): Homolog of NCBI NO: 15219820 NR Description: RNA polymerase subunit
  misc_feature (1)..(286): Homolog of NCBI NO: 21592304 NR Description: RNA polymerase subunit [Arabidopsis thaliana]
MIGIDAAFANAFRRFLIAEVPSMAIEKVFIAYNTSVIIDEVLAHRMGLIPIAADPRLFEYLSEHDQANEKNTIVFKLHVKCPKNRPRLKVLTSDLKWLPNGSELLRESENKTSKLKTYTSFSCSQDSLPEFANNPITPCDLDILIAKLAPGQEIELEAHAVKGIGKTHAKWSPVGTAWYRMHPEVVLRGEVEDELAERLVNVCPQNVFDIEDMGKGKKRATVAQPRKCTLCKECVRDDDLVDHVDLGSVKNHFIFNIESTGSLPPEVLFTEAVKILEAKCEAITDF

SEQ ID NO: 35245 - DNA, 667 bp, Arabidopsis thaliana
  misc_feature (1)..(667): Ceres Seq. ID no. 13490933
  misc_feature: MA Experiment ID: 108434 Result: Up-regulated in Transcription
  misc_feature: MA Experiment 108434 PARAMETER Experiment Name: At_Root_Tips_cDNA_P Parameter: Tissue Value: Root Tips
  misc_feature: MA Experiment ID: 108435 Result: Down-regulated in Transcription
  misc_feature: MA Experiment 108435 PARAMETER Experiment Name: At_stm_Mutants_cDNA_P Parameter: Plant Line Value: wt Landsburg vs stm
  misc_feature: MA Experiment 108435 PARAMETER Experiment Name: At_stm_Mutants_cDNA_P Parameter: Tissue Value: Shoot Apical Meristem Region
  misc_feature: MA Experiment ID: 108573 Result: Down-regulated in Transcription
  misc_feature: MA Experiment 108573 PARAMETER Experiment Name: At_Drought_cDNA_P Parameter: Timepoint (hr) Value: 6
  misc_feature: MA Experiment 108573 PARAMETER Experiment Name: At_Drought_cDNA_P Parameter: Tissue Value: Aerial
  misc_feature: MA Experiment 108573 PARAMETER Experiment Name: At_Drought_cDNA_P Parameter: Treatment Value: Drought vs. No Drought
  misc_feature: MA Experiment ID: 108595 Result: Down-regulated in Transcription
  misc_feature: MA Experiment 108595 PARAMETER Experiment Name: At_Ler-pi_Ovule_cDNA_P Parameter: Plant Line Value: null
  misc_feature: MA Experiment ID: 20000070 Result: Down-regulated in Transcription
  misc_feature: MA Experiment 20000070 PARAMETER Experiment Name: At_100uM_ABA_Mutants_cDNA_P Parameter: Plant Line Value: CS24
  misc_feature: MA Experiment 20000070 PARAMETER Experiment Name: At_100uM_ABA_Mutants_cDNA_P Parameter: Timepoint (hr) Value: 6
  misc_feature: MA Experiment 20000070 PARAMETER Experiment Name: At_100uM_ABA_Mutants_cDNA_P Parameter: Tissue Value: Aerial
  misc_feature: MA Experiment 20000070 PARAMETER Experiment Name: At_100uM_ABA_Mutants_cDNA_P Parameter: Treatment Value: 100uM ABA vs. No Treatment
  misc_feature: MA Experiment ID: 20000071 Result: Down-regulated in Transcription
  misc_feature: MA Experiment 20000071 PARAMETER Experiment Name: At_100uM_ABA_Mutants_cDNA_P Parameter: Plant Line Value: CS8104
  misc_feature: MA Experiment 20000071 PARAMETER Experiment Name: At_100uM_ABA_Mutants_cDNA_P Parameter: Timepoint (hr) Value: 6
  misc_feature: MA Experiment 20000071 PARAMETER Experiment Name: At_100uM_ABA_Mutants_cDNA_P Parameter: Tissue Value: Aerial
  misc_feature: MA Experiment 20000071 PARAMETER Experiment Name: At_100uM_ABA_Mutants_cDNA_P Parameter: Treatment Value: 100uM ABA vs. No Treatment
  misc_feature: MA Experiment ID: 20000180 Result: Up-regulated in Transcription
  misc_feature: MA Experiment 20000180 PARAMETER Experiment Name: At_Germinating_Seeds_P Parameter: Age (hr) Value: 24 vs. 0
  misc_feature: MA Experiment 20000180 PARAMETER Experiment Name: At_Germinating_Seeds_P Parameter: Tissue Value: Germinating Seeds
  misc_feature: MA Experiment ID: 20000185 Result: Down-regulated in Transcription
  misc_feature: MA Experiment 20000185 PARAMETER Experiment Name: At_Roots__P Parameter: Age (day) Value: 7 vs. 21
  misc_feature: MA Experiment 20000185 PARAMETER Experiment Name: At_Roots__P Parameter: Organism Value: A. thaliana
  misc_feature: MA Experiment 20000185 PARAMETER Experiment Name: At_Roots__P Parameter: Tissue Value: Roots vs. Whole Plant
  misc_feature: MA Experiment ID: 20000437 Result: Down-regulated in Transcription
  misc_feature: MA Experiment 20000437 PARAMETER Experiment Name: At_Drought_P Parameter: Age (day) Value: 8
  misc_feature: MA Experiment 20000437 PARAMETER Experiment Name: At_Drought_P Parameter: Organism Value: A. thaliana
  misc_feature: MA Experiment 20000437 PARAMETER Experiment Name: At_Drought_P Parameter: Plant Line Value: WS
  misc_feature: MA Experiment 20000437 PARAMETER Experiment Name: At_Drought_P Parameter: Timepoint (hr) Value: 24
  misc_feature: MA Experiment 20000437 PARAMETER Experiment Name: At_Drought_P Parameter: Tissue Value: Whole Plant
  misc_feature: MA Experiment 20000437 PARAMETER Experiment Name: At_Drought_P Parameter: Treatment Value: Drought vs. No Drought
  misc_feature: MA Experiment ID: 20000439 Result: Down-regulated in Transcription
  misc_feature: MA Experiment 20000439 PARAMETER Experiment Name: At_Roots__P Parameter: Age (day) Value: 14 vs. 21
  misc_feature: MA Experiment 20000439 PARAMETER Experiment Name: At_Roots__P Parameter: Organism Value: A. thaliana
  misc_feature: MA Experiment 20000439 PARAMETER Experiment Name: At_Roots__P Parameter: Tissue Value: Roots vs. Whole Plant
  misc_feature: MA Experiment ID: 20000794 Result: Down-regulated in Transcription
  misc_feature: MA Experiment 20000794 PARAMETER Experiment Name: At_Petals_P Parameter: Age (day) Value: 23-25 days
  misc_feature: MA Experiment 20000794 PARAMETER Experiment Name: At_Petals_P Parameter: Plant Line Value: WS
  misc_feature: MA Experiment 20000794 PARAMETER Experiment Name: At_Petals_P Parameter: Tissue Value: Petals vs. Whole plant
  misc_feature: MA Experiment ID: 20001558 Result: Up-regulated in Transcription
  misc_feature: MA Experiment 20001558 PARAMETER Experiment Name: At_Drought_Soil_Dry_P Parameter: Age (day) Value: 27
  misc_feature: MA Experiment 20001558 PARAMETER Experiment Name: At_Drought_Soil_Dry_P Parameter: Organism Value: A. thaliana
  misc_feature: MA Experiment 20001558 PARAMETER Experiment Name: At_Drought_Soil_Dry_P Parameter: Plant Line Value: WS
  misc_feature: MA Experiment 20001558 PARAMETER Experiment Name: At_Drought_Soil_Dry_P Parameter: Post Timepoint (hr) Value: 6
  misc_feature: MA Experiment 20001558 PARAMETER Experiment Name: At_Drought_Soil_Dry_P Parameter: Post-Treatment Value: Re-Water vs. No Drought
  misc_feature: MA Experiment 20001558 PARAMETER Experiment Name: At_Drought_Soil_Dry_P Parameter: Timepoint (day) Value: 13
  misc_feature: MA Experiment 20001558 PARAMETER Experiment Name: At_Drought_Soil_Dry_P Parameter: Treatment Value: Drought vs. No Drought
  misc_feature: MA Experiment ID: 20001560 Result: Up-regulated in Transcription
  misc_feature: MA Experiment 20001560 PARAMETER Experiment Name: At_Drought_Soil_Dry_P Parameter: Age (day) Value: 28
  misc_feature: MA Experiment 20001560 PARAMETER Experiment Name: At_Drought_Soil_Dry_P Parameter: Organism Value: A. thaliana
  misc_feature: MA Experiment 20001560 PARAMETER Experiment Name: At_Drought_Soil_Dry_P Parameter: Plant Line Value: WS
  misc_feature: MA Experiment 20001560 PARAMETER Experiment Name: At_Drought_Soil_Dry_P Parameter: Post Timepoint (hr) Value: None
  misc_feature: MA Experiment 20001560 PARAMETER Experiment Name: At_Drought_Soil_Dry_P Parameter: Post-Treatment Value: None
  misc_feature: MA Experiment 20001560 PARAMETER Experiment Name: At_Drought_Soil_Dry_P Parameter: Timepoint (day) Value: 14
  misc_feature: MA Experiment 20001560 PARAMETER Experiment Name: At_Drought_Soil_Dry_P Parameter: Treatment Value: Drought vs. No Drought
  misc_feature: MA Experiment ID: 20001757 Result: Up-regulated in Transcription
  misc_feature: MA Experiment 20001757 PARAMETER Experiment Name: At_50mM_NH4NO3_L-to-H_P Parameter: Timepoint (hr) Value: 6
  misc_feature: MA Experiment 20001757 PARAMETER Experiment Name: At_50mM_NH4NO3_L-to-H_P Parameter: Tissue Value: Leaf
  misc_feature: MA Experiment 20001757 PARAMETER Experiment Name: At_50mM_NH4NO3_L-to-H_P Parameter: Treatment Value: 50mM NH4NO3 vs 100mM Mannitol
  misc_feature: MA Experiment ID: 20001906 Result: Down-regulated in Transcription
  misc_feature: MA Experiment 20001906 PARAMETER Experiment Name: At_Drought_Reproduction_P Parameter: Age (day) Value: 35
  misc_feature: MA Experiment 20001906 PARAMETER Experiment Name: At_Drought_Reproduction_P Parameter: Organism Value: A. thaliana
  misc_feature: MA Experiment 20001906 PARAMETER Experiment Name: At_Drought_Reproduction_P Parameter: Plant Line Value: WS
  misc_feature: MA Experiment 20001906 PARAMETER Experiment Name: At_Drought_Reproduction_P Parameter: Timepoint (day) Value: 5
  misc_feature: MA Experiment 20001906 PARAMETER Experiment Name: At_Drought_Reproduction_P Parameter: Tissue Value: Siliques
  misc_feature: MA Experiment 20001906 PARAMETER Experiment Name: At_Drought_Reproduction_P Parameter: Treatment Value: Drought vs. No Drought
aataaggcaaaaaggatttgcttttacgaacagagagcgagccagagagagtgagtaagagaatgacgagcgtgagtgggtgtggttcagtgagtctgataactaaccgcagtgcgttcttgggaaacggacttcaacaccgtgccgttttccttaaaccatggtcgtcttcttcgcttcagtctcggtccatggttgtcgaagccaaaaccaaaaccagcagcgaagacagaatcgcccgccactctcgtatccgtaagaaggttaatggtacaacagagaggccaaggctgtgtgtattccgatcaaacaagcatctttatgttcaagtgattgatgataccaagatgcacaccttagcttcagcttctactaagcagaaacctatctctgaagagttcgactacacctctggaccaaccattgaggtagcgaagaaagttggggaagtgatagcaaaatcttgcttggagaaaggtatcacaaaggtagcctttgaccgtggtggttacccttaccatggacgtattgaggctcttgctgctgcagcacgtgaacacggtcttcagttttaaccgtcgttttctttccttgtttctttccgatgaacagcagtgtatgaatgtagagaacccattttccccaattgaaatgttgagatttttct

SEQ ID NO: 35246 - protein, 170 aa, Arabidopsis thaliana
  peptide (1)..(170): Ceres Seq. ID no. 13490934
  misc_feature (52)..(170): Pfam Name: Ribosomal L18p/L5e family Pfam Description: Ribosomal L18p/L5e family
  misc_feature (50)..(170): Homolog of NCBI NO: 16077200 NR Description: ribosomal protein L18 [Bacillus subtilis]
  misc_feature (50)..(170): Homolog of NCBI NO: 17231692 NR Description: 50S ribosomal protein L18 [Nostoc sp. PCC 7120]
  misc_feature (49)..(170): Homolog of NCBI NO: 15606750 NR Description: ribosomal protein L18 [Aquifex aeolicus]
  misc_feature (50)..(170): Homolog of NCBI NO: 1172978 NR Description: 50S ribosomal protein L18
  misc_feature (57)..(170): Homolog of NCBI NO: 143423 NR Description: ribosomal protein L18
  misc_feature (57)..(170): Homolog of NCBI NO: 132724 NR Description: 50S RIBOSOMAL PROTEIN L18
  misc_feature (49)..(170): Homolog of NCBI NO: 3980238 NR Description: ribosomal protein L18 [Thermotoga maritima]
  misc_feature (49)..(170): Homolog of NCBI NO: 15644232 NR Description: ribosomal protein L18 [Thermotoga maritima]
  misc_feature (33)..(170): Homolog of NCBI NO: 34897318 NR Description: putative ribosomal protein L18 [Oryza sativa]
  misc_feature (1)..(170): Homolog of NCBI NO: 15221153 NR Description: ribosomal protein L18p family [Arabidopsis
MTSVSGCGSVSLITNRSAFLGNGLQHRAVFLKPWSSSSLQSRSMVVEAKTKTSSEDRIARHSRIRKKVNGTTERPRLCVFRSNKHLYVQVIDDTKMHTLASASTKQKPISEEFDYTSGPTIEVAKKVGEVIAKSCLEKGITKVAFDRGGYPYHGRIEALAAAAREHGLQF

SEQ ID NO: 35247 - protein, 127 aa, Arabidopsis thaliana
  peptide (1)..(127): Ceres Seq. ID no. 13490935
  misc_feature (9)..(127): Pfam Name: Ribosomal L18p/L5e family Pfam Description: Ribosomal L18p/L5e family
  misc_feature (7)..(127): Homolog of NCBI NO: 16077200 NR Description: ribosomal protein L18 [Bacillus subtilis]
  misc_feature (7)..(127): Homolog of NCBI NO: 17231692 NR Description: 50S ribosomal protein L18 [Nostoc sp. PCC 7120]
  misc_feature (6)..(127): Homolog of NCBI NO: 15606750 NR Description: ribosomal protein L18 [Aquifex aeolicus]
  misc_feature (7)..(127): Homolog of NCBI NO: 1172978 NR Description: 50S ribosomal protein L18
  misc_feature (14)..(127): Homolog of NCBI NO: 143423 NR Description: ribosomal protein L18
  misc_feature (14)..(127): Homolog of NCBI NO: 132724 NR Description: 50S RIBOSOMAL PROTEIN L18
  misc_feature (6)..(127): Homolog of NCBI NO: 3980238 NR Description: ribosomal protein L18 [Thermotoga maritima]
  misc_feature (6)..(127): Homolog of NCBI NO: 15644232 NR Description: ribosomal protein L18 [Thermotoga maritima]
  misc_feature (1)..(127): Homolog of NCBI NO: 34897318 NR Description: putative ribosomal protein L18 [Oryza sativa]
  misc_feature (1)..(127): Homolog of NCBI NO: 15221153 NR Description: ribosomal protein L18p family [Arabidopsis
MVVEAKTKTSSEDRIARHSRIRKKVNGTTERPRLCVFRSNKHLYVQVIDDTKMHTLASASTKQKPISEEFDYTSGPTIEVAKKVGEVIAKSCLEKGITKVAFDRGGYPYHGRIEALAAAAREHGLQF

SEQ ID NO: 35248 - DNA, 818 bp, Arabidopsis thaliana
  misc_feature (1)..(818): Ceres Seq. ID no. 12396779
  misc_feature: MA Experiment ID: 108462 Result: Up-regulated in Transcription
  misc_feature: MA Experiment 108462 PARAMETER Experiment Name: At_Germinating_Seeds_cDNA_P Parameter: Age (day) Value: 2 vs. 0
  misc_feature: MA Experiment 108462 PARAMETER Experiment Name: At_Germinating_Seeds_cDNA_P Parameter: Tissue Value: Germinating Seeds
  misc_feature: MA Experiment ID: 108464 Result: Up-regulated in Transcription
  misc_feature: MA Experiment 108464 PARAMETER Experiment Name: At_Germinating_Seeds_cDNA_P Parameter: Age (day) Value: 4 vs. 0
  misc_feature: MA Experiment 108464 PARAMETER Experiment Name: At_Germinating_Seeds_cDNA_P Parameter: Tissue Value: Germinating Seeds
  misc_feature: MA Experiment ID: 20000182 Result: Up-regulated in Transcription
  misc_feature: MA Experiment 20000182 PARAMETER Experiment Name: At_2mM_SA_P Parameter: Age (day) Value: 14
  misc_feature: MA Experiment 20000182 PARAMETER Experiment Name: At_2mM_SA_P Parameter: Organism Value: A. thaliana
  misc_feature: MA Experiment 20000182 PARAMETER Experiment Name: At_2mM_SA_P Parameter: Plant Line Value: WS
  misc_feature: MA Experiment 20000182 PARAMETER Experiment Name: At_2mM_SA_P Parameter: Timepoint (hr) Value: 6
  misc_feature: MA Experiment 20000182 PARAMETER Experiment Name: At_2mM_SA_P Parameter: Tissue Value: Aerial
  misc_feature: MA Experiment 20000182 PARAMETER Experiment Name: At_2mM_SA_P Parameter: Treatment Value: 2mM SA vs. No Treatment
  misc_feature: MA Experiment ID: 20000185 Result: Up-regulated in Transcription
  misc_feature: MA Experiment 20000185 PARAMETER Experiment Name: At_Roots__P Parameter: Age (day) Value: 7 vs. 21
  misc_feature: MA Experiment 20000185 PARAMETER Experiment Name: At_Roots__P Parameter: Organism Value: A. thaliana
  misc_feature: MA Experiment 20000185 PARAMETER Experiment Name: At_Roots__P Parameter: Tissue Value: Roots vs. Whole Plant
  misc_feature: MA Experiment ID: 20000264 Result: Down-regulated in Transcription
  misc_feature: MA Experiment 20000264 PARAMETER Experiment Name: At_Open_Flower_P Parameter: Age (day) Value: 21
  misc_feature: MA Experiment 20000264 PARAMETER Experiment Name: At_Open_Flower_P Parameter: Plant Line Value: WS
  misc_feature: MA Experiment 20000264 PARAMETER Experiment Name: At_Open_Flower_P Parameter: Tissue Value: Open Flower vs. Whole Plant
  misc_feature: MA Experiment ID: 20000265 Result: Down-regulated in Transcription
  misc_feature: MA Experiment 20000265 PARAMETER Experiment Name: At_Open_Flower_P Parameter: Age (day) Value: 21
  misc_feature: MA Experiment 20000265 PARAMETER Experiment Name: At_Open_Flower_P Parameter: Plant Line Value: WS
  misc_feature: MA Experiment 20000265 PARAMETER Experiment Name: At_Open_Flower_P Parameter: Tissue Value: Closed Flower vs. Whole Plant
  misc_feature: MA Experiment ID: 20000286 Result: Down-regulated in Transcription
  misc_feature: MA Experiment 20000286 PARAMETER Experiment Name: At_Open_Flower_P Parameter: Age (day) Value: 21
  misc_feature: MA Experiment 20000286 PARAMETER Experiment Name: At_Open_Flower_P Parameter: Plant Line Value: WS
  misc_feature: MA Experiment 20000286 PARAMETER Experiment Name: At_Open_Flower_P Parameter: Tissue Value: Half Open vs. Whole Plant
  misc_feature: MA Experiment ID: 20000438 Result: Down-regulated in Transcription
  misc_feature: MA Experiment 20000438 PARAMETER Experiment Name: At_Shoots__P Parameter: Age (day) Value: 14
  misc_feature: MA Experiment 20000438 PARAMETER Experiment Name: At_Shoots__P Parameter: Tissue Value: Shoots vs. Whole Plant
  misc_feature: MA Experiment ID: 20000439 Result: Up-regulated in Transcription
  misc_feature: MA Experiment 20000439 PARAMETER Experiment Name: At_Roots__P Parameter: Age (day) Value: 14 vs. 21
  misc_feature: MA Experiment 20000439 PARAMETER Experiment Name: At_Roots__P Parameter: Organism Value: A. thaliana
  misc_feature: MA Experiment 20000439 PARAMETER Experiment Name: At_Roots__P Parameter: Tissue Value: Roots vs. Whole Plant
  misc_feature: MA Experiment ID: 20000453 Result: Up-regulated in Transcription
  misc_feature: MA Experiment 20000453 PARAMETER Experiment Name: At_100uM_ABA_P Parameter: Age (day) Value: 15
  misc_feature: MA Experiment 20000453 PARAMETER Experiment Name: At_100uM_ABA_P Parameter: Organism Value: A. thaliana
  misc_feature: MA Experiment 20000453 PARAMETER Experiment Name: At_100uM_ABA_P Parameter: Plant Line Value: WS
  misc_feature: MA Experiment 20000453 PARAMETER Experiment Name: At_100uM_ABA_P Parameter: Timepoint (hr) Value: 24
  misc_feature: MA Experiment 20000453 PARAMETER Experiment Name: At_100uM_ABA_P Parameter: Tissue Value: Aerial
  misc_feature: MA Experiment 20000453 PARAMETER Experiment Name: At_100uM_ABA_P Parameter: Treatment Value: 100uM ABA vs. No Treatment
  misc_feature: MA Experiment ID: 20001556 Result: Down-regulated in Transcription
  misc_feature: MA Experiment 20001556 PARAMETER Experiment Name: At_Drought_Soil_Dry_P Parameter: Age (day) Value: 26
  misc_feature: MA Experiment 20001556 PARAMETER Experiment Name: At_Drought_Soil_Dry_P Parameter: Organism Value: A. thaliana
  misc_feature: MA Experiment 20001556 PARAMETER Experiment Name: At_Drought_Soil_Dry_P Parameter: Plant Line Value: WS
  misc_feature: MA Experiment 20001556 PARAMETER Experiment Name: At_Drought_Soil_Dry_P Parameter: Post Timepoint (hr) Value: None
  misc_feature: MA Experiment 20001556 PARAMETER Experiment Name: At_Drought_Soil_Dry_P Parameter: Post-Treatment Value: None
  misc_feature: MA Experiment 20001556 PARAMETER Experiment Name: At_Drought_Soil_Dry_P Parameter: Timepoint (day) Value: 12
  misc_feature: MA Experiment 20001556 PARAMETER Experiment Name: At_Drought_Soil_Dry_P Parameter: Treatment Value: Drought vs. No Drought
  misc_feature: MA Experiment ID: 20001558 Result: Down-regulated in Transcription
  misc_feature: MA Experiment 20001558 PARAMETER Experiment Name: At_Drought_Soil_Dry_P Parameter: Age (day) Value: 27
  misc_feature: MA Experiment 20001558 PARAMETER Experiment Name: At_Drought_Soil_Dry_P Parameter: Organism Value: A. thaliana
  misc_feature: MA Experiment 20001558 PARAMETER Experiment Name: At_Drought_Soil_Dry_P Parameter: Plant Line Value: WS
  misc_feature: MA Experiment 20001558 PARAMETER Experiment Name: At_Drought_Soil_Dry_P Parameter: Post Timepoint (hr) Value: 6
  misc_feature: MA Experiment 20001558 PARAMETER Experiment Name: At_Drought_Soil_Dry_P Parameter: Post-Treatment Value: Re-Water vs. No Drought
  misc_feature: MA Experiment 20001558 PARAMETER Experiment Name: At_Drought_Soil_Dry_P Parameter: Timepoint (day) Value: 13
  misc_feature: MA Experiment 20001558 PARAMETER Experiment Name: At_Drought_Soil_Dry_P Parameter: Treatment Value: Drought vs. No Drought
  misc_feature: Phenotype: INFLORESCENCE Height-Short
  misc_feature: Phenotype: FERTILITY Fertility-Reduced
  misc_feature: Phenotype: INFLORESCENCE Height-Short
  misc_feature: Phenotype: FERTILITY Fertility-Reduced
  misc_feature: Phenotype: INFLORESCENCE Height-Short
  misc_feature: Phenotype: FERTILITY Fertility-Reduced
aacttctctctccaaagccatcatcttaattagttttggttagtacctgcaggttcttggtttttaaagtcaaagtctcttttgtgcttctcgtaaagagcgatcatgaaagtgcttctcggtcttttgcttctcttgtccttgaccaattcttcaagtgcaatttactgtctctgtaaagatgggataggagacacagagcttcaaacatcaatagactatgcatgtggaaccttagctgattgtaatcctatacatgataagggtacttgttatcaaccagacaccatcaaaagccactgtgattgggctgtgaatagctacttccaaaacgcagctcaagtccctggaagctgcaatttctctggcactgccactaccaatccaaacccaccttccaatttggctaatggttgcatctatccgtcaagccctagctctactaggtctcctccatcaacaacaccaccaacgggaacaactcccacaaacggaaccactccatttccgggaactccatttccaggaacaccgttcccgggaactcctccggtgtttggtccaaccggagtcttcaacccaagcaacccaggcagtggtgcttcaagtttgggcacctcctctgttttcacactctgtttttcattactagcctttctatggggctctgatgtaaggttcggatttagccacgtgtagagactaaaagacatccacttgtgttagtctttgattctattttgggtggaacaagaagcttaggcgtttgttgagctttcgtctatgtaaaggttgctctaatagaaagaatcttgagt

SEQ ID NO: 35249 - protein, 197 aa, Arabidopsis thaliana
  peptide (1)..(197): Ceres Seq. ID no. 12396780
  misc_feature (76)..(184): Pfam Name: Mucin-like glycoprotein Pfam Description: Mucin-like glycoprotein
  misc_feature (21)..(162): Homolog of NCBI NO: 34912962 NR Description: beta-1,3 glucanase-like protein
  misc_feature (1)..(185): Homolog of NCBI NO: 15241485 NR Description: glycosyl hydrolase family 17
  misc_feature (1)..(185): Homolog of NCBI NO: 21592859 NR Description: unknown [Arabidopsis thaliana]
  misc_feature (1)..(168): Homolog of NCBI NO: 25404810 NR Description: unknown protein, 45065-49536 [imported] -
  misc_feature (1)..(168): Homolog of NCBI NO: 21553768 NR Description: unknown [Arabidopsis thaliana]
  misc_feature (1)..(168): Homolog of NCBI NO: 18409239 NR Description: unknown protein
  misc_feature (1)..(183): Homolog of NCBI NO: 30697478 NR Description: glycosyl hydrolase family 17 [Arabidopsis
  misc_feature (1)..(174): Homolog of NCBI NO: 22325443 NR Description: similar to glycosyl hydrolase family 17; protein
  misc_feature (19)..(191): Homolog of NCBI NO: 8778409 NR Description: F16A14.5 [Arabidopsis thaliana]
  misc_feature (1)..(197): Homolog of NCBI NO: 30683485 NR Description: expressed protein [Arabidopsis thaliana]
MKVLLGLLLLLSLTNSSSAIYCLCKDGIGDTELQTSIDYACGTLADCNPIHDKGTCYQPDTIKSHCDWAVNSYFQNAAQVPGSCNFSGTATTNPNPPSNLANGCIYPSSPSSTRSPPSTTPPTGTTPTNGTTPFPGTPFPGTPFPGTPPVFGPTGVFNPSNPGSGASSLGTSSVFTLCFSLLAFLWGSDVRFGFSHV

SEQ ID NO: 35250 - DNA, 542 bp, Arabidopsis thaliana
  misc_feature (1)..(542): Ceres Seq. ID no. 12348596
  misc_feature: MA Experiment ID: 108434 Result: Up-regulated in Transcription
  misc_feature: MA Experiment 108434 PARAMETER Experiment Name: At_Root_Tips_cDNA_P Parameter: Tissue Value: Root Tips
  misc_feature: MA Experiment ID: 108488 Result: Down-regulated in Transcription
  misc_feature: MA Experiment ID: 108561 Result: Down-regulated in Transcription
  misc_feature: MA Experiment 108561 PARAMETER Experiment Name: At_100uM_ABA_cDNA_P Parameter: Timepoint (hr) Value: 6
  misc_feature: MA Experiment 108561 PARAMETER Experiment Name: At_100uM_ABA_cDNA_P Parameter: Tissue Value: Aerial
  misc_feature: MA Experiment 108561 PARAMETER Experiment Name: At_100uM_ABA_cDNA_P Parameter: Treatment Value: 100uM ABA vs. No Treatment
  misc_feature: MA Experiment ID: 108569 Result: Down-regulated in Transcription
  misc_feature: MA Experiment 108569 PARAMETER Experiment Name: At_0.001%_MeJA__cDNA_P Parameter: Timepoint (hr) Value: 6
  misc_feature: MA Experiment 108569 PARAMETER Experiment Name: At_0.001%_MeJA__cDNA_P Parameter: Tissue Value: Aerial
  misc_feature: MA Experiment 108569 PARAMETER Experiment Name: At_0.001%_MeJA__cDNA_P Parameter: Treatment Value: 0.001% MeJA vs. No Treatment
  misc_feature: MA Experiment ID: 108573 Result: Down-regulated in Transcription
  misc_feature: MA Experiment 108573 PARAMETER Experiment Name: At_Drought_cDNA_P Parameter: Timepoint (hr) Value: 6
  misc_feature: MA Experiment 108573 PARAMETER Experiment Name: At_Drought_cDNA_P Parameter: Tissue Value: Aerial
  misc_feature: MA Experiment 108573 PARAMETER Experiment Name: At_Drought_cDNA_P Parameter: Treatment Value: Drought vs. No Drought
  misc_feature: MA Experiment ID: 108576 Result: Down-regulated in Transcription
  misc_feature: MA Experiment 108576 PARAMETER Experiment Name: At_42deg_Heat_cDNA_P Parameter: Temperature (deg C) Value: 42 vs. 22
  misc_feature: MA Experiment 108576 PARAMETER Experiment Name: At_42deg_Heat_cDNA_P Parameter: Timepoint (hr) Value: 1
  misc_feature: MA Experiment 108576 PARAMETER Experiment Name: At_42deg_Heat_cDNA_P Parameter: Tissue Value: Aerial
  misc_feature: MA Experiment ID: 108577 Result: Down-regulated in Transcription
  misc_feature: MA Experiment 108577 PARAMETER Experiment Name: At_42deg_Heat_cDNA_P Parameter: Temperature (deg C) Value: 42 vs. 22
  misc_feature: MA Experiment 108577 PARAMETER Experiment Name: At_42deg_Heat_cDNA_P Parameter: Timepoint (hr) Value: 6
  misc_feature: MA Experiment 108577 PARAMETER Experiment Name: At_42deg_Heat_cDNA_P Parameter: Tissue Value: Aerial
  misc_feature: MA Experiment ID: 108585 Result: Down-regulated in Transcription
  misc_feature: MA Experiment 108585 PARAMETER Experiment Name: At_5mM_NaNP_cDNA_P Parameter: Timepoint (hr) Value: 6
  misc_feature: MA Experiment 108585 PARAMETER Experiment Name: At_5mM_NaNP_cDNA_P Parameter: Tissue Value: Aerial
  misc_feature: MA Experiment 108585 PARAMETER Experiment Name: At_5mM_NaNP_cDNA_P Parameter: Treatment Value: null
  misc_feature: MA Experiment ID: 20000093 Result: Down-regulated in Transcription
  misc_feature: MA Experiment 20000093 PARAMETER Experiment Name: At_42deg_Heat_cDNA_P Parameter: Temperature (deg C) Value: 42 vs. 22
  misc_feature: MA Experiment 20000093 PARAMETER Experiment Name: At_42deg_Heat_cDNA_P Parameter: Timepoint (hr) Value: 0.5
  misc_feature: MA Experiment 20000093 PARAMETER Experiment Name: At_42deg_Heat_cDNA_P Parameter: Tissue Value: Aerial
  misc_feature: MA Experiment ID: 20000111 Result: Down-regulated in Transcription
  misc_feature: MA Experiment 20000111 PARAMETER Experiment Name: At_42deg_Heat_cDNA_P Parameter: Temperature (deg C) Value: 42 vs. 22
  misc_feature: MA Experiment 20000111 PARAMETER Experiment Name: At_42deg_Heat_cDNA_P Parameter: Timepoint (hr) Value: 6
  misc_feature: MA Experiment 20000111 PARAMETER Experiment Name: At_42deg_Heat_cDNA_P Parameter: Tissue Value: Aerial
  misc_feature: MA Experiment ID: 20000112 Result: Down-regulated in Transcription
  misc_feature: MA Experiment 20000112 PARAMETER Experiment Name: At_42deg_Heat_cDNA_P Parameter: Temperature (deg C) Value: 42 vs. 22
  misc_feature: MA Experiment 20000112 PARAMETER Experiment Name: At_42deg_Heat_cDNA_P Parameter: Timepoint (hr) Value: 2
  misc_feature: MA Experiment 20000112 PARAMETER Experiment Name: At_42deg_Heat_cDNA_P Parameter: Tissue Value: Aerial
  misc_feature: MA Experiment ID: 20000113 Result: Down-regulated in Transcription
  misc_feature: MA Experiment 20000113 PARAMETER Experiment Name: At_42deg_Heat_cDNA_P Parameter: Temperature (deg C) Value: 42 vs. 22
  misc_feature: MA Experiment 20000113 PARAMETER Experiment Name: At_42deg_Heat_cDNA_P Parameter: Timepoint (hr) Value: 8
  misc_feature: MA Experiment 20000113 PARAMETER Experiment Name: At_42deg_Heat_cDNA_P Parameter: Tissue Value: Aerial
  misc_feature: MA Experiment ID: 20000144 Result: Down-regulated in Transcription
  misc_feature: MA Experiment 20000144 PARAMETER Experiment Name: At_42deg_Heat_cDNA_P Parameter: Temperature (deg C) Value: 42 vs. 22
  misc_feature: MA Experiment 20000144 PARAMETER Experiment Name: At_42deg_Heat_cDNA_P Parameter: Timepoint (hr) Value: 1
  misc_feature: MA Experiment 20000144 PARAMETER Experiment Name: At_42deg_Heat_cDNA_P Parameter: Tissue Value: Aerial
  misc_feature: MA Experiment ID: 20000179 Result: Up-regulated in Transcription
  misc_feature: MA Experiment 20000179 PARAMETER Experiment Name: At_Germinating_Seeds_P Parameter: Age (hr) Value: 6 vs. 0
  misc_feature: MA Experiment 20000179 PARAMETER Experiment Name: At_Germinating_Seeds_P Parameter: Tissue Value: Germinating Seeds
  misc_feature: MA Experiment ID: 20000180 Result: Up-regulated in Transcription
  misc_feature: MA Experiment 20000180 PARAMETER Experiment Name: At_Germinating_Seeds_P Parameter: Age (hr) Value: 24 vs. 0
  misc_feature: MA Experiment 20000180 PARAMETER Experiment Name: At_Germinating_Seeds_P Parameter: Tissue Value: Germinating Seeds
  misc_feature: MA Experiment ID: 20000184 Result: Up-regulated in Transcription
  misc_feature: MA Experiment 20000184 PARAMETER Experiment Name: At_Shoots__P Parameter: Age (day) Value: 7
  misc_feature: MA Experiment 20000184 PARAMETER Experiment Name: At_Shoots__P Parameter: Tissue Value: Shoots vs. Whole Plant
  misc_feature: MA Experiment ID: 20000264 Result: Up-regulated in Transcription
  misc_feature: MA Experiment 20000264 PARAMETER Experiment Name: At_Open_Flower_P Parameter: Age (day) Value: 21
  misc_feature: MA Experiment 20000264 PARAMETER Experiment Name: At_Open_Flower_P Parameter: Plant Line Value: WS
  misc_feature: MA Experiment 20000264 PARAMETER Experiment Name: At_Open_Flower_P Parameter: Tissue Value: Open Flower vs. Whole Plant
  misc_feature: MA Experiment ID: 20000265 Result: Up-regulated in Transcription
  misc_feature: MA Experiment 20000265 PARAMETER Experiment Name: At_Open_Flower_P Parameter: Age (day) Value: 21
  misc_feature: MA Experiment 20000265 PARAMETER Experiment Name: At_Open_Flower_P Parameter: Plant Line Value: WS
  misc_feature: MA Experiment 20000265 PARAMETER Experiment Name: At_Open_Flower_P Parameter: Tissue Value: Closed Flower vs. Whole Plant
  misc_feature: MA Experiment ID: 20001555 Result: Down-regulated in Transcription
  misc_feature: MA Experiment 20001555 PARAMETER Experiment Name: At_Drought_Soil_Dry_P Parameter: Age (day) Value: 24
  misc_feature: MA Experiment 20001555 PARAMETER Experiment Name: At_Drought_Soil_Dry_P Parameter: Organism Value: A. thaliana
  misc_feature: MA Experiment 20001555 PARAMETER Experiment Name: At_Drought_Soil_Dry_P Parameter: Plant Line Value: WS
  misc_feature: MA Experiment 20001555 PARAMETER Experiment Name: At_Drought_Soil_Dry_P Parameter: Post Timepoint (hr) Value: None
  misc_feature: MA Experiment 20001555 PARAMETER Experiment Name: At_Drought_Soil_Dry_P Parameter: Post-Treatment Value: None
  misc_feature: MA Experiment 20001555 PARAMETER Experiment Name: At_Drought_Soil_Dry_P Parameter: Timepoint (day) Value: 10
  misc_feature: MA Experiment 20001555 PARAMETER Experiment Name: At_Drought_Soil_Dry_P Parameter: Treatment Value: Drought vs. No Drought
  misc_feature: MA Experiment ID: 20001556 Result: Down-regulated in Transcription
  misc_feature: MA Experiment 20001556 PARAMETER Experiment Name: At_Drought_Soil_Dry_P Parameter: Age (day) Value: 26
  misc_feature: MA Experiment 20001556 PARAMETER Experiment Name: At_Drought_Soil_Dry_P Parameter: Organism Value: A. thaliana
  misc_feature: MA Experiment 20001556 PARAMETER Experiment Name: At_Drought_Soil_Dry_P Parameter: Plant Line Value: WS
  misc_feature: MA Experiment 20001556 PARAMETER Experiment Name: At_Drought_Soil_Dry_P Parameter: Post Timepoint (hr) Value: None
  misc_feature: MA Experiment 20001556 PARAMETER Experiment Name: At_Drought_Soil_Dry_P Parameter: Post-Treatment Value: None
  misc_feature: MA Experiment 20001556 PARAMETER Experiment Name: At_Drought_Soil_Dry_P Parameter: Timepoint (day) Value: 12
  misc_feature: MA Experiment 20001556 PARAMETER Experiment Name: At_Drought_Soil_Dry_P Parameter: Treatment Value: Drought vs. No Drought
  misc_feature: MA Experiment ID: 20001559 Result: Down-regulated in Transcription
  misc_feature: MA Experiment 20001559 PARAMETER Experiment Name: At_Drought_Soil_Dry_P Parameter: Age (day) Value: 28
  misc_feature: MA Experiment 20001559 PARAMETER Experiment Name: At_Drought_Soil_Dry_P Parameter: Organism Value: A. thaliana
  misc_feature: MA Experiment 20001559 PARAMETER Experiment Name: At_Drought_Soil_Dry_P Parameter: Plant Line Value: WS
  misc_feature: MA Experiment 20001559 PARAMETER Experiment Name: At_Drought_Soil_Dry_P Parameter: Post Timepoint (hr) Value: 29
  misc_feature: MA Experiment 20001559 PARAMETER Experiment Name: At_Drought_Soil_Dry_P Parameter: Post-Treatment Value: Re-Water vs. No Drought
  misc_feature: MA Experiment 20001559 PARAMETER Experiment Name: At_Drought_Soil_Dry_P Parameter: Timepoint (day) Value: 14
  misc_feature: MA Experiment 20001559 PARAMETER Experiment Name: At_Drought_Soil_Dry_P Parameter: Treatment Value: Drought vs. No Drought
ctcagaacatctcaatctcaattgaaatcttaaaatccaaaattttcccgagaaaaattaaagtttcctgagaaaatgtcaggtcgtgggaagggaggcaaaggattgggcaaaggaggagctaaacgtcacaggaaggttctgagagacaacatccaaggaatcactaagccggcgattcggagattggctcgtagaggtggagtcaagcgtattagtggtttgatctacgaggagacacgtggcgttctcaagatctttttggagaatgttatccgtgacgccgttacttacactgagcacgctcggaggaagacggtgactgctatggatgttgtttatgctcttaagagacaaggaagaactctctacggattcggcggctagggtttttgattgttgttttttgtgtttctacgtttattaggatgttaattttcagaatttggtgttaacttcgaaaaaattaaagaattgaaggttgttgttgcaatttcgtgattgttgaaggtgttgttgcaaacttnnagtaatttcagttt

SEQ ID NO: 35251 - protein, 103 aa, Arabidopsis thaliana; identical to SEQ ID NO: 7737
  peptide (1)..(103): Ceres Seq. ID no. 12348597
  misc_feature (1)..(103): Homolog of NCBI NO: 462242 NR Description: Histone H4
  misc_feature (1)..(103): Homolog of NCBI NO: 37590121 NR Description: Hist1h4h protein [Mus musculus]
  misc_feature (1)..(103): Homolog of NCBI NO: 34858262 NR Description: similar to germinal histone H4 gene [Rattus
  misc_feature (1)..(103): Homolog of NCBI NO: 27692960 NR Description: Similar to germinal histone H4 gene [Mus musculus]
  misc_feature (1)..(103): Homolog of NCBI NO: 27692935 NR Description: Similar to germinal histone H4 gene [Mus musculus]
  misc_feature (1)..(103): Homolog of NCBI NO: 4504301 NR Description: H4 histone family, member A [Homo sapiens]
  misc_feature (1)..(103): Homolog of NCBI NO: 1806283 NR Description: Histone H4 homologue [Sesbania rostrata]
  misc_feature (1)..(103): Homolog of NCBI NO: 462243 NR Description: Histone H4
  misc_feature (1)..(103): Homolog of NCBI NO: 15226944 NR Description: histone H4
  misc_feature (1)..(103): Homolog of NCBI NO: 34876368 NR Description: similar to germinal histone H4 gene [Rattus

SEQ ID NO: 35252 - DNA, 1647 bp, Arabidopsis thaliana
  misc_feature (1)..(1647): Ceres Seq. ID no. 12561457
  misc_feature: MA Experiment ID: 20000069 Result: Up-regulated in Transcription
  misc_feature: MA Experiment 20000069 PARAMETER Experiment Name: At_100uM_ABA_Mutants_cDNA_P Parameter: Plant Line Value: CS23
  misc_feature: MA Experiment 20000069 PARAMETER Experiment Name: At_100uM_ABA_Mutants_cDNA_P Parameter: Timepoint (hr) Value: 6
  misc_feature: MA Experiment 20000069 PARAMETER Experiment Name: At_100uM_ABA_Mutants_cDNA_P Parameter: Tissue Value: Aerial
  misc_feature: MA Experiment 20000069 PARAMETER Experiment Name: At_100uM_ABA_Mutants_cDNA_P Parameter: Treatment Value: 100uM ABA vs. No Treatment
  misc_feature: MA Experiment ID: 20000169 Result: Up-regulated in Transcription
  misc_feature: MA Experiment 20000169 PARAMETER Experiment Name: At_100uM_ABA_P Parameter: Age (day) Value: 14
  misc_feature: MA Experiment 20000169 PARAMETER Experiment Name: At_100uM_ABA_P Parameter: Organism Value: A. thaliana
  misc_feature: MA Experiment 20000169 PARAMETER Experiment Name: At_100uM_ABA_P Parameter: Plant Line Value: WS
  misc_feature: MA Experiment 20000169 PARAMETER Experiment Name: At_100uM_ABA_P Parameter: Timepoint (hr) Value: 6
  misc_feature: MA Experiment 20000169 PARAMETER Experiment Name: At_100uM_ABA_P Parameter: Tissue Value: Aerial
  misc_feature: MA Experiment 20000169 PARAMETER Experiment Name: At_100uM_ABA_P Parameter: Treatment Value: 100uM ABA vs. No Treatment
  misc_feature: MA Experiment ID: 20000173 Result: Down-regulated in Transcription
  misc_feature: MA Experiment 20000173 PARAMETER Experiment Name: At_42deg_Heat_P Parameter: Age (day) Value: 14
  misc_feature: MA Experiment 20000173 PARAMETER Experiment Name: At_42deg_Heat_P Parameter: Organism Value: A. thaliana
  misc_feature: MA Experiment 20000173 PARAMETER Experiment Name: At_42deg_Heat_P Parameter: Plant Line Value: WS
  misc_feature: MA Experiment 20000173 PARAMETER Experiment Name: At_42deg_Heat_P Parameter: Temperature (deg C) Value: 42 vs. 22
  misc_feature: MA Experiment 20000173 PARAMETER Experiment Name: At_42deg_Heat_P Parameter: Timepoint (hr) Value: 6
  misc_feature: MA Experiment 20000173 PARAMETER Experiment Name: At_42deg_Heat_P Parameter: Tissue Value: Aerial
  misc_feature: MA Experiment ID: 20000185 Result: Up-regulated in Transcription
  misc_feature: MA Experiment 20000185 PARAMETER Experiment Name: At_Roots__P Parameter: Age (day) Value: 7 vs. 21
  misc_feature: MA Experiment 20000185 PARAMETER Experiment Name: At_Roots__P Parameter: Organism Value: A. thaliana
  misc_feature: MA Experiment 20000185 PARAMETER Experiment Name: At_Roots__P Parameter: Tissue Value: Roots vs. Whole Plant
  misc_feature: MA Experiment ID: 20000234 Result: Up-regulated in Transcription
  misc_feature: MA Experiment 20000234 PARAMETER Experiment Name: At_Siliques_P Parameter: Age (day) Value: 21
  misc_feature: MA Experiment 20000234 PARAMETER Experiment Name: At_Siliques_P Parameter: Organism Value: A. thaliana
  misc_feature: MA Experiment 20000234 PARAMETER Experiment Name: At_Siliques_P Parameter: Plant Line Value: WS
  misc_feature: MA Experiment 20000234 PARAMETER Experiment Name: At_Siliques_P Parameter: Tissue Value: Less Than 5mm Siliques vs. Whole Plant
  misc_feature: MA Experiment ID: 20000235 Result: Up-regulated in Transcription
  misc_feature: MA Experiment 20000235 PARAMETER Experiment Name: At_Siliques_P Parameter: Age (day) Value: 21
  misc_feature: MA Experiment 20000235 PARAMETER Experiment Name: At_Siliques_P Parameter: Organism Value: A. thaliana
  misc_feature: MA Experiment 20000235 PARAMETER Experiment Name: At_Siliques_P Parameter: Plant Line Value: WS
  misc_feature: MA Experiment 20000235 PARAMETER Experiment Name: At_Siliques_P Parameter: Tissue Value: 5-10mm Siliques vs. Whole Plant
  misc_feature: MA Experiment ID: 20000264 Result: Up-regulated in Transcription
  misc_feature: MA Experiment 20000264 PARAMETER Experiment Name: At_Open_Flower_P Parameter: Age (day) Value: 21
  misc_feature: MA Experiment 20000264 PARAMETER Experiment Name: At_Open_Flower_P Parameter: Plant Line Value: WS
  misc_feature: MA Experiment 20000264 PARAMETER Experiment Name: At_Open_Flower_P Parameter: Tissue Value: Open Flower vs. Whole Plant
  misc_feature: MA Experiment ID: 20000286 Result: Up-regulated in Transcription
  misc_feature: MA Experiment 20000286 PARAMETER Experiment Name: At_Open_Flower_P Parameter: Age (day) Value: 21
  misc_feature: MA Experiment 20000286 PARAMETER Experiment Name: At_Open_Flower_P Parameter: Plant Line Value: WS
  misc_feature: MA Experiment 20000286 PARAMETER Experiment Name: At_Open_Flower_P Parameter: Tissue Value: Half Open vs. Whole Plant
  misc_feature: MA Experiment ID: 20000436 Result: Up-regulated in Transcription
  misc_feature: MA Experiment 20000436 PARAMETER Experiment Name: At_Drought_P Parameter: Age (day) Value: 7
  misc_feature: MA Experiment 20000436 PARAMETER Experiment Name: At_Drought_P Parameter: Organism Value: A. thaliana
  misc_feature: MA Experiment 20000436 PARAMETER Experiment Name: At_Drought_P Parameter: Plant Line Value: WS
  misc_feature: MA Experiment 20000436 PARAMETER Experiment Name: At_Drought_P Parameter: Timepoint (hr) Value: 12
  misc_feature: MA Experiment 20000436 PARAMETER Experiment Name: At_Drought_P Parameter: Tissue Value: Whole Plant
  misc_feature: MA Experiment 20000436 PARAMETER Experiment Name: At_Drought_P Parameter: Treatment Value: Drought vs. No Drought
  misc_feature: MA Experiment ID: 20000437 Result: Up-regulated in Transcription
  misc_feature: MA Experiment 20000437 PARAMETER Experiment Name: At_Drought_P Parameter: Age (day) Value: 8
  misc_feature: MA Experiment 20000437 PARAMETER Experiment Name: At_Drought_P Parameter: Organism Value: A. thaliana
  misc_feature: MA Experiment 20000437 PARAMETER Experiment Name: At_Drought_P Parameter: Plant Line Value: WS
  misc_feature: MA Experiment 20000437 PARAMETER Experiment Name: At_Drought_P Parameter: Timepoint (hr) Value: 24
  misc_feature: MA Experiment 20000437 PARAMETER Experiment Name: At_Drought_P Parameter: Tissue Value: Whole Plant
  misc_feature: MA Experiment 20000437 PARAMETER Experiment Name: At_Drought_P Parameter: Treatment Value: Drought vs. No Drought
  misc_feature: MA Experiment ID: 20000439 Result: Up-regulated in Transcription
  misc_feature: MA Experiment 20000439 PARAMETER Experiment Name: At_Roots__P Parameter: Age (day) Value: 14 vs. 21
  misc_feature: MA Experiment 20000439 PARAMETER Experiment Name: At_Roots__P Parameter: Organism Value: A. thaliana
  misc_feature: MA Experiment 20000439 PARAMETER Experiment Name: At_Roots__P Parameter: Tissue Value: Roots vs. Whole Plant
  misc_feature: MA Experiment ID: 20000453 Result: Up-regulated in Transcription
  misc_feature: MA Experiment 20000453 PARAMETER Experiment Name: At_100uM_ABA_P Parameter: Age (day) Value: 15
  misc_feature: MA Experiment 20000453 PARAMETER Experiment Name: At_100uM_ABA_P Parameter: Organism Value: A. thaliana
  misc_feature: MA Experiment 20000453 PARAMETER Experiment Name: At_100uM_ABA_P Parameter: Plant Line Value: WS
  misc_feature: MA Experiment 20000453 PARAMETER Experiment Name: At_100uM_ABA_P Parameter: Timepoint (hr) Value: 24
  misc_feature: MA Experiment 20000453 PARAMETER Experiment Name: At_100uM_ABA_P Parameter: Tissue Value: Aerial
  misc_feature: MA Experiment 20000453 PARAMETER Experiment Name: At_100uM_ABA_P Parameter: Treatment Value: 100uM ABA vs. No Treatment
  misc_feature: MA Experiment ID: 20000794 Result: Up-regulated in Transcription
  misc_feature: MA Experiment 20000794 PARAMETER Experiment Name: At_Petals_P Parameter: Age (day) Value: 23-25 days
  misc_feature: MA Experiment 20000794 PARAMETER Experiment Name: At_Petals_P Parameter: Plant Line Value: WS
  misc_feature: MA Experiment 20000794 PARAMETER Experiment Name: At_Petals_P Parameter: Tissue Value: Petals vs. Whole plant
  misc_feature: MA Experiment ID: 20001554 Result: Up-regulated in Transcription
  misc_feature: MA Experiment 20001554 PARAMETER Experiment Name: At_Drought_Soil_Dry_P Parameter: Age (day) Value: 21
  misc_feature: MA Experiment 20001554 PARAMETER Experiment Name: At_Drought_Soil_Dry_P Parameter: Organism Value: A. thaliana
  misc_feature: MA Experiment 20001554 PARAMETER Experiment Name: At_Drought_Soil_Dry_P Parameter: Plant Line Value: WS
  misc_feature: MA Experiment 20001554 PARAMETER Experiment Name: At_Drought_Soil_Dry_P Parameter: Post Timepoint (hr) Value: None
  misc_feature: MA Experiment 20001554 PARAMETER Experiment Name: At_Drought_Soil_Dry_P Parameter: Post-Treatment Value: None
  misc_feature: MA Experiment 20001554 PARAMETER Experiment Name: At_Drought_Soil_Dry_P Parameter: Timepoint (day) Value: 7
  misc_feature: MA Experiment 20001554 PARAMETER Experiment Name: At_Drought_Soil_Dry_P Parameter: Treatment Value: Drought vs. No Drought
  misc_feature: MA Experiment ID: 20001555 Result: Up-regulated in Transcription
  misc_feature: MA Experiment 20001555 PARAMETER Experiment Name: At_Drought_Soil_Dry_P Parameter: Age (day) Value: 24
  misc_feature: MA Experiment 20001555 PARAMETER Experiment Name: At_Drought_Soil_Dry_P Parameter: Organism Value: A. thaliana
  misc_feature: MA Experiment 20001555 PARAMETER Experiment Name: At_Drought_Soil_Dry_P Parameter: Plant Line Value: WS
  misc_feature: MA Experiment 20001555 PARAMETER Experiment Name: At_Drought_Soil_Dry_P Parameter: Post Timepoint (hr) Value: None
  misc_feature: MA Experiment 20001555 PARAMETER Experiment Name: At_Drought_Soil_Dry_P Parameter: Post-Treatment Value: None
  misc_feature: MA Experiment 20001555 PARAMETER Experiment Name: At_Drought_Soil_Dry_P Parameter: Timepoint (day) Value: 10
  misc_feature: MA Experiment 20001555 PARAMETER Experiment Name: At_Drought_Soil_Dry_P Parameter: Treatment Value: Drought vs. No Drought
  misc_feature: MA Experiment ID: 20001904 Result: Up-regulated in Transcription
  misc_feature: MA Experiment 20001904 PARAMETER Experiment Name: At_Drought_Reproduction_P Parameter: Age (day) Value: 37
  misc_feature: MA Experiment 20001904 PARAMETER Experiment Name: At_Drought_Reproduction_P Parameter: Organism Value: A. thaliana
  misc_feature: MA Experiment 20001904 PARAMETER Experiment Name: At_Drought_Reproduction_P Parameter: Plant Line Value: WS
  misc_feature: MA Experiment 20001904 PARAMETER Experiment Name: At_Drought_Reproduction_P Parameter: Timepoint (day) Value: 7
  misc_feature: MA Experiment 20001904 PARAMETER Experiment Name: At_Drought_Reproduction_P Parameter: Tissue Value: Rosettes
  misc_feature: MA Experiment 20001904 PARAMETER Experiment Name: At_Drought_Reproduction_P Parameter: Treatment Value: Drought vs. No Drought
  misc_feature: MA Experiment ID: 20001905 Result: Up-regulated in Transcription
  misc_feature: MA Experiment 20001905 PARAMETER Experiment Name: At_Drought_Reproduction_P Parameter: Age (day) Value: 40
  misc_feature: MA Experiment 20001905 PARAMETER Experiment Name: At_Drought_Reproduction_P Parameter: Organism Value: A. thaliana
  misc_feature: MA Experiment 20001905 PARAMETER Experiment Name: At_Drought_Reproduction_P Parameter: Plant Line Value: WS
  misc_feature: MA Experiment 20001905 PARAMETER Experiment Name: At_Drought_Reproduction_P Parameter: Timepoint (day) Value: 10
  misc_feature: MA Experiment 20001905 PARAMETER Experiment Name: At_Drought_Reproduction_P Parameter: Tissue Value: Rosettes
  misc_feature: MA Experiment 20001905 PARAMETER Experiment Name: At_Drought_Reproduction_P Parameter: Treatment Value: Drought vs. No Drought
  misc_feature: MA Experiment ID: 20001906 Result: Up-regulated in Transcription
  misc_feature: MA Experiment 20001906 PARAMETER Experiment Name: At_Drought_Reproduction_P Parameter: Age (day) Value: 35
  misc_feature: MA Experiment 20001906 PARAMETER Experiment Name: At_Drought_Reproduction_P Parameter: Organism Value: A. thaliana
  misc_feature: MA Experiment 20001906 PARAMETER Experiment Name: At_Drought_Reproduction_P Parameter: Plant Line Value: WS
  misc_feature: MA Experiment 20001906 PARAMETER Experiment Name: At_Drought_Reproduction_P Parameter: Timepoint (day) Value: 5
  misc_feature: MA Experiment 20001906 PARAMETER Experiment Name: At_Drought_Reproduction_P Parameter: Tissue Value: Siliques
  misc_feature: MA Experiment 20001906 PARAMETER Experiment Name: At_Drought_Reproduction_P Parameter: Treatment Value: Drought vs. No Drought
  misc_feature: MA Experiment ID: 20001908 Result: Up-regulated in Transcription
  misc_feature: MA Experiment 20001908 PARAMETER Experiment Name: At_Drought_Reproduction_P Parameter: Age (day) Value: 40
  misc_feature: MA Experiment 20001908 PARAMETER Experiment Name: At_Drought_Reproduction_P Parameter: Organism Value: A. thaliana
  misc_feature: MA Experiment 20001908 PARAMETER Experiment Name: At_Drought_Reproduction_P Parameter: Plant Line Value: WS
  misc_feature: MA Experiment 20001908 PARAMETER Experiment Name: At_Drought_Reproduction_P Parameter: Timepoint (day) Value: 10
  misc_feature: MA Experiment 20001908 PARAMETER Experiment Name: At_Drought_Reproduction_P Parameter: Tissue Value: Siliques
  misc_feature: MA Experiment 20001908 PARAMETER Experiment Name: At_Drought_Reproduction_P Parameter: Treatment Value: Drought vs. No Drought
  misc_feature: MA Experiment ID: 20001910 Result: Up-regulated in Transcription
  misc_feature: MA Experiment 20001910 PARAMETER Experiment Name: At_Drought_Reproduction_P Parameter: Age (day) Value: 37
  misc_feature: MA Experiment 20001910 PARAMETER Experiment Name: At_Drought_Reproduction_P Parameter: Organism Value: A. thaliana
  misc_feature: MA Experiment 20001910 PARAMETER Experiment Name: At_Drought_Reproduction_P Parameter: Plant Line Value: WS
  misc_feature: MA Experiment 20001910 PARAMETER Experiment Name: At_Drought_Reproduction_P Parameter: Timepoint (day) Value: 7
  misc_feature: MA Experiment 20001910 PARAMETER Experiment Name: At_Drought_Reproduction_P Parameter: Tissue Value: Flowers
  misc_feature: MA Experiment 20001910 PARAMETER Experiment Name: At_Drought_Reproduction_P Parameter: Treatment Value: Drought vs. No Drought
  misc_feature: MA Experiment ID: 20001911 Result: Up-regulated in Transcription
  misc_feature: MA Experiment 20001911 PARAMETER Experiment Name: At_Drought_Reproduction_P Parameter: Age (day) Value: 40
  misc_feature: MA Experiment 20001911 PARAMETER Experiment Name: At_Drought_Reproduction_P Parameter: Organism Value: A. thaliana
  misc_feature: MA Experiment 20001911 PARAMETER Experiment Name: At_Drought_Reproduction_P Parameter: Plant Line Value: WS
  misc_feature: MA Experiment 20001911 PARAMETER Experiment Name: At_Drought_Reproduction_P Parameter: Timepoint (day) Value: 10
  misc_feature: MA Experiment 20001911 PARAMETER Experiment Name: At_Drought_Reproduction_P Parameter: Tissue Value: Flowers
  misc_feature: MA Experiment 20001911 PARAMETER Experiment Name: At_Drought_Reproduction_P Parameter: Treatment Value: Drought vs. No Drought
acatgttctctcccgcctgaatcatgtcaatctcccacaaaagatctttgataaaaagaattgagccctaattccttgatgtttgttgaatcgcacagcagataaaaaaaaatggtgttggcggagctcggcggccggataacccgcgccatacagcagatgaacaatgtgacaataatcgatgaaaaggttttgaatgatttcttaaacgagattactcgcgctttgctccagtccgatgtttcttttggccttgtggaaaagatgcagaccaatattaagaagatcgttaacctcgacgatctagcagctggccacaacaaacgcctgatcatcgagcaggctatcttcaaggaactctgtaggatgctggatccaggaaagcctgcctttgcccccaaaaaggccaaacctagtgtagtgatgttcgtcggtttacaaggtgctggaaaaaccacaacatgtaccaagtatgcttactatcatcagaagaaagggtacaaagcagctctagtgtgtgcggatactttcagggccggtgcttttgatcagctgaaacagaatgccaccaaggctaagatccccttttatggaagctacacagaatccgatcctgtgaaaattgctgttgagggagttgataggttcaagaaagaaaagtgtgatcttattattgttgacaccagtggtcgccataaacaagcagcttctctctttgaagaaatgcgtcaagttgctgaagcaacggaaccagatcttgttatatttgttatggatagcagtattggtcaagctgcatttgaacaagctgaagcttttaaggaaactgtatctgttggagctgtaattattactaagatggacggccatgccaagggaggtggtgctcttagcgctgttgcagctacaaaaagtcctgtgatattcattggaacaggagagcatatggatgagtttgaagtgtttgacgttaaaccatttgtcagccgtctcttaggaaagggtgattggtctggactcgtggataaactacaagaggtggtacctaaagatctacagaatgaacttgtagaaaatctctctcagggtaactttacgttgagaagtatgtacgaccagttccagtgctctctgcggattccacttaatcagcttttctcgatgctgcctggaattagtgctgaaatgatgccgaaaggacatggtgaagaaagccgagtgaagatgaagcgatacatgacaatgatggattctatgacaaataaagaacttgacagcccaaacccaaagatttttaacgagtcaaggataatgaggatagcgagagggtcagggaggttagtaagagaagtgatggagatgttggaagagtacaagaggatagcaaagacaatgaaagggatcaagatcccaaagaacggagacatgagcaaggtcataccgcctcagatgctaaaacagatgggcggcatgagcggtctgcagagtctcatgaagcagatgggttcggctaaggacatgatgggaatgtttggtggcggaggcaagtagtttctatctttcttgcacacagtgcacggagggcagtggtaaaacttttgttacatactgtattagtaccttataattttaacacatcctaacgac

SEQ ID NO: 35253 - protein, 479 aa, Arabidopsis thaliana
  peptide (1)..(479): Ceres Seq. ID no. 12561458
  misc_feature (327)..(428): Pfam Name: Signal peptide binding domain Pfam Description: Signal peptide binding domain
  misc_feature (1)..(476): Homolog of NCBI NO: 15239909 NR Description: SRP54 (signal recognition particle 54 KDa) protein
  misc_feature (1)..(478): Homolog of NCBI NO: 1711509 NR Description: SIGNAL RECOGNITION PARTICLE 54 KD PROTEIN 1
  misc_feature (1)..(476): Homolog of NCBI NO: 1711512 NR Description: SIGNAL RECOGNITION PARTICLE 54 KD PROTEIN 2
  misc_feature (1)..(478): Homolog of NCBI NO: 2119055 NR Description: signal recognition particle 54K protein - tomato
  misc_feature (1)..(476): Homolog of NCBI NO: 1711510 NR Description: Signal recognition particle 54 kDa protein 2
  misc_feature (1)..(163): Homolog of NCBI NO: 25294409 NR Description: hypothetical protein F27K7.8 [imported] -
  misc_feature (163)..(479): Homolog of NCBI NO: 25294409 NR Description: hypothetical protein F27K7.8 [imported] -
  misc_feature (1)..(479): Homolog of NCBI NO: 515681 NR Description: signal recognition particle 54 kDa subunit
  misc_feature (1)..(479): Homolog of NCBI NO: 18402407 NR Description: signal recognition particle 54 kDa protein 2
  misc_feature (1)..(479): Homolog of NCBI NO: 18394225 NR Description: expressed protein
MVLAELGGRITRAIQQMNNVTIIDEKVLNDFLNEITRALLQSDVSFGLVEKMQTNIKKIVNLDDLAAGHNKRLIIEQAIFKELCRMLDPGKPAFAPKKAKPSVVMFVGLQGAGKTTTCTKYAYYHQKKGYKAALVCADTFRAGAFDQLKQNATKAKIPFYGSYTESDPVKIAVEGVDRFKKEKCDLIIVDTSGRHKQAASLFEEMRQVAEATEPDLVIFVMDSSIGQAAFEQAEAFKETVSVGAVIITKMDGHAKGGGALSAVAATKSPVIFIGTGEHMDEFEVFDVKPFVSRLLGKGDWSGLVDKLQEVVPKDLQNELVENLSQGNFTLRSMYDQFQCSLRIPLNQLFSMLPGISAEMMPKGHGEESRVKMKRYMTMMDSMTNKELDSPNPKIFNESRIMRIARGSGRLVREVMEMLEEYKRIAKTMKGIKIPKNGDMSKVIPPQMLKQMGGMSGLQSLMKQMGSAKDMMGMFGGGGK

SEQ ID NO: 35254 - protein, 463 aa, Arabidopsis thaliana
  peptide (1)..(463): Ceres Seq. ID no. 12561459
  misc_feature (311)..(412): Pfam Name: Signal peptide binding domain Pfam Description: Signal peptide binding domain
  misc_feature (1)..(460): Homolog of NCBI NO: 15239909 NR Description: SRP54 (signal recognition particle 54 KDa) protein
  misc_feature (1)..(462): Homolog of NCBI NO: 1711509 NR Description: SIGNAL RECOGNITION PARTICLE 54 KD PROTEIN 1
  misc_feature (1)..(460): Homolog of NCBI NO: 1711512 NR Description: SIGNAL RECOGNITION PARTICLE 54 KD PROTEIN 2
  misc_feature (1)..(462): Homolog of NCBI NO: 2119055 NR Description: signal recognition particle 54K protein - tomato
  misc_feature (1)..(460): Homolog of NCBI NO: 1711510 NR Description: Signal recognition particle 54 kDa protein 2
  misc_feature (1)..(147): Homolog of NCBI NO: 25294409 NR Description: hypothetical protein F27K7.8 [imported] -
  misc_feature (147)..(463): Homolog of NCBI NO: 25294409 NR Description: hypothetical protein F27K7.8 [imported] -
  misc_feature (1)..(463): Homolog of NCBI NO: 515681 NR Description: signal recognition particle 54 kDa subunit
  misc_feature (1)..(463): Homolog of NCBI NO: 18402407 NR Description: signal recognition particle 54 kDa protein 2
  misc_feature (1)..(463): Homolog of NCBI NO: 18394225 NR Description: expressed protein
MNNVTIIDEKVLNDFLNEITRALLQSDVSFGLVEKMQTNIKKIVNLDDLAAGHNKRLIIEQAIFKELCRMLDPGKPAFAPKKAKPSVVMFVGLQGAGKTTTCTKYAYYHQKKGYKAALVCADTFRAGAFDQLKQNATKAKIPFYGSYTESDPVKIAVEGVDRFKKEKCDLIIVDTSGRHKQAASLFEEMRQVAEATEPDLVIFVMDSSIGQAAFEQAEAFKETVSVGAVIITKMDGHAKGGGALSAVAATKSPVIFIGTGEHMDEFEVFDVKPFVSRLLGKGDWSGLVDKLQEVVPKDLQNELVENLSQGNFTLRSMYDQFQCSLRIPLNQLFSMLPGISAEMMPKGHGEESRVKMKRYMTMMDSMTNKELDSPNPKIFNESRIMRIARGSGRLVREVMEMLEEYKRIAKTMKGIKIPKNGDMSKVIPPQMLKQMGGMSGLQSLMKQMGSAKDMMGMFGGGGK

SEQ ID NO: 35255 - protein, 428 aa, Arabidopsis thaliana
  peptide (1)..(428): Ceres Seq. ID no. 12561460
  misc_feature (276)..(377): Pfam Name: Signal peptide binding domain Pfam Description: Signal peptide binding domain
  misc_feature (1)..(425): Homolog of NCBI NO: 15239909 NR Description: SRP54 (signal recognition particle 54 KDa) protein
  misc_feature (1)..(427): Homolog of NCBI NO: 1711509 NR Description: SIGNAL RECOGNITION PARTICLE 54 KD PROTEIN 1
  misc_feature (1)..(425): Homolog of NCBI NO: 1711512 NR Description: SIGNAL RECOGNITION PARTICLE 54 KD PROTEIN 2
  misc_feature (1)..(427): Homolog of NCBI NO: 2119055 NR Description: signal recognition particle 54K protein - tomato
  misc_feature (1)..(425): Homolog of NCBI NO: 1711510 NR Description: Signal recognition particle 54 kDa protein 2
  misc_feature (1)..(112): Homolog of NCBI NO: 25294409 NR Description: hypothetical protein F27K7.8 [imported] -
  misc_feature (112)..(428): Homolog of NCBI NO: 25294409 NR Description: hypothetical protein F27K7.8 [imported] -
  misc_feature (1)..(428): Homolog of NCBI NO: 515681 NR Description: signal recognition particle 54 kDa subunit
  misc_feature (1)..(428): Homolog of NCBI NO: 18402407 NR Description: signal recognition particle 54 kDa protein 2
  misc_feature (1)..(428): Homolog of NCBI NO: 18394225 NR Description: expressed protein
MQTNIKKIVNLDDLAAGHNKRLIIEQAIFKELCRMLDPGKPAFAPKKAKPSVVMFVGLQGAGKTTTCTKYAYYHQKKGYKAALVCADTFRAGAFDQLKQNATKAKIPFYGSYTESDPVKIAVEGVDRFKKEKCDLIIVDTSGRHKQAASLFEEMRQVAEATEPDLVIFVMDSSIGQAAFEQAEAFKETVSVGAVIITKMDGHAKGGGALSAVAATKSPVIFIGTGEHMDEFEVFDVKPFVSRLLGKGDWSGLVDKLQEVVPKDLQNELVENLSQGNFTLRSMYDQFQCSLRIPLNQLFSMLPGISAEMMPKGHGEESRVKMKRYMTMMDSMTNKELDSPNPKIFNESRIMRIARGSGRLVREVMEMLEEYKRIAKTMKGIKIPKNGDMSKVIPPQMLKQMGGMSGLQSLMKQMGSAKDMMGMFGGGGK

SEQ ID NO: 35256 - DNA, 687 bp, Arabidopsis thaliana; identical to SEQ ID NO: 30473
  misc_feature (1)..(687): Ceres Seq. ID no. 12580320
  misc_feature: MA Experiment ID: 108473 Result: Down-regulated in Transcription
  misc_feature: MA Experiment 108473 PARAMETER Experiment Name: At_Drought_Flowers_cDNA_P Parameter: Timepoint (hr) Value: 7 d
  misc_feature: MA Experiment 108473 PARAMETER Experiment Name: At_Drought_Flowers_cDNA_P Parameter: Tissue Value: Flower
  misc_feature: MA Experiment 108473 PARAMETER Experiment Name: At_Drought_Flowers_cDNA_P Parameter: Treatment Value: Drought vs. No Drought
  misc_feature: MA Experiment ID: 108501 Result: Down-regulated in Transcription
  misc_feature: MA Experiment 108501 PARAMETER Experiment Name: At_ap2_floral_buds_cDNA_P Parameter: Plant Line Value: ap2 (Ler.)
  misc_feature: MA Experiment 108501 PARAMETER Experiment Name: At_ap2_floral_buds_cDNA_P Parameter: Tissue Value: Closed Flower
  misc_feature: MA Experiment ID: 108569 Result: Down-regulated in Transcription
  misc_feature: MA Experiment 108569 PARAMETER Experiment Name: At_0.001%_MeJA__cDNA_P Parameter: Timepoint (hr) Value: 6
  misc_feature: MA Experiment 108569 PARAMETER Experiment Name: At_0.001%_MeJA__cDNA_P Parameter: Tissue Value: Aerial
  misc_feature: MA Experiment 108569 PARAMETER Experiment Name: At_0.001%_MeJA__cDNA_P Parameter: Treatment Value: 0.001% MeJA vs. No Treatment
  misc_feature: MA Experiment ID: 108595 Result: Up-regulated in Transcription
  misc_feature: MA Experiment 108595 PARAMETER Experiment Name: At_Ler-pi_Ovule_cDNA_P Parameter: Plant Line Value: null
  misc_feature: MA Experiment ID: 20000265 Result: Up-regulated in Transcription
  misc_feature: MA Experiment 20000265 PARAMETER Experiment Name: At_Open_Flower_P Parameter: Age (day) Value: 21
  misc_feature: MA Experiment 20000265 PARAMETER Experiment Name: At_Open_Flower_P Parameter: Plant Line Value: WS
  misc_feature: MA Experiment 20000265 PARAMETER Experiment Name: At_Open_Flower_P Parameter: Tissue Value: Closed Flower vs. Whole Plant
  misc_feature: MA Experiment ID: 20000286 Result: Up-regulated in Transcription
  misc_feature: MA Experiment 20000286 PARAMETER Experiment Name: At_Open_Flower_P Parameter: Age (day) Value: 21
  misc_feature: MA Experiment 20000286 PARAMETER Experiment Name: At_Open_Flower_P Parameter: Plant Line Value: WS
  misc_feature: MA Experiment 20000286 PARAMETER Experiment Name: At_Open_Flower_P Parameter: Tissue Value: Half Open vs. Whole Plant
  misc_feature: MA Experiment ID: 20001910 Result: Down-regulated in Transcription
  misc_feature: MA Experiment 20001910 PARAMETER Experiment Name: At_Drought_Reproduction_P Parameter: Age (day) Value: 37
  misc_feature: MA Experiment 20001910 PARAMETER Experiment Name: At_Drought_Reproduction_P Parameter: Organism Value: A. thaliana
  misc_feature: MA Experiment 20001910 PARAMETER Experiment Name: At_Drought_Reproduction_P Parameter: Plant Line Value: WS
  misc_feature: MA Experiment 20001910 PARAMETER Experiment Name: At_Drought_Reproduction_P Parameter: Timepoint (day) Value: 7
  misc_feature: MA Experiment 20001910 PARAMETER Experiment Name: At_Drought_Reproduction_P Parameter: Tissue Value: Flowers
  misc_feature: MA Experiment 20001910 PARAMETER Experiment Name: At_Drought_Reproduction_P Parameter: Treatment Value: Drought vs. No Drought

SEQ ID NO: 35257 - protein, 95 aa, Arabidopsis thaliana; identical to SEQ ID NO: 30474
  peptide (1)..(95): Ceres Seq. ID no. 12580321
  misc_feature (13)..(89): Pfam Name: Protein of unknown function, DUF538 Pfam Description: Protein of unknown function, DUF538
  misc_feature (13)..(89): Pfam Name: Protein of unknown function, DUF538 Pfam Description: Protein of unknown function, DUF538
  misc_feature (13)..(89): Pfam Name: Protein of unknown function, DUF538 Pfam Description: Protein of unknown function, DUF538
  misc_feature (48)..(88): Homolog of NCBI NO: 37536100 NR Description: hypothetical protein [Oryza sativa (japonica
  misc_feature (23)..(87): Homolog of NCBI NO: 33146557 NR Description: unknown protein [Oryza sativa (japonica
  misc_feature (23)..(89): Homolog of NCBI NO: 18405887 NR Description: expressed protein
  misc_feature (23)..(87): Homolog of NCBI NO: 34915422 NR Description: hypothetical protein~similar to Arabidopsis
  misc_feature (23)..(87): Homolog of NCBI NO: 34915426 NR Description: hypothetical protein~similar to Arabidopsis
  misc_feature (48)..(88): Homolog of NCBI NO: 37536100 NR Description: hypothetical protein [Oryza sativa (japonica
  misc_feature (23)..(89): Homolog of NCBI NO: 18405887 NR Description: expressed protein
  misc_feature (23)..(87): Homolog of NCBI NO: 34915426 NR Description: hypothetical protein~similar to Arabidopsis
  misc_feature (23)..(87): Homolog of NCBI NO: 34915422 NR Description: hypothetical protein~similar to Arabidopsis
  misc_feature (23)..(89): Homolog of NCBI NO: 18405887 NR Description: expressed protein
  misc_feature (23)..(87): Homolog of NCBI NO: 33146557 NR Description: unknown protein [Oryza sativa (japonica
  misc_feature (48)..(88): Homolog of NCBI NO: 37536100 NR Description: hypothetical protein [Oryza sativa (japonica
  misc_feature (9)..(89): Homolog of NCBI NO: 15220641 NR Description: unknown protein; protein id: At1g30020.1
  misc_feature (9)..(89): Homolog of NCBI NO: 18422648 NR Description: expressed protein
  misc_feature (23)..(87): Homolog of NCBI NO: 34903866 NR Description: unnamed protein product [Oryza sativa (japonica
  misc_feature (23)..(89): Homolog of NCBI NO: 18391006 NR Description: expressed protein
  misc_feature (23)..(87): Homolog of NCBI NO: 34915376 NR Description: hypothetical protein~similar to Oryza sativa
  misc_feature (9)..(89): Homolog of NCBI NO: 15220641 NR Description: unknown protein; protein id: At1g30020.1
  misc_feature (9)..(89): Homolog of NCBI NO: 18422648 NR Description: expressed protein
  misc_feature (23)..(87): Homolog of NCBI NO: 34903866 NR Description: unnamed protein product [Oryza sativa (japonica
  misc_feature (23)..(89): Homolog of NCBI NO: 18391006 NR Description: expressed protein
  misc_feature (23)..(87): Homolog of NCBI NO: 34915376 NR Description: hypothetical protein~similar to Oryza sativa
  misc_feature (23)..(87): Homolog of NCBI NO: 34915426 NR Description: hypothetical protein~similar to Arabidopsis
  misc_feature (23)..(87): Homolog of NCBI NO: 34915422 NR Description: hypothetical protein~similar to Arabidopsis
  misc_feature (23)..(87): Homolog of NCBI NO: 33146557 NR Description: unknown protein [Oryza sativa (japonica
  misc_feature (23)..(87): Homolog of NCBI NO: 34915376 NR Description: hypothetical protein~similar to Oryza sativa
  misc_feature (23)..(89): Homolog of NCBI NO: 18391006 NR Description: expressed protein
  misc_feature (23)..(87): Homolog of NCBI NO: 34903866 NR Description: unnamed protein product [Oryza sativa (japonica
  misc_feature (9)..(89): Homolog of NCBI NO: 18422648 NR Description: expressed protein
  misc_feature (9)..(89): Homolog of NCBI NO: 15220641 NR Description: unknown protein; protein id: At1g30020.1

SEQ ID NO: 35258 - protein, 87 aa, Arabidopsis thaliana; identical to SEQ ID NO: 30475
  peptide (1)..(87): Ceres Seq. ID no. 12580322
  misc_feature (5)..(81): Pfam Name: Protein of unknown function, DUF538 Pfam Description: Protein of unknown function, DUF538
  misc_feature (5)..(81): Pfam Name: Protein of unknown function, DUF538 Pfam Description: Protein of unknown function, DUF538
  misc_feature (5)..(81): Pfam Name: Protein of unknown function, DUF538 Pfam Description: Protein of unknown function, DUF538
  misc_feature (40)..(80): Homolog of NCBI NO: 37536100 NR Description: hypothetical protein [Oryza sativa (japonica
  misc_feature (15)..(79): Homolog of NCBI NO: 33146557 NR Description: unknown protein [Oryza sativa (japonica
  misc_feature (15)..(81): Homolog of NCBI NO: 18405887 NR Description: expressed protein
  misc_feature (15)..(79): Homolog of NCBI NO: 34915422 NR Description: hypothetical protein~similar to Arabidopsis
  misc_feature (15)..(79): Homolog of NCBI NO: 34915426 NR Description: hypothetical protein~similar to Arabidopsis
  misc_feature (40)..(80): Homolog of NCBI NO: 37536100 NR Description: hypothetical protein [Oryza sativa (japonica
  misc_feature (15)..(81): Homolog of NCBI NO: 18405887 NR Description: expressed protein
  misc_feature (15)..(79): Homolog of NCBI NO: 34915426 NR Description: hypothetical protein~similar to Arabidopsis
  misc_feature (15)..(79): Homolog of NCBI NO: 34915422 NR Description: hypothetical protein~similar to Arabidopsis
  misc_feature (15)..(81): Homolog of NCBI NO: 18405887 NR Description: expressed protein
  misc_feature (15)..(79): Homolog of NCBI NO: 33146557 NR Description: unknown protein [Oryza sativa (japonica
  misc_feature (40)..(80): Homolog of NCBI NO: 37536100 NR Description: hypothetical protein [Oryza sativa (japonica
  misc_feature (1)..(81): Homolog of NCBI NO: 15220641 NR Description: unknown protein; protein id: At1g30020.1
  misc_feature (1)..(81): Homolog of NCBI NO: 18422648 NR Description: expressed protein
  misc_feature (15)..(79): Homolog of NCBI NO: 34903866 NR Description: unnamed protein product [Oryza sativa (japonica
  misc_feature (15)..(81): Homolog of NCBI NO: 18391006 NR Description: expressed protein
  misc_feature (15)..(79): Homolog of NCBI NO: 34915376 NR Description: hypothetical protein~similar to Oryza sativa
  misc_feature (1)..(81): Homolog of NCBI NO: 15220641 NR Description: unknown protein; protein id: At1g30020.1
  misc_feature (1)..(81): Homolog of NCBI NO: 18422648 NR Description: expressed protein
  misc_feature (15)..(79): Homolog of NCBI NO: 34903866 NR Description: unnamed protein product [Oryza sativa (japonica
  misc_feature (15)..(81): Homolog of NCBI NO: 18391006 NR Description: expressed protein
  misc_feature (15)..(79): Homolog of NCBI NO: 34915376 NR Description: hypothetical protein~similar to Oryza sativa
  misc_feature (15)..(79): Homolog of NCBI NO: 34915426 NR Description: hypothetical protein~similar to Arabidopsis
  misc_feature (15)..(79): Homolog of NCBI NO: 34915422 NR Description: hypothetical protein~similar to Arabidopsis
  misc_feature (15)..(79): Homolog of NCBI NO: 33146557 NR Description: unknown protein [Oryza sativa (japonica
  misc_feature (15)..(79): Homolog of NCBI NO: 34915376 NR Description: hypothetical protein~similar to Oryza sativa
  misc_feature (15)..(81): Homolog of NCBI NO: 18391006 NR Description: expressed protein
  misc_feature (15)..(79): Homolog of NCBI NO: 34903866 NR Description: unnamed protein product [Oryza sativa (japonica
  misc_feature (1)..(81): Homolog of NCBI NO: 18422648 NR Description: expressed protein
  misc_feature (1)..(81): Homolog of NCBI NO: 15220641 NR Description: unknown protein; protein id: At1g30020.1

SEQ ID NO: 35259 - protein, 82 aa, Arabidopsis thaliana; identical to SEQ ID NO: 30476
  peptide (1)..(82): Ceres Seq. ID no. 12580323
  misc_feature (1)..(76): Pfam Name: Protein of unknown function, DUF538 Pfam Description: Protein of unknown function, DUF538
  misc_feature (1)..(76): Pfam Name: Protein of unknown function, DUF538 Pfam Description: Protein of unknown function, DUF538
  misc_feature (1)..(76): Pfam Name: Protein of unknown function, DUF538 Pfam Description: Protein of unknown function, DUF538
  misc_feature (35)..(75): Homolog of NCBI NO: 37536100 NR Description: hypothetical protein [Oryza sativa (japonica
  misc_feature (10)..(74): Homolog of NCBI NO: 33146557 NR Description: unknown protein [Oryza sativa (japonica
  misc_feature (10)..(76): Homolog of NCBI NO: 18405887 NR Description: expressed protein
  misc_feature (10)..(74): Homolog of NCBI NO: 34915422 NR Description: hypothetical protein~similar to Arabidopsis
  misc_feature (10)..(74): Homolog of NCBI NO: 34915426 NR Description: hypothetical protein~similar to Arabidopsis
  misc_feature (35)..(75): Homolog of NCBI NO: 37536100 NR Description: hypothetical protein [Oryza sativa (japonica
  misc_feature (10)..(76): Homolog of NCBI NO: 18405887 NR Description: expressed protein
  misc_feature (10)..(74): Homolog of NCBI NO: 34915426 NR Description: hypothetical protein~similar to Arabidopsis
  misc_feature (10)..(74): Homolog of NCBI NO: 34915422 NR Description: hypothetical protein~similar to Arabidopsis
  misc_feature (10)..(76): Homolog of NCBI NO: 18405887 NR Description: expressed protein
  misc_feature (10)..(74): Homolog of NCBI NO: 33146557 NR Description: unknown protein [Oryza sativa (japonica
  misc_feature (35)..(75): Homolog of NCBI NO: 37536100 NR Description: hypothetical protein [Oryza sativa (japonica
  misc_feature (1)..(76): Homolog of NCBI NO: 15220641 NR Description: unknown protein; protein id: At1g30020.1
  misc_feature (1)..(76): Homolog of NCBI NO: 18422648 NR Description: expressed protein
  misc_feature (10)..(74): Homolog of NCBI NO: 34903866 NR Description: unnamed protein product [Oryza sativa (japonica
  misc_feature (10)..(76): Homolog of NCBI NO: 18391006 NR Description: expressed protein
  misc_feature (10)..(74): Homolog of NCBI NO: 34915376 NR Description: hypothetical protein~similar to Oryza sativa
  misc_feature (1)..(76): Homolog of NCBI NO: 15220641 NR Description: unknown protein; protein id: At1g30020.1
  misc_feature (1)..(76): Homolog of NCBI NO: 18422648 NR Description: expressed protein
  misc_feature (10)..(74): Homolog of NCBI NO: 34903866 NR Description: unnamed protein product [Oryza sativa (japonica
  misc_feature (10)..(76): Homolog of NCBI NO: 18391006 NR Description: expressed protein
  misc_feature (10)..(74): Homolog of NCBI NO: 34915376 NR Description: hypothetical protein~similar to Oryza sativa
  misc_feature (10)..(74): Homolog of NCBI NO: 34915426 NR Description: hypothetical protein~similar to Arabidopsis
  misc_feature (10)..(74): Homolog of NCBI NO: 34915422 NR Description: hypothetical protein~similar to Arabidopsis
  misc_feature (10)..(74): Homolog of NCBI NO: 33146557 NR Description: unknown protein [Oryza sativa (japonica
  misc_feature (10)..(74): Homolog of NCBI NO: 34915376 NR Description: hypothetical protein~similar to Oryza sativa
  misc_feature (10)..(76): Homolog of NCBI NO: 18391006 NR Description: expressed protein
  misc_feature (10)..(74): Homolog of NCBI NO: 34903866 NR Description: unnamed protein product [Oryza sativa (japonica
  misc_feature (1)..(76): Homolog of NCBI NO: 18422648 NR Description: expressed protein
  misc_feature (1)..(76): Homolog of NCBI NO: 15220641 NR Description: unknown protein; protein id: At1g30020.1

SEQ ID NO: 35260 - DNA, 2168 bp, Arabidopsis thaliana
  misc_feature (1)..(2168): Ceres Seq. ID no. 13488399
  misc_feature: MA Experiment ID: 108461 Result: Down-regulated in Transcription
  misc_feature: MA Experiment 108461 PARAMETER Experiment Name: At_Germinating_Seeds_cDNA_P Parameter: Age (day) Value: 1 vs. 0
  misc_feature: MA Experiment 108461 PARAMETER Experiment Name: At_Germinating_Seeds_cDNA_P Parameter: Tissue Value: Germinating Seeds
  misc_feature: MA Experiment ID: 108488 Result: Down-regulated in Transcription
  misc_feature: MA Experiment ID: 108573 Result: Up-regulated in Transcription
  misc_feature: MA Experiment 108573 PARAMETER Experiment Name: At_Drought_cDNA_P Parameter: Timepoint (hr) Value: 6
  misc_feature: MA Experiment 108573 PARAMETER Experiment Name: At_Drought_cDNA_P Parameter: Tissue Value: Aerial
  misc_feature: MA Experiment 108573 PARAMETER Experiment Name: At_Drought_cDNA_P Parameter: Treatment Value: Drought vs. No Drought
  misc_feature: MA Experiment ID: 108574 Result: Up-regulated in Transcription
  misc_feature: MA Experiment 108574 PARAMETER Experiment Name: At_Wounding__cDNA_P Parameter: Timepoint (hr) Value: 1
  misc_feature: MA Experiment 108574 PARAMETER Experiment Name: At_Wounding__cDNA_P Parameter: Tissue Value: Aerial
  misc_feature: MA Experiment 108574 PARAMETER Experiment Name: At_Wounding__cDNA_P Parameter: Treatment Value: Wounding vs. No Wounding
  misc_feature: MA Experiment ID: 108577 Result: Down-regulated in Transcription
  misc_feature: MA Experiment 108577 PARAMETER Experiment Name: At_42deg_Heat_cDNA_P Parameter: Temperature (deg C) Value: 42 vs. 22
  misc_feature: MA Experiment 108577 PARAMETER Experiment Name: At_42deg_Heat_cDNA_P Parameter: Timepoint (hr) Value: 6
  misc_feature: MA Experiment 108577 PARAMETER Experiment Name: At_42deg_Heat_cDNA_P Parameter: Tissue Value: Aerial
  misc_feature: MA Experiment ID: 108579 Result: Up-regulated in Transcription
  misc_feature: MA Experiment 108579 PARAMETER Experiment Name: At_4deg_Cold_cDNA_P Parameter: Temperature (deg C) Value: 4 vs. 22
  misc_feature: MA Experiment 108579 PARAMETER Experiment Name: At_4deg_Cold_cDNA_P Parameter: Timepoint (hr) Value: 6
  misc_feature: MA Experiment 108579 PARAMETER Experiment Name: At_4deg_Cold_cDNA_P Parameter: Tissue Value: Aerial
  misc_feature: MA Experiment ID: 108585 Result: Up-regulated in Transcription
  misc_feature: MA Experiment 108585 PARAMETER Experiment Name: At_5mM_NaNP_cDNA_P Parameter: Timepoint (hr) Value: 6
  misc_feature: MA Experiment 108585 PARAMETER Experiment Name: At_5mM_NaNP_cDNA_P Parameter: Tissue Value: Aerial
  misc_feature: MA Experiment 108585 PARAMETER Experiment Name: At_5mM_NaNP_cDNA_P Parameter: Treatment Value: null
  misc_feature: MA Experiment ID: 20000069 Result: Up-regulated in Transcription
  misc_feature: MA Experiment 20000069 PARAMETER Experiment Name: At_100uM_ABA_Mutants_cDNA_P Parameter: Plant Line Value: CS23
  misc_feature: MA Experiment 20000069 PARAMETER Experiment Name: At_100uM_ABA_Mutants_cDNA_P Parameter: Timepoint (hr) Value: 6
  misc_feature: MA Experiment 20000069 PARAMETER Experiment Name: At_100uM_ABA_Mutants_cDNA_P Parameter: Tissue Value: Aerial
  misc_feature: MA Experiment 20000069 PARAMETER Experiment Name: At_100uM_ABA_Mutants_cDNA_P Parameter: Treatment Value: 100uM ABA vs. No Treatment
  misc_feature: MA Experiment ID: 20000070 Result: Up-regulated in Transcription
  misc_feature: MA Experiment 20000070 PARAMETER Experiment Name: At_100uM_ABA_Mutants_cDNA_P Parameter: Plant Line Value: CS24
  misc_feature: MA Experiment 20000070 PARAMETER Experiment Name: At_100uM_ABA_Mutants_cDNA_P Parameter: Timepoint (hr) Value: 6
  misc_feature: MA Experiment 20000070 PARAMETER Experiment Name: At_100uM_ABA_Mutants_cDNA_P Parameter: Tissue Value: Aerial
  misc_feature: MA Experiment 20000070 PARAMETER Experiment Name: At_100uM_ABA_Mutants_cDNA_P Parameter: Treatment Value: 100uM ABA vs. No Treatment
  misc_feature: MA Experiment ID: 20000071 Result: Up-regulated in Transcription
  misc_feature: MA Experiment 20000071 PARAMETER Experiment Name: At_100uM_ABA_Mutants_cDNA_P Parameter: Plant Line Value: CS8104
  misc_feature: MA Experiment 20000071 PARAMETER Experiment Name: At_100uM_ABA_Mutants_cDNA_P Parameter: Timepoint (hr) Value: 6
  misc_feature: MA Experiment 20000071 PARAMETER Experiment Name: At_100uM_ABA_Mutants_cDNA_P Parameter: Tissue Value: Aerial
  misc_feature: MA Experiment 20000071 PARAMETER Experiment Name: At_100uM_ABA_Mutants_cDNA_P Parameter: Treatment Value: 100uM ABA vs. No Treatment
  misc_feature: MA Experiment ID: 20000089 Result: Up-regulated in Transcription
  misc_feature: MA Experiment ID: 20000112 Result: Down-regulated in Transcription
  misc_feature: MA Experiment 20000112 PARAMETER Experiment Name: At_42deg_Heat_cDNA_P Parameter: Temperature (deg C) Value: 42 vs. 22
  misc_feature: MA Experiment 20000112 PARAMETER Experiment Name: At_42deg_Heat_cDNA_P Parameter: Timepoint (hr) Value: 2
  misc_feature: MA Experiment 20000112 PARAMETER Experiment Name: At_42deg_Heat_cDNA_P Parameter: Tissue Value: Aerial
  misc_feature: MA Experiment ID: 20000166 Result: Up-regulated in Transcription
  misc_feature: MA Experiment 20000166 PARAMETER Experiment Name: At_100uM_ABA_P Parameter: Age (day) Value: 14
  misc_feature: MA Experiment 20000166 PARAMETER Experiment Name: At_100uM_ABA_P Parameter: Organism Value: A. thaliana
  misc_feature: MA Experiment 20000166 PARAMETER Experiment Name: At_100uM_ABA_P Parameter: Plant Line Value: WS
  misc_feature: MA Experiment 20000166 PARAMETER Experiment Name: At_100uM_ABA_P Parameter: Timepoint (hr) Value: 1
  misc_feature: MA Experiment 20000166 PARAMETER Experiment Name: At_100uM_ABA_P Parameter: Tissue Value: Aerial
  misc_feature: MA Experiment 20000166 PARAMETER Experiment Name: At_100uM_ABA_P Parameter: Treatment Value: 100uM ABA vs. No Treatment
  misc_feature: MA Experiment ID: 20000171 Result: Down-regulated in Transcription
  misc_feature: MA Experiment 20000171 PARAMETER Experiment Name: At_42deg_Heat_P Parameter: Age (day) Value: 14
  misc_feature: MA Experiment 20000171 PARAMETER Experiment Name: At_42deg_Heat_P Parameter: Organism Value: A. thaliana
  misc_feature: MA Experiment 20000171 PARAMETER Experiment Name: At_42deg_Heat_P Parameter: Plant Line Value: WS
  misc_feature: MA Experiment 20000171 PARAMETER Experiment Name: At_42deg_Heat_P Parameter: Temperature (deg C) Value: 42 vs. 22
  misc_feature: MA Experiment 20000171 PARAMETER Experiment Name: At_42deg_Heat_P Parameter: Timepoint (hr) Value: 1
  misc_feature: MA Experiment 20000171 PARAMETER Experiment Name: At_42deg_Heat_P Parameter: Tissue Value: Aerial
  misc_feature: MA Experiment ID: 20000173 Result: Down-regulated in Transcription
  misc_feature: MA Experiment 20000173 PARAMETER Experiment Name: At_42deg_Heat_P Parameter: Age (day) Value: 14
  misc_feature: MA Experiment 20000173 PARAMETER Experiment Name: At_42deg_Heat_P Parameter: Organism Value: A. thaliana
  misc_feature: MA Experiment 20000173 PARAMETER Experiment Name: At_42deg_Heat_P Parameter: Plant Line Value: WS
  misc_feature: MA Experiment 20000173 PARAMETER Experiment Name: At_42deg_Heat_P Parameter: Temperature (deg C) Value: 42 vs. 22
  misc_feature: MA Experiment 20000173 PARAMETER Experiment Name: At_42deg_Heat_P Parameter: Timepoint (hr) Value: 6
  misc_feature: MA Experiment 20000173 PARAMETER Experiment Name: At_42deg_Heat_P Parameter: Tissue Value: Aerial
  misc_feature: MA Experiment ID: 20000180 Result: Down-regulated in Transcription
  misc_feature: MA Experiment 20000180 PARAMETER Experiment Name: At_Germinating_Seeds_P Parameter: Age (hr) Value: 24 vs. 0
  misc_feature: MA Experiment 20000180 PARAMETER Experiment Name: At_Germinating_Seeds_P Parameter: Tissue Value: Germinating Seeds
  misc_feature: MA Experiment ID: 20000184 Result: Down-regulated in Transcription
  misc_feature: MA Experiment 20000184 PARAMETER Experiment Name: At_Shoots__P Parameter: Age (day) Value: 7
  misc_feature: MA Experiment 20000184 PARAMETER Experiment Name: At_Shoots__P Parameter: Tissue Value: Shoots vs. Whole Plant
  misc_feature: MA Experiment ID: 20000185 Result: Down-regulated in Transcription
  misc_feature: MA Experiment 20000185 PARAMETER Experiment Name: At_Roots__P Parameter: Age (day) Value: 7 vs. 21
  misc_feature: MA Experiment 20000185 PARAMETER Experiment Name: At_Roots__P Parameter: Organism Value: A. thaliana
  misc_feature: MA Experiment 20000185 PARAMETER Experiment Name: At_Roots__P Parameter: Tissue Value: Roots vs. Whole Plant
  misc_feature: MA Experiment ID: 20000213 Result: Up-regulated in Transcription
  misc_feature: MA Experiment 20000213 PARAMETER Experiment Name: At_4deg_Cold_P Parameter: Timepoint (hr) Value: 2
  misc_feature: MA Experiment ID: 20000234 Result: Down-regulated in Transcription
  misc_feature: MA Experiment 20000234 PARAMETER Experiment Name: At_Siliques_P Parameter: Age (day) Value: 21
  misc_feature: MA Experiment 20000234 PARAMETER Experiment Name: At_Siliques_P Parameter: Organism Value: A. thaliana
  misc_feature: MA Experiment 20000234 PARAMETER Experiment Name: At_Siliques_P Parameter: Plant Line Value: WS
  misc_feature: MA Experiment 20000234 PARAMETER Experiment Name: At_Siliques_P Parameter: Tissue Value: Less Than 5mm Siliques vs. Whole Plant
  misc_feature: MA Experiment ID: 20000308 Result: Up-regulated in Transcription
  misc_feature: MA Experiment 20000308 PARAMETER Experiment Name: At_100mM_NaCl__P Parameter: Age (day) Value: 17
  misc_feature: MA Experiment 20000308 PARAMETER Experiment Name: At_100mM_NaCl__P Parameter: Organism Value: A. thaliana
  misc_feature: MA Experiment 20000308 PARAMETER Experiment Name: At_100mM_NaCl__P Parameter: Plant Line Value: WS
  misc_feature: MA Experiment 20000308 PARAMETER Experiment Name: At_100mM_NaCl__P Parameter: Timepoint (hr) Value: 72
  misc_feature: MA Experiment 20000308 PARAMETER Experiment Name: At_100mM_NaCl__P Parameter: Tissue Value: Whole Plant
  misc_feature: MA Experiment 20000308 PARAMETER Experiment Name: At_100mM_NaCl__P Parameter: Treatment Value: 100mM NaCl vs. No Treatment
  misc_feature: MA Experiment ID: 20000437 Result: Up-regulated in Transcription
  misc_feature: MA Experiment 20000437 PARAMETER Experiment Name: At_Drought_P Parameter: Age (day) Value: 8
  misc_feature: MA Experiment 20000437 PARAMETER Experiment Name: At_Drought_P Parameter: Organism Value: A. thaliana
  misc_feature: MA Experiment 20000437 PARAMETER Experiment Name: At_Drought_P Parameter: Plant Line Value: WS
  misc_feature: MA Experiment 20000437 PARAMETER Experiment Name: At_Drought_P Parameter: Timepoint (hr) Value: 24
  misc_feature: MA Experiment 20000437 PARAMETER Experiment Name: At_Drought_P Parameter: Tissue Value: Whole Plant
  misc_feature: MA Experiment 20000437 PARAMETER Experiment Name: At_Drought_P Parameter: Treatment Value: Drought vs. No Drought
  misc_feature: MA Experiment ID: 20000438 Result: Down-regulated in Transcription
  misc_feature: MA Experiment 20000438 PARAMETER Experiment Name: At_Shoots__P Parameter: Age (day) Value: 14
  misc_feature: MA Experiment 20000438 PARAMETER Experiment Name: At_Shoots__P Parameter: Tissue Value: Shoots vs. Whole Plant
  misc_feature: MA Experiment ID: 20000439 Result: Down-regulated in Transcription
  misc_feature: MA Experiment 20000439 PARAMETER Experiment Name: At_Roots__P Parameter: Age (day) Value: 14 vs. 21
  misc_feature: MA Experiment 20000439 PARAMETER Experiment Name: At_Roots__P Parameter: Organism Value: A. thaliana
  misc_feature: MA Experiment 20000439 PARAMETER Experiment Name: At_Roots__P Parameter: Tissue Value: Roots vs. Whole Plant
  misc_feature: MA Experiment ID: 20000495 Result: Down-regulated in Transcription
  misc_feature: MA Experiment 20000495 PARAMETER Experiment Name: At_Guard_Cells_P Parameter: Harvest Date Value: 8/2/2002
  misc_feature: MA Experiment 20000495 PARAMETER Experiment Name: At_Guard_Cells_P Parameter: Organism Value: A. thaliana
  misc_feature: MA Experiment 20000495 PARAMETER Experiment Name: At_Guard_Cells_P Parameter: Tissue Value: Guard Cells vs. Leaves
  misc_feature: MA Experiment ID: 20000574 Result: Up-regulated in Transcription
  misc_feature: MA Experiment 20000574 PARAMETER Experiment Name: At_100uM_ABA_Mutants__P Parameter: Organism Value: A. thaliana
  misc_feature: MA Experiment 20000574 PARAMETER Experiment Name: At_100uM_ABA_Mutants__P Parameter: Plant Line Value: CS23 vs. Ler wt
  misc_feature: MA Experiment 20000574 PARAMETER Experiment Name: At_100uM_ABA_Mutants__P Parameter: Timepoint (hr) Value: N/A
  misc_feature: MA Experiment 20000574 PARAMETER Experiment Name: At_100uM_ABA_Mutants__P Parameter: Tissue Value: Whole Plant
  misc_feature: MA Experiment 20000574 PARAMETER Experiment Name: At_100uM_ABA_Mutants__P Parameter: Treatment Value: None
  misc_feature: MA Experiment ID: 20000794 Result: Up-regulated in Transcription
  misc_feature: MA Experiment 20000794 PARAMETER Experiment Name: At_Petals_P Parameter: Age (day) Value: 23-25 days
  misc_feature: MA Experiment 20000794 PARAMETER Experiment Name: At_Petals_P Parameter: Plant Line Value: WS
  misc_feature: MA Experiment 20000794 PARAMETER Experiment Name: At_Petals_P Parameter: Tissue Value: Petals vs. Whole plant
  misc_feature: MA Experiment ID: 20001451 Result: Down-regulated in Transcription
  misc_feature: MA Experiment 20001451 PARAMETER Experiment Name: At_Far-red-induction_P Parameter: Age (day) Value: 7
  misc_feature: MA Experiment 20001451 PARAMETER Experiment Name: At_Far-red-induction_P Parameter: Light Value: Far-red vs. White
  misc_feature: MA Experiment 20001451 PARAMETER Experiment Name: At_Far-red-induction_P Parameter: Organism Value: A. thaliana
  misc_feature: MA Experiment 20001451 PARAMETER Experiment Name: At_Far-red-induction_P Parameter: Plant Line Value: Columbia
  misc_feature: MA Experiment 20001451 PARAMETER Experiment Name: At_Far-red-induction_P Parameter: Timepoint (hr) Value: 24
  misc_feature: MA Experiment 20001451 PARAMETER Experiment Name: At_Far-red-induction_P Parameter: Tissue Value: Whole Plant
  misc_feature: MA Experiment ID: 20001557 Result: Up-regulated in Transcription
  misc_feature: MA Experiment 20001557 PARAMETER Experiment Name: At_Drought_Soil_Dry_P Parameter: Age (day) Value: 27
  misc_feature: MA Experiment 20001557 PARAMETER Experiment Name: At_Drought_Soil_Dry_P Parameter: Organism Value: A. thaliana
  misc_feature: MA Experiment 20001557 PARAMETER Experiment Name: At_Drought_Soil_Dry_P Parameter: Plant Line Value: WS
  misc_feature: MA Experiment 20001557 PARAMETER Experiment Name: At_Drought_Soil_Dry_P Parameter: Post Timepoint (hr) Value: 3
  misc_feature: MA Experiment 20001557 PARAMETER Experiment Name: At_Drought_Soil_Dry_P Parameter: Post-Treatment Value: Re-Water vs. No Drought
  misc_feature: MA Experiment 20001557 PARAMETER Experiment Name: At_Drought_Soil_Dry_P Parameter: Timepoint (day) Value: 13
  misc_feature: MA Experiment 20001557 PARAMETER Experiment Name: At_Drought_Soil_Dry_P Parameter: Treatment Value: Drought vs. No Drought
  misc_feature: MA Experiment ID: 20001906 Result: Up-regulated in Transcription
  misc_feature: MA Experiment 20001906 PARAMETER Experiment Name: At_Drought_Reproduction_P Parameter: Age (day) Value: 35
  misc_feature: MA Experiment 20001906 PARAMETER Experiment Name: At_Drought_Reproduction_P Parameter: Organism Value: A. thaliana
  misc_feature: MA Experiment 20001906 PARAMETER Experiment Name: At_Drought_Reproduction_P Parameter: Plant Line Value: WS
  misc_feature: MA Experiment 20001906 PARAMETER Experiment Name: At_Drought_Reproduction_P Parameter: Timepoint (day) Value: 5
  misc_feature: MA Experiment 20001906 PARAMETER Experiment Name: At_Drought_Reproduction_P Parameter: Tissue Value: Siliques
  misc_feature: MA Experiment 20001906 PARAMETER Experiment Name: At_Drought_Reproduction_P Parameter: Treatment Value: Drought vs. No Drought
actacacccaaaaaagcttctaacaaagagaaagtgtctgtatgttgtgcccactctctacatttatcaatcacttcatgtgtgttaccttgattgcaaaaaagtgagaatatattctcacaacattaaatccaccccgaaatcgaagtgagtatatcacgagtgtagtaatatcttagagatggttttggaggatagaaaggacggttcttctttgccgggacgatccggtagtttctctaaatcgtcaccgtcggagttggatgttgttgatccctacaagcggataagttcgccgggatctatattggatgctgagaaggtagagaaaaagcctggaggatggagagccgtctcgttcattttaggaaatgagacgctggagagactgggatcgataggattgttggcaaacttcatggtttatctaaccaaagtgtttcacttagaacaagtcgacgctgcaaatgtcatcaacatttggtcaggtttcaccaatctcactcctctcgtcggagcgtatatctcagacacttatgttggccgcttcaagaccatcgctttcgcctcattcgccactctcctcggactaataacaattacactcacagcatcgtttcctcaactccacccagcatcatgcaacagccaggacccactcagttgcggcggtccgaataagctccagatcggagttttgctattgggactctgtttcctctccgtagggagtggaggaatacgaccttgtagcatcccttttggggttgatcagtttgaccaacgaactgaggaaggggttaaaggagtggccagtttcttcaactggtattacatgactttcactgtggttctgatcattacacagaccgtagttgtgtatatccaggatcaagtcagttggattatcggttttagtatccctaccggactcatggctcttgcggttgttatgttttttgccggaatgaagcgttatgtctacgttaaaccagaaggaagtatattctctgggatcgctcaagttatcgtggcagctcgtaagaagcgaaagctgaaacttccggcggaagatgacggcactgtcacctattacgacccagccatcaagtctagcgtgttatccaagttacaccgcagtaaccaattcaggtgtcttgacaaagccgcggtggttatagaaggtgacctaacacccgagggacctcccgcagacaagtggcggttatgcagcgtccaagaagtggaagaagtgaagtgtttgatccgaattgttcctatctggtcggccggaataatctcactcgcggccatgacaacacaaggcactttcacggtctctcaagctttgaaaatggatcgaaacttaggtcctaaattcgagattccggctggttcactctccgtcatctctctcctcacaatcggcatctttcttcccttctacgaccgcgtttttgtaccattcatgcggcgaatcaccggccataaatccggaatcacactcctccaaaggataggaacagggatcgttttcgcgatcttttctatgatcgttgcgggcattgtggagcgtatgagacgcatacgctccatcaatgccggagatccaacgggaatgactccaatgtcggtgttttggctttcgccgcagctaattctcatgggactatgtgaagcattcaatatcatcggacaaattgagttcttcaacagtcagtttccagagcacatgagaagtatcgctaactctctcttctctttatcgttcgccggttcgagctaccttagtagtttccttgtgactgtcgttcataaattctccggtgggcatgatcgtccggattggctaaacaagaatctcaacgcgggaaaattggattacttctattatctgattgcggttttgggtgtggttaatctggtttacttttggtattgtgctcggggataccggtacaaggtcggtttaccgattgaagactttgaggaggacaagtcctccgatgatgttgagatgacttcgaagaaatcgatgaaatgatttaatagactatccttagggacaacaagaagattgtcgatgttgtttgaataattactatgacaatgtatgtatcataatatgtaagaactagaatatttaataaaattttacctttcattag

SEQ ID NO: 35261 - protein, 620 aa, Arabidopsis thaliana
  peptide (1)..(620): Ceres Seq. ID no. 13488400
  misc_feature (137)..(530): Pfam Name: POT family Pfam Description: POT family
  misc_feature (24)..(594): Homolog of NCBI NO: 15241927 NR Description: peptide transporter [Arabidopsis thaliana]
  misc_feature (89)..(612): Homolog of NCBI NO: 15223425 NR Description: peptide transporter -related [Arabidopsis
  misc_feature (59)..(612): Homolog of NCBI NO: 25403285 NR Description: protein T7N9.14 [imported] - Arabidopsis thaliana
MVLEDRKDGSSLPGRSGSFSKSSPSELDVVDPYKRISSPGSILDAEKVEKKPGGWRAVSFILGNETLERLGSIGLLANFMVYLTKVFHLEQVDAANVINIWSGFTNLTPLVGAYISDTYVGRFKTIAFASFATLLGLITITLTASFPQLHPASCNSQDPLSCGGPNKLQIGVLLLGLCFLSVGSGGIRPCSIPFGVDQFDQRTEEGVKGVASFFNWYYMTFTVVLIITQTVVVYIQDQVSWIIGFSIPTGLMALAVVMFFAGMKRYVYVKPEGSIFSGIAQVIVAARKKRKLKLPAEDDGTVTYYDPAIKSSVLSKLHRSNQFRCLDKAAVVIEGDLTPEGPPADKWRLCSVQEVEEVKCLIRIVPIWSAGIISLAAMTTQGTFTVSQALKMDRNLGPKFEIPAGSLSVISLLTIGIFLPFYDRVFVPFMRRITGHKSGITLLQRIGTGIVFAIFSMIVAGIVERMRRIRSINAGDPTGMTPMSVFWLSPQLILMGLCEAFNIIGQIEFFNSQFPEHMRSIANSLFSLSFAGSSYLSSFLVTVVHKFSGGHDRPDWLNKNLNAGKLDYFYYLIAVLGVVNLVYFWYCARGYRYKVGLPIEDFEEDKSSDDVEMTSKKSMK

SEQ ID NO: 35262 - protein, 541 aa, Arabidopsis thaliana
  peptide (1)..(541): Ceres Seq. ID no. 13488401
  misc_feature (58)..(451): Pfam Name: POT family Pfam Description: POT family
  misc_feature (1)..(515): Homolog of NCBI NO: 15241927 NR Description: peptide transporter [Arabidopsis thaliana]
  misc_feature (10)..(533): Homolog of NCBI NO: 15223425 NR Description: peptide transporter -related [Arabidopsis
  misc_feature (1)..(533): Homolog of NCBI NO: 25403285 NR Description: protein T7N9.14 [imported] - Arabidopsis thaliana
MVYLTKVFHLEQVDAANVINIWSGFTNLTPLVGAYISDTYVGRFKTIAFASFATLLGLITITLTASFPQLHPASCNSQDPLSCGGPNKLQIGVLLLGLCFLSVGSGGIRPCSIPFGVDQFDQRTEEGVKGVASFFNWYYMTFTVVLIITQTVVVYIQDQVSWIIGFSIPTGLMALAVVMFFAGMKRYVYVKPEGSIFSGIAQVIVAARKKRKLKLPAEDDGTVTYYDPAIKSSVLSKLHRSNQFRCLDKAAVVIEGDLTPEGPPADKWRLCSVQEVEEVKCLIRIVPIWSAGIISLAAMTTQGTFTVSQALKMDRNLGPKFEIPAGSLSVISLLTIGIFLPFYDRVFVPFMRRITGHKSGITLLQRIGTGIVFAIFSMIVAGIVERMRRIRSINAGDPTGMTPMSVFWLSPQLILMGLCEAFNIIGQIEFFNSQFPEHMRSIANSLFSLSFAGSSYLSSFLVTVVHKFSGGHDRPDWLNKNLNAGKLDYFYYLIAVLGVVNLVYFWYCARGYRYKVGLPIEDFEEDKSSDDVEMTSKKSMK

SEQ ID NO: 35263 - protein, 402 aa, Arabidopsis thaliana
  peptide (1)..(402): Ceres Seq. ID no. 13488402
  misc_feature (1)..(312): Pfam Name: POT family Pfam Description: POT family
  misc_feature (1)..(376): Homolog of NCBI NO: 15241927 NR Description: peptide transporter [Arabidopsis thaliana]
  misc_feature (1)..(394): Homolog of NCBI NO: 15223425 NR Description: peptide transporter -related [Arabidopsis
  misc_feature (1)..(394): Homolog of NCBI NO: 25403285 NR Description: protein T7N9.14 [imported] - Arabidopsis thaliana
MTFTVVLIITQTVVVYIQDQVSWIIGFSIPTGLMALAVVMFFAGMKRYVYVKPEGSIFSGIAQVIVAARKKRKLKLPAEDDGTVTYYDPAIKSSVLSKLHRSNQFRCLDKAAVVIEGDLTPEGPPADKWRLCSVQEVEEVKCLIRIVPIWSAGIISLAAMTTQGTFTVSQALKMDRNLGPKFEIPAGSLSVISLLTIGIFLPFYDRVFVPFMRRITGHKSGITLLQRIGTGIVFAIFSMIVAGIVERMRRIRSINAGDPTGMTPMSVFWLSPQLILMGLCEAFNIIGQIEFFNSQFPEHMRSIANSLFSLSFAGSSYLSSFLVTVVHKFSGGHDRPDWLNKNLNAGKLDYFYYLIAVLGVVNLVYFWYCARGYRYKVGLPIEDFEEDKSSDDVEMTSKKSMK

SEQ ID NO: 35264 - DNA, 2154 bp, Arabidopsis thaliana
  misc_feature (1)..(2154): Ceres Seq. ID no. 13490925
  misc_feature: MA Experiment ID: 108434 Result: Up-regulated in Transcription
  misc_feature: MA Experiment 108434 PARAMETER Experiment Name: At_Root_Tips_cDNA_P Parameter: Tissue Value: Root Tips
  misc_feature: MA Experiment ID: 108572 Result: Up-regulated in Transcription
  misc_feature: MA Experiment 108572 PARAMETER Experiment Name: At_Drought_cDNA_P Parameter: Timepoint (hr) Value: 1
  misc_feature: MA Experiment 108572 PARAMETER Experiment Name: At_Drought_cDNA_P Parameter: Tissue Value: Aerial
  misc_feature: MA Experiment 108572 PARAMETER Experiment Name: At_Drought_cDNA_P Parameter: Treatment Value: Drought vs. No Drought
  misc_feature: MA Experiment ID: 20000184 Result: Down-regulated in Transcription
  misc_feature: MA Experiment 20000184 PARAMETER Experiment Name: At_Shoots__P Parameter: Age (day) Value: 7
  misc_feature: MA Experiment 20000184 PARAMETER Experiment Name: At_Shoots__P Parameter: Tissue Value: Shoots vs. Whole Plant
  misc_feature: MA Experiment ID: 20001757 Result: Down-regulated in Transcription
  misc_feature: MA Experiment 20001757 PARAMETER Experiment Name: At_50mM_NH4NO3_L-to-H_P Parameter: Timepoint (hr) Value: 6
  misc_feature: MA Experiment 20001757 PARAMETER Experiment Name: At_50mM_NH4NO3_L-to-H_P Parameter: Tissue Value: Leaf
  misc_feature: MA Experiment 20001757 PARAMETER Experiment Name: At_50mM_NH4NO3_L-to-H_P Parameter: Treatment Value: 50mM NH4NO3 vs 100mM Mannitol
agagagagagggagaggtgcttttttagtcgttctcgtcgagagacttatttatacacgaaaaaggaagaagaagactgttgaaagcgagagagagagagagagagagagagagagagagagagagagagagatggaggatatacaggaggaagagaacggtacggacgaggaggttctgggatcgagcttgaccatggagaaagtggccgcagcgaagcagtacatcgagaatcactacaaagctcagaacaagaacattcaagagaggaaagagagacggtggatcttagaaagaaagttggcgtcttctggagtgccaaaagaggagcaaatcaacatgattaaagacctggagagaaaagagacagagtttatgaggcttaaaaggaacaagattagtgtcgatgactttgagcttttgactatcattggaagaggtgcttttggtgaggttcgcttatgtcgggagagaaagtctggaaatatttatgccatgaagaagttaaagaaatctgaaatggtcatgagaggacaggttgagcatgtcagagcagagaggaacctgctggctgaggttgaaagccattatattgtgaagctttactattcatttcaggatcccgagtatctgtatctgattatggaatatctccccggtggtgatatgatgaccttgctcatgagggaggacacattacgggaagatgttgccagattttatattgctcaaagtgtcctggccattgaatccatacacagatacaactatattcatagggatatcaaacctgataacctacttttggacaaagatgggcacatgaaactctcggactttgggctctgtaagcctcttgattgtagaaatttaccttcaattcaggagaatagggccacggatgatgaaactatgtcagaacctatggatgttgatagatgctttcctgacactgataacaagagaagctggcgcagtccccaggaacaacttcagcattggcagatgaatcgcagaaaactagcattttcaactgtgggaacaccggactatattgctcctgaagttttgctgaagaaaggatatggcatggaatgtgattggtggtcattaggtgcaattatgtacgaaatgctcgttgggtatcctcctttttatgctgatgaccctatatcaacttgcagaaagatcgtccattggagaaaccatttgaaatttcctgaggatgcgaagttttcatctgaggcaaaagatcttatctgcaggttgctgtgcaacgttgaccataggcttggtactggaggaggagcccagcaaatcaaggatcatccttggttcaaggatgttgtgtgggaaaagctctatgaaatggaggctgcgtacaaaccagaagtgaacgacgagctagatacacaaaattttatgaagtttgatgaagtgaattctcctgcacctgaaagaactagatcaggactctccaggaagatgcttcttgctcccaaggatttaagttttgttggctacacatacaagaactttgacgctgtaaaaggattgcgtcattcacttgagatggcaagaactatgtctctagatcgatcaccagctgaggcgatgcctgtggagctgataagcggggaagcagcagaggcacagatggtatcatcgatggatgatccaatgataatttgaaagaaccgatcaaagatataagatcttcctcaggtttgggatcttaaagccttctaaaaaaaaataactgtacagcaagcccagaggttaaagaggaagaagatcaaaatggtttgtgtgggagattgattaacaatgttagcctttcctgattattctgtgtattagaagaagaagacaagagaagggagaaaaagatttagaggtatgagtaaaagtctcagtgttatataaaagctgcccaggttggctgtagtaatgttgccttctctagtggcagttttattgcaacttttttactttttacctttatgtatgtgtgtgtgtgtatcaacttctatttctaaatttgaagacccaccgaggagtgaggacttagattgtatatttgagttttgttgggagtccatttctaaccaaacttgtatattaaatttaaaggatcattttgccttaggttga

SEQ ID NO: 35265 - protein, 563 aa, Arabidopsis thaliana
  peptide (1)..(563): Ceres Seq. ID no. 13490926
  misc_feature (138)..(446): Pfam Name: Protein kinase domain Pfam Description: Protein kinase domain
  misc_feature (31)..(562): Homolog of NCBI NO: 7339534 NR Description: protein kinase MK6 [Mesembryanthemum crystallinum]
  misc_feature (498)..(538): Homolog of NCBI NO: 7446410 NR Description: protein kinase F27F23.20 (EC 2.7.1.-) -
  misc_feature (36)..(519): Homolog of NCBI NO: 7446410 NR Description: protein kinase F27F23.20 (EC 2.7.1.-) -
  misc_feature (36)..(538): Homolog of NCBI NO: 18399030 NR Description: protein kinase, putative [Arabidopsis thaliana]
  misc_feature (66)..(522): Homolog of NCBI NO: 34906336 NR Description: unnamed protein product [Oryza sativa (japonica
  misc_feature (66)..(562): Homolog of NCBI NO: 541824 NR Description: protein kinase (EC 2.7.1.-) - spinach
  misc_feature (45)..(523): Homolog of NCBI NO: 15234064 NR Description: protein kinase, putative [Arabidopsis thaliana]
  misc_feature (45)..(563): Homolog of NCBI NO: 31088228 NR Description: protein kinase [Raphanus sativus]
  misc_feature (27)..(563): Homolog of NCBI NO: 31088226 NR Description: protein kinase [Raphanus sativus]
  misc_feature (45)..(563): Homolog of NCBI NO: 27311789 NR Description: putative protein kinase [Arabidopsis thaliana]
RERGRGAFLVVLVERLIYTRKRKKKTVESEREREREREREREREMEDIQEEENGTDEEVLGSSLTMEKVAAAKQYIENHYKAQNKNIQERKERRWILERKLASSGVPKEEQINMIKDLERKETEFMRLKRNKISVDDFELLTIIGRGAFGEVRLCRERKSGNIYAMKKLKKSEMVMRGQVEHVRAERNLLAEVESHYIVKLYYSFQDPEYLYLIMEYLPGGDMMTLLMREDTLREDVARFYIAQSVLAIESIHRYNYIHRDIKPDNLLLDKDGHMKLSDFGLCKPLDCRNLPSIQENRATDDETMSEPMDVDRCFPDTDNKRSWRSPQEQLQHWQMNRRKLAFSTVGTPDYIAPEVLLKKGYGMECDWWSLGAIMYEMLVGYPPFYADDPISTCRKIVHWRNHLKFPEDAKFSSEAKDLICRLLCNVDHRLGTGGGAQQIKDHPWFKDVVWEKLYEMEAAYKPEVNDELDTQNFMKFDEVNSPAPERTRSGLSRKMLLAPKDLSFVGYTYKNFDAVKGLRHSLEMARTMSLDRSPAEAMPVELISGEAAEAQMVSSMDDPMII

SEQ ID NO: 35266 - protein, 519 aa, Arabidopsis thaliana
  peptide (1)..(519): Ceres Seq. ID no. 13490927
  misc_feature (94)..(402): Pfam Name: Protein kinase domain Pfam Description: Protein kinase domain
  misc_feature (1)..(518): Homolog of NCBI NO: 7339534 NR Description: protein kinase MK6 [Mesembryanthemum crystallinum]
  misc_feature (454)..(494): Homolog of NCBI NO: 7446410 NR Description: protein kinase F27F23.20 (EC 2.7.1.-) -
  misc_feature (1)..(475): Homolog of NCBI NO: 7446410 NR Description: protein kinase F27F23.20 (EC 2.7.1.-) -
  misc_feature (1)..(494): Homolog of NCBI NO: 18399030 NR Description: protein kinase, putative [Arabidopsis thaliana]
  misc_feature (22)..(478): Homolog of NCBI NO: 34906336 NR Description: unnamed protein product [Oryza sativa (japonica
  misc_feature (22)..(518): Homolog of NCBI NO: 541824 NR Description: protein kinase (EC 2.7.1.-) - spinach
  misc_feature (1)..(479): Homolog of NCBI NO: 15234064 NR Description: protein kinase, putative [Arabidopsis thaliana]
  misc_feature (1)..(519): Homolog of NCBI NO: 31088228 NR Description: protein kinase [Raphanus sativus]
  misc_feature (1)..(519): Homolog of NCBI NO: 31088226 NR Description: protein kinase [Raphanus sativus]
  misc_feature (1)..(519): Homolog of NCBI NO: 27311789 NR Description: putative protein kinase [Arabidopsis thaliana]
MEDIQEEENGTDEEVLGSSLTMEKVAAAKQYIENHYKAQNKNIQERKERRWILERKLASSGVPKEEQINMIKDLERKETEFMRLKRNKISVDDFELLTIIGRGAFGEVRLCRERKSGNIYAMKKLKKSEMVMRGQVEHVRAERNLLAEVESHYIVKLYYSFQDPEYLYLIMEYLPGGDMMTLLMREDTLREDVARFYIAQSVLAIESIHRYNYIHRDIKPDNLLLDKDGHMKLSDFGLCKPLDCRNLPSIQENRATDDETMSEPMDVDRCFPDTDNKRSWRSPQEQLQHWQMNRRKLAFSTVGTPDYIAPEVLLKKGYGMECDWWSLGAIMYEMLVGYPPFYADDPISTCRKIVHWRNHLKFPEDAKFSSEAKDLICRLLCNVDHRLGTGGGAQQIKDHPWFKDVVWEKLYEMEAAYKPEVNDELDTQNFMKFDEVNSPAPERTRSGLSRKMLLAPKDLSFVGYTYKNFDAVKGLRHSLEMARTMSLDRSPAEAMPVELISGEAAEAQMVSSMDDPMII

SEQ ID NO: 35267 - protein, 498 aa, Arabidopsis thaliana
  peptide (1)..(498): Ceres Seq. ID no. 13490928
  misc_feature (73)..(381): Pfam Name: Protein kinase domain Pfam Description: Protein kinase domain
  misc_feature (1)..(497): Homolog of NCBI NO: 7339534 NR Description: protein kinase MK6 [Mesembryanthemum crystallinum]
  misc_feature (433)..(473): Homolog of NCBI NO: 7446410 NR Description: protein kinase F27F23.20 (EC 2.7.1.-) -
  misc_feature (1)..(454): Homolog of NCBI NO: 7446410 NR Description: protein kinase F27F23.20 (EC 2.7.1.-) -
  misc_feature (1)..(473): Homolog of NCBI NO: 18399030 NR Description: protein kinase, putative [Arabidopsis thaliana]
  misc_feature (1)..(457): Homolog of NCBI NO: 34906336 NR Description: unnamed protein product [Oryza sativa (japonica
  misc_feature (1)..(497): Homolog of NCBI NO: 541824 NR Description: protein kinase (EC 2.7.1.-) - spinach
  misc_feature (1)..(458): Homolog of NCBI NO: 15234064 NR Description: protein kinase, putative [Arabidopsis thaliana]
  misc_feature (1)..(498): Homolog of NCBI NO: 31088228 NR Description: protein kinase [Raphanus sativus]
  misc_feature (1)..(498): Homolog of NCBI NO: 31088226 NR Description: protein kinase [Raphanus sativus]
  misc_feature (1)..(498): Homolog of NCBI NO: 27311789 NR Description: putative protein kinase [Arabidopsis thaliana]
MEKVAAAKQYIENHYKAQNKNIQERKERRWILERKLASSGVPKEEQINMIKDLERKETEFMRLKRNKISVDDFELLTIIGRGAFGEVRLCRERKSGNIYAMKKLKKSEMVMRGQVEHVRAERNLLAEVESHYIVKLYYSFQDPEYLYLIMEYLPGGDMMTLLMREDTLREDVARFYIAQSVLAIESIHRYNYIHRDIKPDNLLLDKDGHMKLSDFGLCKPLDCRNLPSIQENRATDDETMSEPMDVDRCFPDTDNKRSWRSPQEQLQHWQMNRRKLAFSTVGTPDYIAPEVLLKKGYGMECDWWSLGAIMYEMLVGYPPFYADDPISTCRKIVHWRNHLKFPEDAKFSSEAKDLICRLLCNVDHRLGTGGGAQQIKDHPWFKDVVWEKLYEMEAAYKPEVNDELDTQNFMKFDEVNSPAPERTRSGLSRKMLLAPKDLSFVGYTYKNFDAVKGLRHSLEMARTMSLDRSPAEAMPVELISGEAAEAQMVSSMDDPMII

SEQ ID NO: 35268 - DNA, 1281 bp, Arabidopsis thaliana
  misc_feature (1)..(1281): Ceres Seq. ID no. 12326002
  misc_feature: MA Experiment ID: 108434 Result: Down-regulated in Transcription
  misc_feature: MA Experiment 108434 PARAMETER Experiment Name: At_Root_Tips_cDNA_P Parameter: Tissue Value: Root Tips
  misc_feature: MA Experiment ID: 108461 Result: Up-regulated in Transcription
  misc_feature: MA Experiment 108461 PARAMETER Experiment Name: At_Germinating_Seeds_cDNA_P Parameter: Age (day) Value: 1 vs. 0
  misc_feature: MA Experiment 108461 PARAMETER Experiment Name: At_Germinating_Seeds_cDNA_P Parameter: Tissue Value: Germinating Seeds
  misc_feature: MA Experiment ID: 108462 Result: Up-regulated in Transcription
  misc_feature: MA Experiment 108462 PARAMETER Experiment Name: At_Germinating_Seeds_cDNA_P Parameter: Age (day) Value: 2 vs. 0
  misc_feature: MA Experiment 108462 PARAMETER Experiment Name: At_Germinating_Seeds_cDNA_P Parameter: Tissue Value: Germinating Seeds
  misc_feature: MA Experiment ID: 108463 Result: Up-regulated in Transcription
  misc_feature: MA Experiment 108463 PARAMETER Experiment Name: At_Germinating_Seeds_cDNA_P Parameter: Age (day) Value: 3 vs. 0
  misc_feature: MA Experiment 108463 PARAMETER Experiment Name: At_Germinating_Seeds_cDNA_P Parameter: Tissue Value: Germinating Seeds
  misc_feature: MA Experiment ID: 108464 Result: Up-regulated in Transcription
  misc_feature: MA Experiment 108464 PARAMETER Experiment Name: At_Germinating_Seeds_cDNA_P Parameter: Age (day) Value: 4 vs. 0
  misc_feature: MA Experiment 108464 PARAMETER Experiment Name: At_Germinating_Seeds_cDNA_P Parameter: Tissue Value: Germinating Seeds
  misc_feature: MA Experiment ID: 108488 Result: Down-regulated in Transcription
  misc_feature: MA Experiment ID: 108577 Result: Down-regulated in Transcription
  misc_feature: MA Experiment 108577 PARAMETER Experiment Name: At_42deg_Heat_cDNA_P Parameter: Temperature (deg C) Value: 42 vs. 22
  misc_feature: MA Experiment 108577 PARAMETER Experiment Name: At_42deg_Heat_cDNA_P Parameter: Timepoint (hr) Value: 6
  misc_feature: MA Experiment 108577 PARAMETER Experiment Name: At_42deg_Heat_cDNA_P Parameter: Tissue Value: Aerial
  misc_feature: MA Experiment ID: 108585 Result: Up-regulated in Transcription
  misc_feature: MA Experiment 108585 PARAMETER Experiment Name: At_5mM_NaNP_cDNA_P Parameter: Timepoint (hr) Value: 6
  misc_feature: MA Experiment 108585 PARAMETER Experiment Name: At_5mM_NaNP_cDNA_P Parameter: Tissue Value: Aerial
  misc_feature: MA Experiment 108585 PARAMETER Experiment Name: At_5mM_NaNP_cDNA_P Parameter: Treatment Value: null
  misc_feature: MA Experiment ID: 108595 Result: Down-regulated in Transcription
  misc_feature: MA Experiment 108595 PARAMETER Experiment Name: At_Ler-pi_Ovule_cDNA_P Parameter: Plant Line Value: null
  misc_feature: MA Experiment ID: 20000113 Result: Down-regulated in Transcription
  misc_feature: MA Experiment 20000113 PARAMETER Experiment Name: At_42deg_Heat_cDNA_P Parameter: Temperature (deg C) Value: 42 vs. 22
  misc_feature: MA Experiment 20000113 PARAMETER Experiment Name: At_42deg_Heat_cDNA_P Parameter: Timepoint (hr) Value: 8
  misc_feature: MA Experiment 20000113 PARAMETER Experiment Name: At_42deg_Heat_cDNA_P Parameter: Tissue Value: Aerial
  misc_feature: MA Experiment ID: 20000173 Result: Down-regulated in Transcription
  misc_feature: MA Experiment 20000173 PARAMETER Experiment Name: At_42deg_Heat_P Parameter: Age (day) Value: 14
  misc_feature: MA Experiment 20000173 PARAMETER Experiment Name: At_42deg_Heat_P Parameter: Organism Value: A. thaliana
  misc_feature: MA Experiment 20000173 PARAMETER Experiment Name: At_42deg_Heat_P Parameter: Plant Line Value: WS
  misc_feature: MA Experiment 20000173 PARAMETER Experiment Name: At_42deg_Heat_P Parameter: Temperature (deg C) Value: 42 vs. 22
  misc_feature: MA Experiment 20000173 PARAMETER Experiment Name: At_42deg_Heat_P Parameter: Timepoint (hr) Value: 6
  misc_feature: MA Experiment 20000173 PARAMETER Experiment Name: At_42deg_Heat_P Parameter: Tissue Value: Aerial
  misc_feature: MA Experiment ID: 20000180 Result: Up-regulated in Transcription
  misc_feature: MA Experiment 20000180 PARAMETER Experiment Name: At_Germinating_Seeds_P Parameter: Age (hr) Value: 24 vs. 0
  misc_feature: MA Experiment 20000180 PARAMETER Experiment Name: At_Germinating_Seeds_P Parameter: Tissue Value: Germinating Seeds
  misc_feature: MA Experiment ID: 20000184 Result: Down-regulated in Transcription
  misc_feature: MA Experiment 20000184 PARAMETER Experiment Name: At_Shoots__P Parameter: Age (day) Value: 7
  misc_feature: MA Experiment 20000184 PARAMETER Experiment Name: At_Shoots__P Parameter: Tissue Value: Shoots vs. Whole Plant
  misc_feature: MA Experiment ID: 20000185 Result: Up-regulated in Transcription
  misc_feature: MA Experiment 20000185 PARAMETER Experiment Name: At_Roots__P Parameter: Age (day) Value: 7 vs. 21
  misc_feature: MA Experiment 20000185 PARAMETER Experiment Name: At_Roots__P Parameter: Organism Value: A. thaliana
  misc_feature: MA Experiment 20000185 PARAMETER Experiment Name: At_Roots__P Parameter: Tissue Value: Roots vs. Whole Plant
  misc_feature: MA Experiment ID: 20000224 Result: Up-regulated in Transcription
  misc_feature: MA Experiment ID: 20001450 Result: Down-regulated in Transcription
  misc_feature: MA Experiment 20001450 PARAMETER Experiment Name: At_Far-red-induction_P Parameter: Age (day) Value: 7
  misc_feature: MA Experiment 20001450 PARAMETER Experiment Name: At_Far-red-induction_P Parameter: Light Value: Far-red vs. White
  misc_feature: MA Experiment 20001450 PARAMETER Experiment Name: At_Far-red-induction_P Parameter: Organism Value: A. thaliana
  misc_feature: MA Experiment 20001450 PARAMETER Experiment Name: At_Far-red-induction_P Parameter: Plant Line Value: Columbia
  misc_feature: MA Experiment 20001450 PARAMETER Experiment Name: At_Far-red-induction_P Parameter: Timepoint (hr) Value: 8
  misc_feature: MA Experiment 20001450 PARAMETER Experiment Name: At_Far-red-induction_P Parameter: Tissue Value: Whole Plant
  misc_feature: MA Experiment ID: 20001906 Result: Down-regulated in Transcription
  misc_feature: MA Experiment 20001906 PARAMETER Experiment Name: At_Drought_Reproduction_P Parameter: Age (day) Value: 35
  misc_feature: MA Experiment 20001906 PARAMETER Experiment Name: At_Drought_Reproduction_P Parameter: Organism Value: A. thaliana
  misc_feature: MA Experiment 20001906 PARAMETER Experiment Name: At_Drought_Reproduction_P Parameter: Plant Line Value: WS
  misc_feature: MA Experiment 20001906 PARAMETER Experiment Name: At_Drought_Reproduction_P Parameter: Timepoint (day) Value: 5
  misc_feature: MA Experiment 20001906 PARAMETER Experiment Name: At_Drought_Reproduction_P Parameter: Tissue Value: Siliques
  misc_feature: MA Experiment 20001906 PARAMETER Experiment Name: At_Drought_Reproduction_P Parameter: Treatment Value: Drought vs. No Drought
gtgaaagaatgtagcaaataataatagagagaatttgtttagggaatacttttgccttgagaaaaatataaagaagaaaagtcgtcggcggaggaagtcagtagccaataatgataagaatcaccggctgttcacatgtggattgattacctcacattcatatttattacataaactcatctctctgtttttctttcttagaatcattcatatttcagacacaaaggcagagaaacaaattcttgtaacaatggcaggcagagagattctccataagatgaaggttggattatgcggatctgacacaggcagaggtaaaaccaaggtgtggaagaacatcgcacacggttatgactttgtgaaaggcaaagcgggccatccgatggaggactatgttgtgtctgagttcaagaaagtagacggccatgatttgggtttgtttgctatctttgatggtcacttagggcatgatgtagccaagtacttgcaaaccaatctctttgataacatactcaaagagaaggatttttggactgatacgaaaaacgctataaggaatgcatacatatcaaccgatgctgtgatattagagcagtcacttaaacttggcaaaggtggatcaacggctgtaacaggcattctgatagatgggaaaacgctagtgattgctaacgttggagactcacgtgcagtgatgtcaaagaacggtgttgcttctcaactctctgttgatcatgaaccaagcaaggaacaaaaggaaatagaaagccgtggtggctttgtatcaaatattccaggggatgttccaagagttgatggacaactagcggttgctagggcgtttggagataagagcttaaagatacatctgagctcagatccagacataagagacgagaatatcgatcatgagactgagtttatccttttcgcaagtgatggagtttggaaggtgatgtcgaaccaagaagcggtggatttgatcaaaagcataaaagatccacaagcggcagccaaggagttgatagaagaagcagtctctaagcaaagcacagacgacatttcttgtatagttgtaaggttccagtgatagataaacttttgttgtctataaactttaccattccggtgtgtgtgagagggagaaacaaaagacgtataaaacgcctatgctgtgtgatcaaagtcatgtcttgcttaaacaattccattgacaataaatgttctggccacaatgtaaaatccatggttgttgatccaatactctaaatggtttctttt

SEQ ID NO: 35269 - protein, 279 aa, Arabidopsis thaliana
  peptide (1)..(279): Ceres Seq. ID no. 12326003
  misc_feature (32)..(271): Pfam Name: Protein phosphatase 2C Pfam Description: Protein phosphatase 2C
  misc_feature (13)..(279): Homolog of NCBI NO: 18395099 NR Description: protein phosphatase 2C (PP2C), putative
  misc_feature (5)..(279): Homolog of NCBI NO: 32488822 NR Description: OSJNBa0085I10.2 [Oryza sativa (japonica
  misc_feature (1)..(278): Homolog of NCBI NO: 23307574 NR Description: putative protein phosphatase 2C homolog
  misc_feature (1)..(279): Homolog of NCBI NO: 21539551 NR Description: putative protein phosphatase type 2C [Arabidopsis
  misc_feature (1)..(279): Homolog of NCBI NO: 15232538 NR Description: protein phosphatase 2C (PP2C); protein id:
  misc_feature (1)..(279): Homolog of NCBI NO: 4336436 NR Description: protein phosphatase type 2C [Lotus japonicus]
  misc_feature (26)..(278): Homolog of NCBI NO: 7488280 NR Description: protein phosphatase 2C homolog F20O9.80 -
  misc_feature (1)..(278): Homolog of NCBI NO: 18417190 NR Description: protein phosphatase 2C (PP2C)
  misc_feature (1)..(279): Homolog of NCBI NO: 25411985 NR Description: probable protein phosphatase 2C [imported] -
  misc_feature (1)..(279): Homolog of NCBI NO: 18399423 NR Description: protein phosphatase 2C (PP2C)
MAGREILHKMKVGLCGSDTGRGKTKVWKNIAHGYDFVKGKAGHPMEDYVVSEFKKVDGHDLGLFAIFDGHLGHDVAKYLQTNLFDNILKEKDFWTDTKNAIRNAYISTDAVILEQSLKLGKGGSTAVTGILIDGKTLVIANVGDSRAVMSKNGVASQLSVDHEPSKEQKEIESRGGFVSNIPGDVPRVDGQLAVARAFGDKSLKIHLSSDPDIRDENIDHETEFILFASDGVWKVMSNQEAVDLIKSIKDPQAAAKELIEEAVSKQSTDDISCIVVRFQ

SEQ ID NO: 35270 - protein, 270 aa, Arabidopsis thaliana
  peptide (1)..(270): Ceres Seq. ID no. 12326004
  misc_feature (23)..(262): Pfam Name: Protein phosphatase 2C Pfam Description: Protein phosphatase 2C
  misc_feature (4)..(270): Homolog of NCBI NO: 18395099 NR Description: protein phosphatase 2C (PP2C), putative
  misc_feature (1)..(270): Homolog of NCBI NO: 32488822 NR Description: OSJNBa0085I10.2 [Oryza sativa (japonica
  misc_feature (1)..(269): Homolog of NCBI NO: 23307574 NR Description: putative protein phosphatase 2C homolog
  misc_feature (1)..(270): Homolog of NCBI NO: 21539551 NR Description: putative protein phosphatase type 2C [Arabidopsis
  misc_feature (1)..(270): Homolog of NCBI NO: 15232538 NR Description: protein phosphatase 2C (PP2C); protein id:
  misc_feature (1)..(270): Homolog of NCBI NO: 4336436 NR Description: protein phosphatase type 2C [Lotus japonicus]
  misc_feature (17)..(269): Homolog of NCBI NO: 7488280 NR Description: protein phosphatase 2C homolog F20O9.80 -
  misc_feature (1)..(269): Homolog of NCBI NO: 18417190 NR Description: protein phosphatase 2C (PP2C)
  misc_feature (1)..(270): Homolog of NCBI NO: 25411985 NR Description: probable protein phosphatase 2C [imported] -
  misc_feature (1)..(270): Homolog of NCBI NO: 18399423 NR Description: protein phosphatase 2C (PP2C)
MKVGLCGSDTGRGKTKVWKNIAHGYDFVKGKAGHPMEDYVVSEFKKVDGHDLGLFAIFDGHLGHDVAKYLQTNLFDNILKEKDFWTDTKNAIRNAYISTDAVILEQSLKLGKGGSTAVTGILIDGKTLVIANVGDSRAVMSKNGVASQLSVDHEPSKEQKEIESRGGFVSNIPGDVPRVDGQLAVARAFGDKSLKIHLSSDPDIRDENIDHETEFILFASDGVWKVMSNQEAVDLIKSIKDPQAAAKELIEEAVSKQSTDDISCIVVRFQ

SEQ ID NO: 35271 - protein, 235 aa, Arabidopsis thaliana
  peptide (1)..(235): Ceres Seq. ID no. 12326005
  misc_feature (1)..(227): Pfam Name: Protein phosphatase 2C Pfam Description: Protein phosphatase 2C
  misc_feature (1)..(235): Homolog of NCBI NO: 18395099 NR Description: protein phosphatase 2C (PP2C), putative
  misc_feature (1)..(235): Homolog of NCBI NO: 32488822 NR Description: OSJNBa0085I10.2 [Oryza sativa (japonica
  misc_feature (1)..(234): Homolog of NCBI NO: 23307574 NR Description: putative protein phosphatase 2C homolog
  misc_feature (1)..(235): Homolog of NCBI NO: 21539551 NR Description: putative protein phosphatase type 2C [Arabidopsis
  misc_feature (1)..(235): Homolog of NCBI NO: 15232538 NR Description: protein phosphatase 2C (PP2C); protein id:
  misc_feature (1)..(235): Homolog of NCBI NO: 4336436 NR Description: protein phosphatase type 2C [Lotus japonicus]
  misc_feature (1)..(234): Homolog of NCBI NO: 7488280 NR Description: protein phosphatase 2C homolog F20O9.80 -
  misc_feature (1)..(234): Homolog of NCBI NO: 18417190 NR Description: protein phosphatase 2C (PP2C)
  misc_feature (1)..(235): Homolog of NCBI NO: 25411985 NR Description: probable protein phosphatase 2C [imported] -
  misc_feature (1)..(235): Homolog of NCBI NO: 18399423 NR Description: protein phosphatase 2C (PP2C)
MEDYVVSEFKKVDGHDLGLFAIFDGHLGHDVAKYLQTNLFDNILKEKDFWTDTKNAIRNAYISTDAVILEQSLKLGKGGSTAVTGILIDGKTLVIANVGDSRAVMSKNGVASQLSVDHEPSKEQKEIESRGGFVSNIPGDVPRVDGQLAVARAFGDKSLKIHLSSDPDIRDENIDHETEFILFASDGVWKVMSNQEAVDLIKSIKDPQAAAKELIEEAVSKQSTDDISCIVVRFQ

SEQ ID NO: 35272 - DNA, 852 bp, Arabidopsis thaliana
  misc_feature (1)..(852): Ceres Seq. ID no. 12579972
  misc_feature: MA Experiment ID: 108434 Result: Down-regulated in Transcription
  misc_feature: MA Experiment 108434 PARAMETER Experiment Name: At_Root_Tips_cDNA_P Parameter: Tissue Value: Root Tips
  misc_feature: MA Experiment ID: 108462 Result: Up-regulated in Transcription
  misc_feature: MA Experiment 108462 PARAMETER Experiment Name: At_Germinating_Seeds_cDNA_P Parameter: Age (day) Value: 2 vs. 0
  misc_feature: MA Experiment 108462 PARAMETER Experiment Name: At_Germinating_Seeds_cDNA_P Parameter: Tissue Value: Germinating Seeds
  misc_feature: MA Experiment ID: 108464 Result: Up-regulated in Transcription
  misc_feature: MA Experiment 108464 PARAMETER Experiment Name: At_Germinating_Seeds_cDNA_P Parameter: Age (day) Value: 4 vs. 0
  misc_feature: MA Experiment 108464 PARAMETER Experiment Name: At_Germinating_Seeds_cDNA_P Parameter: Tissue Value: Germinating Seeds
  misc_feature: MA Experiment ID: 108473 Result: Down-regulated in Transcription
  misc_feature: MA Experiment 108473 PARAMETER Experiment Name: At_Drought_Flowers_cDNA_P Parameter: Timepoint (hr) Value: 7 d
  misc_feature: MA Experiment 108473 PARAMETER Experiment Name: At_Drought_Flowers_cDNA_P Parameter: Tissue Value: Flower
  misc_feature: MA Experiment 108473 PARAMETER Experiment Name: At_Drought_Flowers_cDNA_P Parameter: Treatment Value: Drought vs. No Drought
  misc_feature: MA Experiment ID: 108569 Result: Down-regulated in Transcription
  misc_feature: MA Experiment 108569 PARAMETER Experiment Name: At_0.001%_MeJA__cDNA_P Parameter: Timepoint (hr) Value: 6
  misc_feature: MA Experiment 108569 PARAMETER Experiment Name: At_0.001%_MeJA__cDNA_P Parameter: Tissue Value: Aerial
  misc_feature: MA Experiment 108569 PARAMETER Experiment Name: At_0.001%_MeJA__cDNA_P Parameter: Treatment Value: 0.001% MeJA vs. No Treatment
  misc_feature: MA Experiment ID: 108572 Result: Down-regulated in Transcription
  misc_feature: MA Experiment 108572 PARAMETER Experiment Name: At_Drought_cDNA_P Parameter: Timepoint (hr) Value: 1
  misc_feature: MA Experiment 108572 PARAMETER Experiment Name: At_Drought_cDNA_P Parameter: Tissue Value: Aerial
  misc_feature: MA Experiment 108572 PARAMETER Experiment Name: At_Drought_cDNA_P Parameter: Treatment Value: Drought vs. No Drought
  misc_feature: MA Experiment ID: 108573 Result: Down-regulated in Transcription
  misc_feature: MA Experiment 108573 PARAMETER Experiment Name: At_Drought_cDNA_P Parameter: Timepoint (hr) Value: 6
  misc_feature: MA Experiment 108573 PARAMETER Experiment Name: At_Drought_cDNA_P Parameter: Tissue Value: Aerial
  misc_feature: MA Experiment 108573 PARAMETER Experiment Name: At_Drought_cDNA_P Parameter: Treatment Value: Drought vs. No Drought
  misc_feature: MA Experiment ID: 108576 Result: Down-regulated in Transcription
  misc_feature: MA Experiment 108576 PARAMETER Experiment Name: At_42deg_Heat_cDNA_P Parameter: Temperature (deg C) Value: 42 vs. 22
  misc_feature: MA Experiment 108576 PARAMETER Experiment Name: At_42deg_Heat_cDNA_P Parameter: Timepoint (hr) Value: 1
  misc_feature: MA Experiment 108576 PARAMETER Experiment Name: At_42deg_Heat_cDNA_P Parameter: Tissue Value: Aerial
  misc_feature: MA Experiment ID: 108577 Result: Down-regulated in Transcription
  misc_feature: MA Experiment 108577 PARAMETER Experiment Name: At_42deg_Heat_cDNA_P Parameter: Temperature (deg C) Value: 42 vs. 22
  misc_feature: MA Experiment 108577 PARAMETER Experiment Name: At_42deg_Heat_cDNA_P Parameter: Timepoint (hr) Value: 6
  misc_feature: MA Experiment 108577 PARAMETER Experiment Name: At_42deg_Heat_cDNA_P Parameter: Tissue Value: Aerial
  misc_feature: MA Experiment ID: 108579 Result: Up-regulated in Transcription
  misc_feature: MA Experiment 108579 PARAMETER Experiment Name: At_4deg_Cold_cDNA_P Parameter: Temperature (deg C) Value: 4 vs. 22
  misc_feature: MA Experiment 108579 PARAMETER Experiment Name: At_4deg_Cold_cDNA_P Parameter: Timepoint (hr) Value: 6
  misc_feature: MA Experiment 108579 PARAMETER Experiment Name: At_4deg_Cold_cDNA_P Parameter: Tissue Value: Aerial
  misc_feature: MA Experiment ID: 108594 Result: Down-regulated in Transcription
  misc_feature: MA Experiment 108594 PARAMETER Experiment Name: At_Ler-rhl_Root_cDNA_P Parameter: Plant Line Value: null
  misc_feature: MA Experiment ID: 108595 Result: Down-regulated in Transcription
  misc_feature: MA Experiment 108595 PARAMETER Experiment Name: At_Ler-pi_Ovule_cDNA_P Parameter: Plant Line Value: null
  misc_feature: MA Experiment ID: 108607 Result: Down-regulated in Transcription
  misc_feature: MA Experiment 108607 PARAMETER Experiment Name: At_100uM_ABA_cDNA_P Parameter: Timepoint (hr) Value: 4
  misc_feature: MA Experiment 108607 PARAMETER Experiment Name: At_100uM_ABA_cDNA_P Parameter: Tissue Value: Aerial
  misc_feature: MA Experiment 108607 PARAMETER Experiment Name: At_100uM_ABA_cDNA_P Parameter: Treatment Value: 100uM ABA vs. No Treatment
  misc_feature: MA Experiment ID: 108668 Result: Down-regulated in Transcription
  misc_feature: MA Experiment 108668 PARAMETER Experiment Name: At_2mM_SA_cDNA_P Parameter: Plant Line Value: WS
  misc_feature: MA Experiment 108668 PARAMETER Experiment Name: At_2mM_SA_cDNA_P Parameter: Timepoint (hr) Value: 6
  misc_feature: MA Experiment 108668 PARAMETER Experiment Name: At_2mM_SA_cDNA_P Parameter: Treatment Value: 2mM SA vs. No Treatment
  misc_feature: MA Experiment ID: 20000068 Result: Down-regulated in Transcription
  misc_feature: MA Experiment ID: 20000069 Result: Down-regulated in Transcription
  misc_feature: MA Experiment 20000069 PARAMETER Experiment Name: At_100uM_ABA_Mutants_cDNA_P Parameter: Plant Line Value: CS23
  misc_feature: MA Experiment 20000069 PARAMETER Experiment Name: At_100uM_ABA_Mutants_cDNA_P Parameter: Timepoint (hr) Value: 6
  misc_feature: MA Experiment 20000069 PARAMETER Experiment Name: At_100uM_ABA_Mutants_cDNA_P Parameter: Tissue Value: Aerial
  misc_feature: MA Experiment 20000069 PARAMETER Experiment Name: At_100uM_ABA_Mutants_cDNA_P Parameter: Treatment Value: 100uM ABA vs. No Treatment
  misc_feature: MA Experiment ID: 20000070 Result: Down-regulated in Transcription
  misc_feature: MA Experiment 20000070 PARAMETER Experiment Name: At_100uM_ABA_Mutants_cDNA_P Parameter: Plant Line Value: CS24
  misc_feature: MA Experiment 20000070 PARAMETER Experiment Name: At_100uM_ABA_Mutants_cDNA_P Parameter: Timepoint (hr) Value: 6
  misc_feature: MA Experiment 20000070 PARAMETER Experiment Name: At_100uM_ABA_Mutants_cDNA_P Parameter: Tissue Value: Aerial
  misc_feature: MA Experiment 20000070 PARAMETER Experiment Name: At_100uM_ABA_Mutants_cDNA_P Parameter: Treatment Value: 100uM ABA vs. No Treatment
  misc_feature: MA Experiment ID: 20000086 Result: Down-regulated in Transcription
  misc_feature: MA Experiment 20000086 PARAMETER Experiment Name: At_100uM_ABA_Mutants_cDNA_P Parameter: Plant Line Value: CS22
  misc_feature: MA Experiment 20000086 PARAMETER Experiment Name: At_100uM_ABA_Mutants_cDNA_P Parameter: Timepoint (hr) Value: 6
  misc_feature: MA Experiment 20000086 PARAMETER Experiment Name: At_100uM_ABA_Mutants_cDNA_P Parameter: Tissue Value: Aerial
  misc_feature: MA Experiment 20000086 PARAMETER Experiment Name: At_100uM_ABA_Mutants_cDNA_P Parameter: Treatment Value: 100uM ABA vs. No Treatment
  misc_feature: MA Experiment ID: 20000087 Result: Down-regulated in Transcription
  misc_feature: MA Experiment 20000087 PARAMETER Experiment Name: At_100uM_ABA_Mutants_cDNA_P Parameter: Plant Line Value: WS
  misc_feature: MA Experiment 20000087 PARAMETER Experiment Name: At_100uM_ABA_Mutants_cDNA_P Parameter: Timepoint (hr) Value: 6
  misc_feature: MA Experiment 20000087 PARAMETER Experiment Name: At_100uM_ABA_Mutants_cDNA_P Parameter: Tissue Value: Aerial
  misc_feature: MA Experiment 20000087 PARAMETER Experiment Name: At_100uM_ABA_Mutants_cDNA_P Parameter: Treatment Value: 100uM ABA vs. No Treatment
  misc_feature: MA Experiment ID: 20000088 Result: Down-regulated in Transcription
  misc_feature: MA Experiment 20000088 PARAMETER Experiment Name: At_100uM_ABA_Mutants_cDNA_P Parameter: Plant Line Value: Landsberg
  misc_feature: MA Experiment 20000088 PARAMETER Experiment Name: At_100uM_ABA_Mutants_cDNA_P Parameter: Timepoint (hr) Value: 6
  misc_feature: MA Experiment 20000088 PARAMETER Experiment Name: At_100uM_ABA_Mutants_cDNA_P Parameter: Tissue Value: Aerial
  misc_feature: MA Experiment 20000088 PARAMETER Experiment Name: At_100uM_ABA_Mutants_cDNA_P Parameter: Treatment Value: 100uM ABA vs. No Treatment
  misc_feature: MA Experiment ID: 20000113 Result: Down-regulated in Transcription
  misc_feature: MA Experiment 20000113 PARAMETER Experiment Name: At_42deg_Heat_cDNA_P Parameter: Temperature (deg C) Value: 42 vs. 22
  misc_feature: MA Experiment 20000113 PARAMETER Experiment Name: At_42deg_Heat_cDNA_P Parameter: Timepoint (hr) Value: 8
  misc_feature: MA Experiment 20000113 PARAMETER Experiment Name: At_42deg_Heat_cDNA_P Parameter: Tissue Value: Aerial
  misc_feature: MA Experiment ID: 20000117 Result: Down-regulated in Transcription
  misc_feature: MA Experiment 20000117 PARAMETER Experiment Name: At_100uM_ABA_Mutants_cDNA_P Parameter: Plant Line Value: Columbia
  misc_feature: MA Experiment 20000117 PARAMETER Experiment Name: At_100uM_ABA_Mutants_cDNA_P Parameter: Timepoint (hr) Value: 6
  misc_feature: MA Experiment 20000117 PARAMETER Experiment Name: At_100uM_ABA_Mutants_cDNA_P Parameter: Tissue Value: Aerial
  misc_feature: MA Experiment 20000117 PARAMETER Experiment Name: At_100uM_ABA_Mutants_cDNA_P Parameter: Treatment Value: 100uM ABA vs. No Treatment
  misc_feature: MA Experiment ID: 20000171 Result: Up-regulated in Transcription
  misc_feature: MA Experiment 20000171 PARAMETER Experiment Name: At_42deg_Heat_P Parameter: Age (day) Value: 14
  misc_feature: MA Experiment 20000171 PARAMETER Experiment Name: At_42deg_Heat_P Parameter: Organism Value: A. thaliana
  misc_feature: MA Experiment 20000171 PARAMETER Experiment Name: At_42deg_Heat_P Parameter: Plant Line Value: WS
  misc_feature: MA Experiment 20000171 PARAMETER Experiment Name: At_42deg_Heat_P Parameter: Temperature (deg C) Value: 42 vs. 22
  misc_feature: MA Experiment 20000171 PARAMETER Experiment Name: At_42deg_Heat_P Parameter: Timepoint (hr) Value: 1
  misc_feature: MA Experiment 20000171 PARAMETER Experiment Name: At_42deg_Heat_P Parameter: Tissue Value: Aerial
  misc_feature: MA Experiment ID: 20000184 Result: Up-regulated in Transcription
  misc_feature: MA Experiment 20000184 PARAMETER Experiment Name: At_Shoots__P Parameter: Age (day) Value: 7
  misc_feature: MA Experiment 20000184 PARAMETER Experiment Name: At_Shoots__P Parameter: Tissue Value: Shoots vs. Whole Plant
  misc_feature: MA Experiment ID: 20000185 Result: Up-regulated in Transcription
  misc_feature: MA Experiment 20000185 PARAMETER Experiment Name: At_Roots__P Parameter: Age (day) Value: 7 vs. 21
  misc_feature: MA Experiment 20000185 PARAMETER Experiment Name: At_Roots__P Parameter: Organism Value: A. thaliana
  misc_feature: MA Experiment 20000185 PARAMETER Experiment Name: At_Roots__P Parameter: Tissue Value: Roots vs. Whole Plant
  misc_feature: MA Experiment ID: 20000234 Result: Down-regulated in Transcription
  misc_feature: MA Experiment 20000234 PARAMETER Experiment Name: At_Siliques_P Parameter: Age (day) Value: 21
  misc_feature: MA Experiment 20000234 PARAMETER Experiment Name: At_Siliques_P Parameter: Organism Value: A. thaliana
  misc_feature: MA Experiment 20000234 PARAMETER Experiment Name: At_Siliques_P Parameter: Plant Line Value: WS
  misc_feature: MA Experiment 20000234 PARAMETER Experiment Name: At_Siliques_P Parameter: Tissue Value: Less Than 5mm Siliques vs. Whole Plant
  misc_feature: MA Experiment ID: 20000235 Result: Down-regulated in Transcription
  misc_feature: MA Experiment 20000235 PARAMETER Experiment Name: At_Siliques_P Parameter: Age (day) Value: 21
  misc_feature: MA Experiment 20000235 PARAMETER Experiment Name: At_Siliques_P Parameter: Organism Value: A. thaliana
  misc_feature: MA Experiment 20000235 PARAMETER Experiment Name: At_Siliques_P Parameter: Plant Line Value: WS
  misc_feature: MA Experiment 20000235 PARAMETER Experiment Name: At_Siliques_P Parameter: Tissue Value: 5-10mm Siliques vs. Whole Plant
  misc_feature: MA Experiment ID: 20000269 Result: Down-regulated in Transcription
  misc_feature: MA Experiment 20000269 PARAMETER Experiment Name: At_1mM_KNO3_L-vs-H_Roots_P Parameter: Age (day) Value: 7,10,12
  misc_feature: MA Experiment 20000269 PARAMETER Experiment Name: At_1mM_KNO3_L-vs-H_Roots_P Parameter: Organism Value: A. thaliana
  misc_feature: MA Experiment 20000269 PARAMETER Experiment Name: At_1mM_KNO3_L-vs-H_Roots_P Parameter: Plant Line Value: WS
  misc_feature: MA Experiment 20000269 PARAMETER Experiment Name: At_1mM_KNO3_L-vs-H_Roots_P Parameter: Timepoint (day) Value: 7,10,12
  misc_feature: MA Experiment 20000269 PARAMETER Experiment Name: At_1mM_KNO3_L-vs-H_Roots_P Parameter: Tissue Value: Roots
  misc_feature: MA Experiment 20000269 PARAMETER Experiment Name: At_1mM_KNO3_L-vs-H_Roots_P Parameter: Treatment Value: 1mM KNO3 vs. 50mM KNO3
  misc_feature: MA Experiment ID: 20000438 Result: Up-regulated in Transcription
  misc_feature: MA Experiment 20000438 PARAMETER Experiment Name: At_Shoots__P Parameter: Age (day) Value: 14
  misc_feature: MA Experiment 20000438 PARAMETER Experiment Name: At_Shoots__P Parameter: Tissue Value: Shoots vs. Whole Plant
  misc_feature: MA Experiment ID: 20000439 Result: Up-regulated in Transcription
  misc_feature: MA Experiment 20000439 PARAMETER Experiment Name: At_Roots__P Parameter: Age (day) Value: 14 vs. 21
  misc_feature: MA Experiment 20000439 PARAMETER Experiment Name: At_Roots__P Parameter: Organism Value: A. thaliana
  misc_feature: MA Experiment 20000439 PARAMETER Experiment Name: At_Roots__P Parameter: Tissue Value: Roots vs. Whole Plant
  misc_feature: MA Experiment ID: 20000451 Result: Down-regulated in Transcription
  misc_feature: MA Experiment 20000451 PARAMETER Experiment Name: At_CS6879_Shoots-Roots_P Parameter: Age (day) Value: 14
  misc_feature: MA Experiment 20000451 PARAMETER Experiment Name: At_CS6879_Shoots-Roots_P Parameter: Organism Value: A. thaliana
  misc_feature: MA Experiment 20000451 PARAMETER Experiment Name: At_CS6879_Shoots-Roots_P Parameter: Plant Line Value: CS6879 vs. WS
  misc_feature: MA Experiment 20000451 PARAMETER Experiment Name: At_CS6879_Shoots-Roots_P Parameter: Tissue Value: Roots
  misc_feature: MA Experiment ID: 20000452 Result: Down-regulated in Transcription
  misc_feature: MA Experiment 20000452 PARAMETER Experiment Name: At_CS6879_Shoots-Roots_P Parameter: Age (day) Value: 14
  misc_feature: MA Experiment 20000452 PARAMETER Experiment Name: At_CS6879_Shoots-Roots_P Parameter: Organism Value: A. thaliana
  misc_feature: MA Experiment 20000452 PARAMETER Experiment Name: At_CS6879_Shoots-Roots_P Parameter: Plant Line Value: CS6879 vs. WS
  misc_feature: MA Experiment 20000452 PARAMETER Experiment Name: At_CS6879_Shoots-Roots_P Parameter: Tissue Value: Shoots
  misc_feature: MA Experiment ID: 20000453 Result: Up-regulated in Transcription
  misc_feature: MA Experiment 20000453 PARAMETER Experiment Name: At_100uM_ABA_P Parameter: Age (day) Value: 15
  misc_feature: MA Experiment 20000453 PARAMETER Experiment Name: At_100uM_ABA_P Parameter: Organism Value: A. thaliana
  misc_feature: MA Experiment 20000453 PARAMETER Experiment Name: At_100uM_ABA_P Parameter: Plant Line Value: WS
  misc_feature: MA Experiment 20000453 PARAMETER Experiment Name: At_100uM_ABA_P Parameter: Timepoint (hr) Value: 24
  misc_feature: MA Experiment 20000453 PARAMETER Experiment Name: At_100uM_ABA_P Parameter: Tissue Value: Aerial
  misc_feature: MA Experiment 20000453 PARAMETER Experiment Name: At_100uM_ABA_P Parameter: Treatment Value: 100uM ABA vs. No Treatment
  misc_feature: MA Experiment ID: 20000455 Result: Up-regulated in Transcription
  misc_feature: MA Experiment 20000455 PARAMETER Experiment Name: At_100uM_ABA_P Parameter: Age (day) Value: 16
  misc_feature: MA Experiment 20000455 PARAMETER Experiment Name: At_100uM_ABA_P Parameter: Organism Value: A. thaliana
  misc_feature: MA Experiment 20000455 PARAMETER Experiment Name: At_100uM_ABA_P Parameter: Plant Line Value: WS
  misc_feature: MA Experiment 20000455 PARAMETER Experiment Name: At_100uM_ABA_P Parameter: Timepoint (hr) Value: 48
  misc_feature: MA Experiment 20000455 PARAMETER Experiment Name: At_100uM_ABA_P Parameter: Tissue Value: Aerial
  misc_feature: MA Experiment 20000455 PARAMETER Experiment Name: At_100uM_ABA_P Parameter: Treatment Value: 100uM ABA vs. No Treatment
  misc_feature: MA Experiment ID: 20000495 Result: Up-regulated in Transcription
  misc_feature: MA Experiment 20000495 PARAMETER Experiment Name: At_Guard_Cells_P Parameter: Harvest Date Value: 8/2/2002
  misc_feature: MA Experiment 20000495 PARAMETER Experiment Name: At_Guard_Cells_P Parameter: Organism Value: A. thaliana
  misc_feature: MA Experiment 20000495 PARAMETER Experiment Name: At_Guard_Cells_P Parameter: Tissue Value: Guard Cells vs. Leaves
  misc_feature: MA Experiment ID: 20000709 Result: Up-regulated in Transcription
  misc_feature: MA Experiment 20000709 PARAMETER Experiment Name: At_15mM_NH4NO3_L-to-H_P Parameter: Age (hr) Value: 14
  misc_feature: MA Experiment 20000709 PARAMETER Experiment Name: At_15mM_NH4NO3_L-to-H_P Parameter: Organism Value: A. thaliana
  misc_feature: MA Experiment 20000709 PARAMETER Experiment Name: At_15mM_NH4NO3_L-to-H_P Parameter: Plant Line Value: WS
  misc_feature: MA Experiment 20000709 PARAMETER Experiment Name: At_15mM_NH4NO3_L-to-H_P Parameter: Timepoint (hr) Value: 4
  misc_feature: MA Experiment 20000709 PARAMETER Experiment Name: At_15mM_NH4NO3_L-to-H_P Parameter: Tissue Value: Aerial
  misc_feature: MA Experiment 20000709 PARAMETER Experiment Name: At_15mM_NH4NO3_L-to-H_P Parameter: Treatment Value: 15mM NH4NO3 vs. 30mM Mannitol
  misc_feature: MA Experiment ID: 20001554 Result: Up-regulated in Transcription
  misc_feature: MA Experiment 20001554 PARAMETER Experiment Name: At_Drought_Soil_Dry_P Parameter: Age (day) Value: 21
  misc_feature: MA Experiment 20001554 PARAMETER Experiment Name: At_Drought_Soil_Dry_P Parameter: Organism Value: A. thaliana
  misc_feature: MA Experiment 20001554 PARAMETER Experiment Name: At_Drought_Soil_Dry_P Parameter: Plant Line Value: WS
  misc_feature: MA Experiment 20001554 PARAMETER Experiment Name: At_Drought_Soil_Dry_P Parameter: Post Timepoint (hr) Value: None
  misc_feature: MA Experiment 20001554 PARAMETER Experiment Name: At_Drought_Soil_Dry_P Parameter: Post-Treatment Value: None
  misc_feature: MA Experiment 20001554 PARAMETER Experiment Name: At_Drought_Soil_Dry_P Parameter: Timepoint (day) Value: 7
  misc_feature: MA Experiment 20001554 PARAMETER Experiment Name: At_Drought_Soil_Dry_P Parameter: Treatment Value: Drought vs. No Drought
  misc_feature: MA Experiment ID: 20001555 Result: Up-regulated in Transcription
  misc_feature: MA Experiment 20001555 PARAMETER Experiment Name: At_Drought_Soil_Dry_P Parameter: Age (day) Value: 24
  misc_feature: MA Experiment 20001555 PARAMETER Experiment Name: At_Drought_Soil_Dry_P Parameter: Organism Value: A. thaliana
  misc_feature: MA Experiment 20001555 PARAMETER Experiment Name: At_Drought_Soil_Dry_P Parameter: Plant Line Value: WS
  misc_feature: MA Experiment 20001555 PARAMETER Experiment Name: At_Drought_Soil_Dry_P Parameter: Post Timepoint (hr) Value: None
  misc_feature: MA Experiment 20001555 PARAMETER Experiment Name: At_Drought_Soil_Dry_P Parameter: Post-Treatment Value: None
  misc_feature: MA Experiment 20001555 PARAMETER Experiment Name: At_Drought_Soil_Dry_P Parameter: Timepoint (day) Value: 10
  misc_feature: MA Experiment 20001555 PARAMETER Experiment Name: At_Drought_Soil_Dry_P Parameter: Treatment Value: Drought vs. No Drought
  misc_feature: MA Experiment ID: 20001558 Result: Down-regulated in Transcription
  misc_feature: MA Experiment 20001558 PARAMETER Experiment Name: At_Drought_Soil_Dry_P Parameter: Age (day) Value: 27
  misc_feature: MA Experiment 20001558 PARAMETER Experiment Name: At_Drought_Soil_Dry_P Parameter: Organism Value: A. thaliana
  misc_feature: MA Experiment 20001558 PARAMETER Experiment Name: At_Drought_Soil_Dry_P Parameter: Plant Line Value: WS
  misc_feature: MA Experiment 20001558 PARAMETER Experiment Name: At_Drought_Soil_Dry_P Parameter: Post Timepoint (hr) Value: 6
  misc_feature: MA Experiment 20001558 PARAMETER Experiment Name: At_Drought_Soil_Dry_P Parameter: Post-Treatment Value: Re-Water vs. No Drought
  misc_feature: MA Experiment 20001558 PARAMETER Experiment Name: At_Drought_Soil_Dry_P Parameter: Timepoint (day) Value: 13
  misc_feature: MA Experiment 20001558 PARAMETER Experiment Name: At_Drought_Soil_Dry_P Parameter: Treatment Value: Drought vs. No Drought
acaccatccactctactcaacatggactcctccaaactctcatctctctctctttgcctcttcctcatttgcattatctatctcccccaacattctctcgcatgcggctcttgcaacccacggaagggcggaaagcactcccctaaagcccctaagctaccagttcctccggtgaccgtccctaagctaccagttcctccggtgaccgtccctaagctaccagtccctccggtgaccgtccctaagctacccgttcctcctgtgaccatccctaagctacccgttccaccagtgactgtacctaagctacccgttcctcctgtgaccgtccccaagctacccgttcctccagtgaccgtccccaaggaggaacgggtagcttaggtacagtcactggtggaacgggtagcttaggggtggtcacggagngggaggaggccacggacatggaggacacaacggaggagggggccacggacttgacggatacggaggaggtggaggacactatggaggaggtggaggacactacggaggaggtggaggacactacgaaggaggtgaggacactacggaggaggtggtggaggacacggaggtggaggacactacggaggtggtggaggaggatacggaggtggaggaggacaccacggaggaggaggccacgggctaaacgaacctgttcagactaagccgggtgtttaaaactatataatatcttcactaccatgcatgattgcatatatatatatacgcttatgtattatctatatgcctataaataaaccatggtgagtttgtaacgcagtgccttcagaaatgttcggaataaatttccataatattagt

SEQ ID NO: 35273 - protein, 127 aa, Arabidopsis thaliana
  peptide (1)..(127): Ceres Seq. ID no. 12579973
  misc_feature (48)..(118): Pfam Name: Extensin-like region Pfam Description: Extensin-like region
  misc_feature (51)..(121): Homolog of NCBI NO: 24417264 NR Description: unknown [Arabidopsis thaliana]
  misc_feature (51)..(121): Homolog of NCBI NO: 18396941 NR Description: expressed protein
  misc_feature (51)..(120): Homolog of NCBI NO: 24417264 NR Description: unknown [Arabidopsis thaliana]
  misc_feature (51)..(120): Homolog of NCBI NO: 18396941 NR Description: expressed protein
  misc_feature (51)..(119): Homolog of NCBI NO: 24417264 NR Description: unknown [Arabidopsis thaliana]
  misc_feature (51)..(119): Homolog of NCBI NO: 18396941 NR Description: expressed protein
  misc_feature (51)..(122): Homolog of NCBI NO: 18396941 NR Description: expressed protein
  misc_feature (51)..(122): Homolog of NCBI NO: 18396941 NR Description: expressed protein
  misc_feature (8)..(122): Homolog of NCBI NO: 24417264 NR Description: unknown [Arabidopsis thaliana]
  misc_feature (8)..(122): Homolog of NCBI NO: 18396941 NR Description: expressed protein
TPSTLLNMDSSKLSSLSLCLFLICIIYLPQHSLACGSCNPRKGGKHSPKAPKLPVPPVTVPKLPVPPVTVPKLPVPPVTVPKLPVPPVTIPKLPVPPVTVPKLPVPPVTVPKLPVPPVTVPKEERVA

SEQ ID NO: 35274 - protein, 120 aa, Arabidopsis thaliana
  peptide (1)..(120): Ceres Seq. ID no. 12579974
  misc_feature (41)..(111): Pfam Name: Extensin-like region Pfam Description: Extensin-like region
  misc_feature (44)..(114): Homolog of NCBI NO: 24417264 NR Description: unknown [Arabidopsis thaliana]
  misc_feature (44)..(114): Homolog of NCBI NO: 18396941 NR Description: expressed protein
  misc_feature (44)..(113): Homolog of NCBI NO: 24417264 NR Description: unknown [Arabidopsis thaliana]
  misc_feature (44)..(113): Homolog of NCBI NO: 18396941 NR Description: expressed protein
  misc_feature (44)..(112): Homolog of NCBI NO: 24417264 NR Description: unknown [Arabidopsis thaliana]
  misc_feature (44)..(112): Homolog of NCBI NO: 18396941 NR Description: expressed protein
  misc_feature (44)..(115): Homolog of NCBI NO: 18396941 NR Description: expressed protein
  misc_feature (44)..(115): Homolog of NCBI NO: 18396941 NR Description: expressed protein
  misc_feature (1)..(115): Homolog of NCBI NO: 24417264 NR Description: unknown [Arabidopsis thaliana]
  misc_feature (1)..(115): Homolog of NCBI NO: 18396941 NR Description: expressed protein
MDSSKLSSLSLCLFLICIIYLPQHSLACGSCNPRKGGKHSPKAPKLPVPPVTVPKLPVPPVTVPKLPVPPVTVPKLPVPPVTIPKLPVPPVTVPKLPVPPVTVPKLPVPPVTVPKEERVA

SEQ ID NO: 35275 - protein, 82 aa, Arabidopsis thaliana
  peptide (1)..(82): Ceres Seq. ID no. 12579975
MEDTTEEGATDLTDTEEVEDTMEEVEDTTEEVEDTTKEVRTLRRRWWRTRRWRTLRRWWRRIRRWRRTPRRRRPRAKRTCSD

SEQ ID NO: 35276 - DNA, 1111 bp, Arabidopsis thaliana
  misc_feature (1)..(1111): Ceres Seq. ID no. 12421784
  misc_feature: MA Experiment ID: 108434 Result: Up-regulated in Transcription
  misc_feature: MA Experiment 108434 PARAMETER Experiment Name: At_Root_Tips_cDNA_P Parameter: Tissue Value: Root Tips
  misc_feature: MA Experiment ID: 108461 Result: Down-regulated in Transcription
  misc_feature: MA Experiment 108461 PARAMETER Experiment Name: At_Germinating_Seeds_cDNA_P Parameter: Age (day) Value: 1 vs. 0
  misc_feature: MA Experiment 108461 PARAMETER Experiment Name: At_Germinating_Seeds_cDNA_P Parameter: Tissue Value: Germinating Seeds
  misc_feature: MA Experiment ID: 108462 Result: Down-regulated in Transcription
  misc_feature: MA Experiment 108462 PARAMETER Experiment Name: At_Germinating_Seeds_cDNA_P Parameter: Age (day) Value: 2 vs. 0
  misc_feature: MA Experiment 108462 PARAMETER Experiment Name: At_Germinating_Seeds_cDNA_P Parameter: Tissue Value: Germinating Seeds
  misc_feature: MA Experiment ID: 108463 Result: Down-regulated in Transcription
  misc_feature: MA Experiment 108463 PARAMETER Experiment Name: At_Germinating_Seeds_cDNA_P Parameter: Age (day) Value: 3 vs. 0
  misc_feature: MA Experiment 108463 PARAMETER Experiment Name: At_Germinating_Seeds_cDNA_P Parameter: Tissue Value: Germinating Seeds
  misc_feature: MA Experiment ID: 108464 Result: Down-regulated in Transcription
  misc_feature: MA Experiment 108464 PARAMETER Experiment Name: At_Germinating_Seeds_cDNA_P Parameter: Age (day) Value: 4 vs. 0
  misc_feature: MA Experiment 108464 PARAMETER Experiment Name: At_Germinating_Seeds_cDNA_P Parameter: Tissue Value: Germinating Seeds
  misc_feature: MA Experiment ID: 108489 Result: Up-regulated in Transcription
  misc_feature: MA Experiment ID: 108572 Result: Down-regulated in Transcription
  misc_feature: MA Experiment 108572 PARAMETER Experiment Name: At_Drought_cDNA_P Parameter: Timepoint (hr) Value: 1
  misc_feature: MA Experiment 108572 PARAMETER Experiment Name: At_Drought_cDNA_P Parameter: Tissue Value: Aerial
  misc_feature: MA Experiment 108572 PARAMETER Experiment Name: At_Drought_cDNA_P Parameter: Treatment Value: Drought vs. No Drought
  misc_feature: MA Experiment ID: 108573 Result: Down-regulated in Transcription
  misc_feature: MA Experiment 108573 PARAMETER Experiment Name: At_Drought_cDNA_P Parameter: Timepoint (hr) Value: 6
  misc_feature: MA Experiment 108573 PARAMETER Experiment Name: At_Drought_cDNA_P Parameter: Tissue Value: Aerial
  misc_feature: MA Experiment 108573 PARAMETER Experiment Name: At_Drought_cDNA_P Parameter: Treatment Value: Drought vs. No Drought
  misc_feature: MA Experiment ID: 108579 Result: Up-regulated in Transcription
  misc_feature: MA Experiment 108579 PARAMETER Experiment Name: At_4deg_Cold_cDNA_P Parameter: Temperature (deg C) Value: 4 vs. 22
  misc_feature: MA Experiment 108579 PARAMETER Experiment Name: At_4deg_Cold_cDNA_P Parameter: Timepoint (hr) Value: 6
  misc_feature: MA Experiment 108579 PARAMETER Experiment Name: At_4deg_Cold_cDNA_P Parameter: Tissue Value: Aerial
  misc_feature: MA Experiment ID: 108595 Result: Down-regulated in Transcription
  misc_feature: MA Experiment 108595 PARAMETER Experiment Name: At_Ler-pi_Ovule_cDNA_P Parameter: Plant Line Value: null
  misc_feature: MA Experiment ID: 20000090 Result: Up-regulated in Transcription
  misc_feature: MA Experiment ID: 20000173 Result: Up-regulated in Transcription
  misc_feature: MA Experiment 20000173 PARAMETER Experiment Name: At_42deg_Heat_P Parameter: Age (day) Value: 14
  misc_feature: MA Experiment 20000173 PARAMETER Experiment Name: At_42deg_Heat_P Parameter: Organism Value: A. thaliana
  misc_feature: MA Experiment 20000173 PARAMETER Experiment Name: At_42deg_Heat_P Parameter: Plant Line Value: WS
  misc_feature: MA Experiment 20000173 PARAMETER Experiment Name: At_42deg_Heat_P Parameter: Temperature (deg C) Value: 42 vs. 22
  misc_feature: MA Experiment 20000173 PARAMETER Experiment Name: At_42deg_Heat_P Parameter: Timepoint (hr) Value: 6
  misc_feature: MA Experiment 20000173 PARAMETER Experiment Name: At_42deg_Heat_P Parameter: Tissue Value: Aerial
  misc_feature: MA Experiment ID: 20000179 Result: Down-regulated in Transcription
  misc_feature: MA Experiment 20000179 PARAMETER Experiment Name: At_Germinating_Seeds_P Parameter: Age (hr) Value: 6 vs. 0
  misc_feature: MA Experiment 20000179 PARAMETER Experiment Name: At_Germinating_Seeds_P Parameter: Tissue Value: Germinating Seeds
  misc_feature: MA Experiment ID: 20000180 Result: Down-regulated in Transcription
  misc_feature: MA Experiment 20000180 PARAMETER Experiment Name: At_Germinating_Seeds_P Parameter: Age (hr) Value: 24 vs. 0
  misc_feature: MA Experiment 20000180 PARAMETER Experiment Name: At_Germinating_Seeds_P Parameter: Tissue Value: Germinating Seeds
  misc_feature: MA Experiment ID: 20000227 Result: Up-regulated in Transcription
  misc_feature: MA Experiment 20000227 PARAMETER Experiment Name: At_Root-Tips-vs-Tops_P Parameter: Tissue Value: Root Tips vs. Root Tops
  misc_feature: MA Experiment ID: 20000265 Result: Up-regulated in Transcription
  misc_feature: MA Experiment 20000265 PARAMETER Experiment Name: At_Open_Flower_P Parameter: Age (day) Value: 21
  misc_feature: MA Experiment 20000265 PARAMETER Experiment Name: At_Open_Flower_P Parameter: Plant Line Value: WS
  misc_feature: MA Experiment 20000265 PARAMETER Experiment Name: At_Open_Flower_P Parameter: Tissue Value: Closed Flower vs. Whole Plant
  misc_feature: MA Experiment ID: 20001451 Result: Down-regulated in Transcription
  misc_feature: MA Experiment 20001451 PARAMETER Experiment Name: At_Far-red-induction_P Parameter: Age (day) Value: 7
  misc_feature: MA Experiment 20001451 PARAMETER Experiment Name: At_Far-red-induction_P Parameter: Light Value: Far-red vs. White
  misc_feature: MA Experiment 20001451 PARAMETER Experiment Name: At_Far-red-induction_P Parameter: Organism Value: A. thaliana
  misc_feature: MA Experiment 20001451 PARAMETER Experiment Name: At_Far-red-induction_P Parameter: Plant Line Value: Columbia
  misc_feature: MA Experiment 20001451 PARAMETER Experiment Name: At_Far-red-induction_P Parameter: Timepoint (hr) Value: 24
  misc_feature: MA Experiment 20001451 PARAMETER Experiment Name: At_Far-red-induction_P Parameter: Tissue Value: Whole Plant
  misc_feature: MA Experiment ID: 20001458 Result: Up-regulated in Transcription
  misc_feature: MA Experiment 20001458 PARAMETER Experiment Name: At_50mM_NH4NO3_L-to-H_P Parameter: Age (day) Value: Undefined
  misc_feature: MA Experiment 20001458 PARAMETER Experiment Name: At_50mM_NH4NO3_L-to-H_P Parameter: Organism Value: Undefined
  misc_feature: MA Experiment 20001458 PARAMETER Experiment Name: At_50mM_NH4NO3_L-to-H_P Parameter: Plant Line Value: Undefined
  misc_feature: MA Experiment 20001458 PARAMETER Experiment Name: At_50mM_NH4NO3_L-to-H_P Parameter: Timepoint (hr) Value: 2
  misc_feature: MA Experiment 20001458 PARAMETER Experiment Name: At_50mM_NH4NO3_L-to-H_P Parameter: Tissue Value: Siliques
  misc_feature: MA Experiment 20001458 PARAMETER Experiment Name: At_50mM_NH4NO3_L-to-H_P Parameter: Treatment Value: 50mM NH4NO3 vs. 100mM Manitol
  misc_feature: MA Experiment ID: 20001556 Result: Up-regulated in Transcription
  misc_feature: MA Experiment 20001556 PARAMETER Experiment Name: At_Drought_Soil_Dry_P Parameter: Age (day) Value: 26
  misc_feature: MA Experiment 20001556 PARAMETER Experiment Name: At_Drought_Soil_Dry_P Parameter: Organism Value: A. thaliana
  misc_feature: MA Experiment 20001556 PARAMETER Experiment Name: At_Drought_Soil_Dry_P Parameter: Plant Line Value: WS
  misc_feature: MA Experiment 20001556 PARAMETER Experiment Name: At_Drought_Soil_Dry_P Parameter: Post Timepoint (hr) Value: None
  misc_feature: MA Experiment 20001556 PARAMETER Experiment Name: At_Drought_Soil_Dry_P Parameter: Post-Treatment Value: None
  misc_feature: MA Experiment 20001556 PARAMETER Experiment Name: At_Drought_Soil_Dry_P Parameter: Timepoint (day) Value: 12
  misc_feature: MA Experiment 20001556 PARAMETER Experiment Name: At_Drought_Soil_Dry_P Parameter: Treatment Value: Drought vs. No Drought
  misc_feature: MA Experiment ID: 20001557 Result: Up-regulated in Transcription
  misc_feature: MA Experiment 20001557 PARAMETER Experiment Name: At_Drought_Soil_Dry_P Parameter: Age (day) Value: 27
  misc_feature: MA Experiment 20001557 PARAMETER Experiment Name: At_Drought_Soil_Dry_P Parameter: Organism Value: A. thaliana
  misc_feature: MA Experiment 20001557 PARAMETER Experiment Name: At_Drought_Soil_Dry_P Parameter: Plant Line Value: WS
  misc_feature: MA Experiment 20001557 PARAMETER Experiment Name: At_Drought_Soil_Dry_P Parameter: Post Timepoint (hr) Value: 3
  misc_feature: MA Experiment 20001557 PARAMETER Experiment Name: At_Drought_Soil_Dry_P Parameter: Post-Treatment Value: Re-Water vs. No Drought
  misc_feature: MA Experiment 20001557 PARAMETER Experiment Name: At_Drought_Soil_Dry_P Parameter: Timepoint (day) Value: 13
  misc_feature: MA Experiment 20001557 PARAMETER Experiment Name: At_Drought_Soil_Dry_P Parameter: Treatment Value: Drought vs. No Drought
  misc_feature: MA Experiment ID: 20001558 Result: Up-regulated in Transcription
  misc_feature: MA Experiment 20001558 PARAMETER Experiment Name: At_Drought_Soil_Dry_P Parameter: Age (day) Value: 27
  misc_feature: MA Experiment 20001558 PARAMETER Experiment Name: At_Drought_Soil_Dry_P Parameter: Organism Value: A. thaliana
  misc_feature: MA Experiment 20001558 PARAMETER Experiment Name: At_Drought_Soil_Dry_P Parameter: Plant Line Value: WS
  misc_feature: MA Experiment 20001558 PARAMETER Experiment Name: At_Drought_Soil_Dry_P Parameter: Post Timepoint (hr) Value: 6
  misc_feature: MA Experiment 20001558 PARAMETER Experiment Name: At_Drought_Soil_Dry_P Parameter: Post-Treatment Value: Re-Water vs. No Drought
  misc_feature: MA Experiment 20001558 PARAMETER Experiment Name: At_Drought_Soil_Dry_P Parameter: Timepoint (day) Value: 13
  misc_feature: MA Experiment 20001558 PARAMETER Experiment Name: At_Drought_Soil_Dry_P Parameter: Treatment Value: Drought vs. No Drought
  misc_feature: MA Experiment ID: 20001559 Result: Up-regulated in Transcription
  misc_feature: MA Experiment 20001559 PARAMETER Experiment Name: At_Drought_Soil_Dry_P Parameter: Age (day) Value: 28
  misc_feature: MA Experiment 20001559 PARAMETER Experiment Name: At_Drought_Soil_Dry_P Parameter: Organism Value: A. thaliana
  misc_feature: MA Experiment 20001559 PARAMETER Experiment Name: At_Drought_Soil_Dry_P Parameter: Plant Line Value: WS
  misc_feature: MA Experiment 20001559 PARAMETER Experiment Name: At_Drought_Soil_Dry_P Parameter: Post Timepoint (hr) Value: 29
  misc_feature: MA Experiment 20001559 PARAMETER Experiment Name: At_Drought_Soil_Dry_P Parameter: Post-Treatment Value: Re-Water vs. No Drought
  misc_feature: MA Experiment 20001559 PARAMETER Experiment Name: At_Drought_Soil_Dry_P Parameter: Timepoint (day) Value: 14
  misc_feature: MA Experiment 20001559 PARAMETER Experiment Name: At_Drought_Soil_Dry_P Parameter: Treatment Value: Drought vs. No Drought
  misc_feature: MA Experiment ID: 20001560 Result: Up-regulated in Transcription
  misc_feature: MA Experiment 20001560 PARAMETER Experiment Name: At_Drought_Soil_Dry_P Parameter: Age (day) Value: 28
  misc_feature: MA Experiment 20001560 PARAMETER Experiment Name: At_Drought_Soil_Dry_P Parameter: Organism Value: A. thaliana
  misc_feature: MA Experiment 20001560 PARAMETER Experiment Name: At_Drought_Soil_Dry_P Parameter: Plant Line Value: WS
  misc_feature: MA Experiment 20001560 PARAMETER Experiment Name: At_Drought_Soil_Dry_P Parameter: Post Timepoint (hr) Value: None
  misc_feature: MA Experiment 20001560 PARAMETER Experiment Name: At_Drought_Soil_Dry_P Parameter: Post-Treatment Value: None
  misc_feature: MA Experiment 20001560 PARAMETER Experiment Name: At_Drought_Soil_Dry_P Parameter: Timepoint (day) Value: 14
  misc_feature: MA Experiment 20001560 PARAMETER Experiment Name: At_Drought_Soil_Dry_P Parameter: Treatment Value: Drought vs. No Drought
  misc_feature: MA Experiment ID: 20001757 Result: Up-regulated in Transcription
  misc_feature: MA Experiment 20001757 PARAMETER Experiment Name: At_50mM_NH4NO3_L-to-H_P Parameter: Timepoint (hr) Value: 6
  misc_feature: MA Experiment 20001757 PARAMETER Experiment Name: At_50mM_NH4NO3_L-to-H_P Parameter: Tissue Value: Leaf
  misc_feature: MA Experiment 20001757 PARAMETER Experiment Name: At_50mM_NH4NO3_L-to-H_P Parameter: Treatment Value: 50mM NH4NO3 vs 100mM Mannitol
tcagtaaaaccctcatttctgtttctcttttcacttttaaggaaaaccctagaatcctcagaaatggcgttgagcaccgtgtttcgtcgagcttcgtcaacagtatccaatcttgctttccgtgcgggtagatctccggttagcttccgcagtggcgctgtctccgtcgagaggctgattcgtggtagccaccagatcaggcgtggatcggttagttcattctcagtctcgagcttttcgacggaaagtgcgatctctaaaacaaccgccgacgagaatcttgttagcgttatcgaatctgaaatcgaatgcgccgtcgcagaggaggctcctcatgacactgacttcttggaagataagccagaagggtttccatttgaaatcattgataattcaggggagagaactgtgttgctgacaaggaaatttgaggatgaaaccatccaagtggaagttgactctgttgcttcttatgatgatgaagatgaagaagaggaagcagaaccaaacaatgaagaagacgatgaagatcaagagagctcgggtaaagtccgggttccgatggttgttagtgtgcagaaaggtgatggtgtgtgtcttgagtttggagtcagcgcatacccggatgagattgtgtttgatagtttatcgatcaaacaaccgcaaggatctgataatgaccttgcttacgaaggacctgactttgatgacttggatgagaatttgcagaaggctttccacaggtacttggagatcagaggtattaaaccaagcttcactacctttctggcagattatgtggccaacaaagatagcagagagtatcttcaatggctcaaggatctcaagtcttttgtcgagaagtgaaactgaactttgttcagagaataagagcgagatttctttttgctttaaacttttgagtttatcttagatgaacttgatatcaccatgagcaatcgttgaaagtgaggtcatgtgttatgcttgttaacaatattgctacatgtttttaatgggtttttaggtactttgctagatataagatgcaactctttcgagtttcagttggaaaaaatgatacgacctcaataaagtataattcttttgc

SEQ ID NO: 35277 - protein, 288 aa, Arabidopsis thaliana
  peptide (1)..(288): Ceres Seq. ID no. 12421785
  misc_feature (98)..(286): Pfam Name: Mitochondrial glycoprotein Pfam Description: Mitochondrial glycoprotein
  misc_feature (79)..(286): Homolog of NCBI NO: 34895740 NR Description: P0019D06.28 [Oryza sativa (japonica
  misc_feature (70)..(288): Homolog of NCBI NO: 21593469 NR Description: unknown [Arabidopsis thaliana]
  misc_feature (70)..(288): Homolog of NCBI NO: 18405164 NR Description: Expressed protein
  misc_feature (40)..(288): Homolog of NCBI NO: 7487698 NR Description: hypothetical protein At2g39790 [imported] -
  misc_feature (81)..(287): Homolog of NCBI NO: 15239320 NR Description: putative protein
  misc_feature (36)..(288): Homolog of NCBI NO: 11357566 NR Description: hypothetical protein F1I16.10 - Arabidopsis
  misc_feature (22)..(288): Homolog of NCBI NO: 18410318 NR Description: Expressed protein
  misc_feature (22)..(286): Homolog of NCBI NO: 34895730 NR Description: P0019D06.23 [Oryza sativa (japonica
  misc_feature (22)..(288): Homolog of NCBI NO: 15241669 NR Description: putative protein
  misc_feature (22)..(288): Homolog of NCBI NO: 21592321 NR Description: unknown [Arabidopsis thaliana]
SVKPSFLFLFSLLRKTLESSEMALSTVFRRASSTVSNLAFRAGRSPVSFRSGAVSVERLIRGSHQIRRGSVSSFSVSSFSTESAISKTTADENLVSVIESEIECAVAEEAPHDTDFLEDKPEGFPFEIIDNSGERTVLLTRKFEDETIQVEVDSVASYDDEDEEEEAEPNNEEDDEDQESSGKVRVPMVVSVQKGDGVCLEFGVSAYPDEIVFDSLSIKQPQGSDNDLAYEGPDFDDLDENLQKAFHRYLEIRGIKPSFTTFLADYVANKDSREYLQWLKDLKSFVEK

SEQ ID NO: 35278 - protein, 267 aa, Arabidopsis thaliana
  peptide (1)..(267): Ceres Seq. ID no. 12421786
  misc_feature (77)..(265): Pfam Name: Mitochondrial glycoprotein Pfam Description: Mitochondrial glycoprotein
  misc_feature (58)..(265): Homolog of NCBI NO: 34895740 NR Description: P0019D06.28 [Oryza sativa (japonica
  misc_feature (49)..(267): Homolog of NCBI NO: 21593469 NR Description: unknown [Arabidopsis thaliana]
  misc_feature (49)..(267): Homolog of NCBI NO: 18405164 NR Description: Expressed protein
  misc_feature (19)..(267): Homolog of NCBI NO: 7487698 NR Description: hypothetical protein At2g39790 [imported] -
  misc_feature (60)..(266): Homolog of NCBI NO: 15239320 NR Description: putative protein
  misc_feature (15)..(267): Homolog of NCBI NO: 11357566 NR Description: hypothetical protein F1I16.10 - Arabidopsis
  misc_feature (1)..(267): Homolog of NCBI NO: 18410318 NR Description: Expressed protein
  misc_feature (1)..(265): Homolog of NCBI NO: 34895730 NR Description: P0019D06.23 [Oryza sativa (japonica
  misc_feature (1)..(267): Homolog of NCBI NO: 15241669 NR Description: putative protein
  misc_feature (1)..(267): Homolog of NCBI NO: 21592321 NR Description: unknown [Arabidopsis thaliana]
MALSTVFRRASSTVSNLAFRAGRSPVSFRSGAVSVERLIRGSHQIRRGSVSSFSVSSFSTESAISKTTADENLVSVIESEIECAVAEEAPHDTDFLEDKPEGFPFEIIDNSGERTVLLTRKFEDETIQVEVDSVASYDDEDEEEEAEPNNEEDDEDQESSGKVRVPMVVSVQKGDGVCLEFGVSAYPDEIVFDSLSIKQPQGSDNDLAYEGPDFDDLDENLQKAFHRYLEIRGIKPSFTTFLADYVANKDSREYLQWLKDLKSFVEK

SEQ ID NO: 35279 - protein, 166 aa, Arabidopsis thaliana
  peptide (1)..(166): Ceres Seq. ID no. 12421787
MKPSKWKLTLLLLMMMKMKKRKQNQTMKKTMKIKRARVKSGFRWLLVCRKVMVCVLSLESAHTRMRLCLIVYRSNNRKDLIMTLLTKDLTLMTWMRICRRLSTGTWRSEVLNQASLPFWQIMWPTKIAESIFNGSRISSLLSRSETELCSENKSEISFCFKLLSLS

SEQ ID NO: 35280 - DNA, 878 bp, Arabidopsis thaliana
  misc_feature (1)..(878): Ceres Seq. ID no. 13497175
  misc_feature: MA Experiment ID: 108595 Result: Down-regulated in Transcription
  misc_feature: MA Experiment 108595 PARAMETER Experiment Name: At_Ler-pi_Ovule_cDNA_P Parameter: Plant Line Value: null
  misc_feature: MA Experiment ID: 20000072 Result: Down-regulated in Transcription
  misc_feature: MA Experiment 20000072 PARAMETER Experiment Name: At_100uM_ABA_Mutants_cDNA_P Parameter: Plant Line Value: CS8105
  misc_feature: MA Experiment 20000072 PARAMETER Experiment Name: At_100uM_ABA_Mutants_cDNA_P Parameter: Timepoint (hr) Value: 6
  misc_feature: MA Experiment 20000072 PARAMETER Experiment Name: At_100uM_ABA_Mutants_cDNA_P Parameter: Tissue Value: Aerial
  misc_feature: MA Experiment 20000072 PARAMETER Experiment Name: At_100uM_ABA_Mutants_cDNA_P Parameter: Treatment Value: 100uM ABA vs. No Treatment
  misc_feature: MA Experiment ID: 20000117 Result: Down-regulated in Transcription
  misc_feature: MA Experiment 20000117 PARAMETER Experiment Name: At_100uM_ABA_Mutants_cDNA_P Parameter: Plant Line Value: Columbia
  misc_feature: MA Experiment 20000117 PARAMETER Experiment Name: At_100uM_ABA_Mutants_cDNA_P Parameter: Timepoint (hr) Value: 6
  misc_feature: MA Experiment 20000117 PARAMETER Experiment Name: At_100uM_ABA_Mutants_cDNA_P Parameter: Tissue Value: Aerial
  misc_feature: MA Experiment 20000117 PARAMETER Experiment Name: At_100uM_ABA_Mutants_cDNA_P Parameter: Treatment Value: 100uM ABA vs. No Treatment
  misc_feature: MA Experiment ID: 20000180 Result: Up-regulated in Transcription
  misc_feature: MA Experiment 20000180 PARAMETER Experiment Name: At_Germinating_Seeds_P Parameter: Age (hr) Value: 24 vs. 0
  misc_feature: MA Experiment 20000180 PARAMETER Experiment Name: At_Germinating_Seeds_P Parameter: Tissue Value: Germinating Seeds
  misc_feature: MA Experiment ID: 20000185 Result: Down-regulated in Transcription
  misc_feature: MA Experiment 20000185 PARAMETER Experiment Name: At_Roots__P Parameter: Age (day) Value: 7 vs. 21
  misc_feature: MA Experiment 20000185 PARAMETER Experiment Name: At_Roots__P Parameter: Organism Value: A. thaliana
  misc_feature: MA Experiment 20000185 PARAMETER Experiment Name: At_Roots__P Parameter: Tissue Value: Roots vs. Whole Plant
  misc_feature: MA Experiment ID: 20000794 Result: Down-regulated in Transcription
  misc_feature: MA Experiment 20000794 PARAMETER Experiment Name: At_Petals_P Parameter: Age (day) Value: 23-25 days
  misc_feature: MA Experiment 20000794 PARAMETER Experiment Name: At_Petals_P Parameter: Plant Line Value: WS
  misc_feature: MA Experiment 20000794 PARAMETER Experiment Name: At_Petals_P Parameter: Tissue Value: Petals vs. Whole plant
  misc_feature: MA Experiment ID: 20001247 Result: Up-regulated in Transcription
  misc_feature: MA Experiment 20001247 PARAMETER Experiment Name: At_Far-red-induction_P Parameter: Age (day) Value: 7
  misc_feature: MA Experiment 20001247 PARAMETER Experiment Name: At_Far-red-induction_P Parameter: Light Value: Far-red vs. White
  misc_feature: MA Experiment 20001247 PARAMETER Experiment Name: At_Far-red-induction_P Parameter: Organism Value: A. thaliana
  misc_feature: MA Experiment 20001247 PARAMETER Experiment Name: At_Far-red-induction_P Parameter: Plant Line Value: Columbia
  misc_feature: MA Experiment 20001247 PARAMETER Experiment Name: At_Far-red-induction_P Parameter: Timepoint (hr) Value: 1
  misc_feature: MA Experiment 20001247 PARAMETER Experiment Name: At_Far-red-induction_P Parameter: Tissue Value: Whole Plant
  misc_feature: MA Experiment ID: 20001451 Result: Down-regulated in Transcription
  misc_feature: MA Experiment 20001451 PARAMETER Experiment Name: At_Far-red-induction_P Parameter: Age (day) Value: 7
  misc_feature: MA Experiment 20001451 PARAMETER Experiment Name: At_Far-red-induction_P Parameter: Light Value: Far-red vs. White
  misc_feature: MA Experiment 20001451 PARAMETER Experiment Name: At_Far-red-induction_P Parameter: Organism Value: A. thaliana
  misc_feature: MA Experiment 20001451 PARAMETER Experiment Name: At_Far-red-induction_P Parameter: Plant Line Value: Columbia
  misc_feature: MA Experiment 20001451 PARAMETER Experiment Name: At_Far-red-induction_P Parameter: Timepoint (hr) Value: 24
  misc_feature: MA Experiment 20001451 PARAMETER Experiment Name: At_Far-red-induction_P Parameter: Tissue Value: Whole Plant
  misc_feature: MA Experiment ID: 20001905 Result: Down-regulated in Transcription
  misc_feature: MA Experiment 20001905 PARAMETER Experiment Name: At_Drought_Reproduction_P Parameter: Age (day) Value: 40
  misc_feature: MA Experiment 20001905 PARAMETER Experiment Name: At_Drought_Reproduction_P Parameter: Organism Value: A. thaliana
  misc_feature: MA Experiment 20001905 PARAMETER Experiment Name: At_Drought_Reproduction_P Parameter: Plant Line Value: WS
  misc_feature: MA Experiment 20001905 PARAMETER Experiment Name: At_Drought_Reproduction_P Parameter: Timepoint (day) Value: 10
  misc_feature: MA Experiment 20001905 PARAMETER Experiment Name: At_Drought_Reproduction_P Parameter: Tissue Value: Rosettes
  misc_feature: MA Experiment 20001905 PARAMETER Experiment Name: At_Drought_Reproduction_P Parameter: Treatment Value: Drought vs. No Drought
  misc_feature: MA Experiment ID: 20001911 Result: Down-regulated in Transcription
  misc_feature: MA Experiment 20001911 PARAMETER Experiment Name: At_Drought_Reproduction_P Parameter: Age (day) Value: 40
  misc_feature: MA Experiment 20001911 PARAMETER Experiment Name: At_Drought_Reproduction_P Parameter: Organism Value: A. thaliana
  misc_feature: MA Experiment 20001911 PARAMETER Experiment Name: At_Drought_Reproduction_P Parameter: Plant Line Value: WS
  misc_feature: MA Experiment 20001911 PARAMETER Experiment Name: At_Drought_Reproduction_P Parameter: Timepoint (day) Value: 10
  misc_feature: MA Experiment 20001911 PARAMETER Experiment Name: At_Drought_Reproduction_P Parameter: Tissue Value: Flowers
  misc_feature: MA Experiment 20001911 PARAMETER Experiment Name: At_Drought_Reproduction_P Parameter: Treatment Value: Drought vs. No Drought
gtctctttgacttcatcgtcgattaagggagaaagagagagagagtgagagctgagaaaatcaccagaaagctacttgagagagagagatagagataagtgagctctgagaaaatccagcaatggcttcgaagcttgtagtgataattgtgtttatcctcgatctcatcgccgttgggttagccattgccgccgagcagagaagaagtgtcggcaaggttgaaacagacagagacaagcaatatgattactgtgtgtatggtactgacattgctacaagttatggagctggtgcatttgttcttctctttgtaagccaagtccttattatggctgctagtcgttgcttctgttgtggaaagtctcttaaccctggcggttcaagagcttgtgccattattctcttcctcatttgctgggtgtttttcttgatcgctgagatgtgtttgcttgcggcatcaatcagaaatgcgtaccacacacagtatagaaagatgtggaaagttgaagatccaccaagctgtgaagttataaggaaaggagtttttgcagctggtgctgcattcacactcttcaccgccattgtctctcagttctactacgtttgctactctcgtgctagagatgcgtaccagaatccctcctactaaaaatgtcaacttccacagcaagcaaacgtttaagcatcaagagttggaatttgtctttttgtgtttgtttagtattgtccagtgtttagttatcctatcaggatgtttaggttttatgttgtctcttaagcaaacactgatatgttatattctaagattcgtatattgttatgttctctgttgtaatgtgtgaatgaatactaaagaatagaaaaccatgatttgttgg

SEQ ID NO: 35281 - protein, 175 aa, Arabidopsis thaliana
  peptide (1)..(175): Ceres Seq. ID no. 13497176
  misc_feature (2)..(166): Homolog of NCBI NO: 18391509 NR Description: expressed protein [Arabidopsis thaliana]
  misc_feature (1)..(173): Homolog of NCBI NO: 38344206 NR Description: OSJNBa0064G10.22 [Oryza sativa (japonica
  misc_feature (3)..(170): Homolog of NCBI NO: 22748411 NR Description: hypothetical protein [Oryza sativa (japonica
  misc_feature (1)..(174): Homolog of NCBI NO: 21554630 NR Description: unknown [Arabidopsis thaliana]
  misc_feature (1)..(174): Homolog of NCBI NO: 18407003 NR Description: expressed protein [Arabidopsis thaliana]
  misc_feature (1)..(173): Homolog of NCBI NO: 18416991 NR Description: expressed protein [Arabidopsis thaliana]
  misc_feature (1)..(175): Homolog of NCBI NO: 34394069 NR Description: unknown protein [Oryza sativa (japonica
  misc_feature (1)..(168): Homolog of NCBI NO: 38016521 NR Description: fiber protein Fb34 [Gossypium barbadense]
  misc_feature (1)..(175): Homolog of NCBI NO: 18404242 NR Description: expressed protein [Arabidopsis thaliana]
  misc_feature (1)..(175): Homolog of NCBI NO: 18400781 NR Description: expressed protein [Arabidopsis thaliana]
MASKLVVIIVFILDLIAVGLAIAAEQRRSVGKVETDRDKQYDYCVYGTDIATSYGAGAFVLLFVSQVLIMAASRCFCCGKSLNPGGSRACAIILFLICWVFFLIAEMCLLAASIRNAYHTQYRKMWKVEDPPSCEVIRKGVFAAGAAFTLFTAIVSQFYYVCYSRARDAYQNPSY

SEQ ID NO: 35282 - protein, 106 aa, Arabidopsis thaliana
  peptide (1)..(106): Ceres Seq. ID no. 13497177
  misc_feature (1)..(97): Homolog of NCBI NO: 18391509 NR Description: expressed protein [Arabidopsis thaliana]
  misc_feature (1)..(104): Homolog of NCBI NO: 38344206 NR Description: OSJNBa0064G10.22 [Oryza sativa (japonica
  misc_feature (1)..(101): Homolog of NCBI NO: 22748411 NR Description: hypothetical protein [Oryza sativa (japonica
  misc_feature (1)..(105): Homolog of NCBI NO: 21554630 NR Description: unknown [Arabidopsis thaliana]
  misc_feature (1)..(105): Homolog of NCBI NO: 18407003 NR Description: expressed protein [Arabidopsis thaliana]
  misc_feature (1)..(104): Homolog of NCBI NO: 18416991 NR Description: expressed protein [Arabidopsis thaliana]
  misc_feature (1)..(106): Homolog of NCBI NO: 34394069 NR Description: unknown protein [Oryza sativa (japonica
  misc_feature (1)..(99): Homolog of NCBI NO: 38016521 NR Description: fiber protein Fb34 [Gossypium barbadense]
  misc_feature (1)..(106): Homolog of NCBI NO: 18404242 NR Description: expressed protein [Arabidopsis thaliana]
  misc_feature (1)..(106): Homolog of NCBI NO: 18400781 NR Description: expressed protein [Arabidopsis thaliana]
MAASRCFCCGKSLNPGGSRACAIILFLICWVFFLIAEMCLLAASIRNAYHTQYRKMWKVEDPPSCEVIRKGVFAAGAAFTLFTAIVSQFYYVCYSRARDAYQNPSY

SEQ ID NO: 35283 - DNA, 1210 bp, Arabidopsis thaliana
  misc_feature (1)..(1210): Ceres Seq. ID no. 12333953
  misc_feature: MA Experiment ID: 108501 Result: Up-regulated in Transcription
  misc_feature: MA Experiment 108501 PARAMETER Experiment Name: At_ap2_floral_buds_cDNA_P Parameter: Plant Line Value: ap2 (Ler.)
  misc_feature: MA Experiment 108501 PARAMETER Experiment Name: At_ap2_floral_buds_cDNA_P Parameter: Tissue Value: Closed Flower
  misc_feature: MA Experiment ID: 20000184 Result: Down-regulated in Transcription
  misc_feature: MA Experiment 20000184 PARAMETER Experiment Name: At_Shoots__P Parameter: Age (day) Value: 7
  misc_feature: MA Experiment 20000184 PARAMETER Experiment Name: At_Shoots__P Parameter: Tissue Value: Shoots vs. Whole Plant
  misc_feature: MA Experiment ID: 20000234 Result: Up-regulated in Transcription
  misc_feature: MA Experiment 20000234 PARAMETER Experiment Name: At_Siliques_P Parameter: Age (day) Value: 21
  misc_feature: MA Experiment 20000234 PARAMETER Experiment Name: At_Siliques_P Parameter: Organism Value: A. thaliana
  misc_feature: MA Experiment 20000234 PARAMETER Experiment Name: At_Siliques_P Parameter: Plant Line Value: WS
  misc_feature: MA Experiment 20000234 PARAMETER Experiment Name: At_Siliques_P Parameter: Tissue Value: Less Than 5mm Siliques vs. Whole Plant
  misc_feature: MA Experiment ID: 20000235 Result: Up-regulated in Transcription
  misc_feature: MA Experiment 20000235 PARAMETER Experiment Name: At_Siliques_P Parameter: Age (day) Value: 21
  misc_feature: MA Experiment 20000235 PARAMETER Experiment Name: At_Siliques_P Parameter: Organism Value: A. thaliana
  misc_feature: MA Experiment 20000235 PARAMETER Experiment Name: At_Siliques_P Parameter: Plant Line Value: WS
  misc_feature: MA Experiment 20000235 PARAMETER Experiment Name: At_Siliques_P Parameter: Tissue Value: 5-10mm Siliques vs. Whole Plant
  misc_feature: MA Experiment ID: 20000264 Result: Up-regulated in Transcription
  misc_feature: MA Experiment 20000264 PARAMETER Experiment Name: At_Open_Flower_P Parameter: Age (day) Value: 21
  misc_feature: MA Experiment 20000264 PARAMETER Experiment Name: At_Open_Flower_P Parameter: Plant Line Value: WS
  misc_feature: MA Experiment 20000264 PARAMETER Experiment Name: At_Open_Flower_P Parameter: Tissue Value: Open Flower vs. Whole Plant
  misc_feature: MA Experiment ID: 20000265 Result: Up-regulated in Transcription
  misc_feature: MA Experiment 20000265 PARAMETER Experiment Name: At_Open_Flower_P Parameter: Age (day) Value: 21
  misc_feature: MA Experiment 20000265 PARAMETER Experiment Name: At_Open_Flower_P Parameter: Plant Line Value: WS
  misc_feature: MA Experiment 20000265 PARAMETER Experiment Name: At_Open_Flower_P Parameter: Tissue Value: Closed Flower vs. Whole Plant
  misc_feature: MA Experiment ID: 20000286 Result: Up-regulated in Transcription
  misc_feature: MA Experiment 20000286 PARAMETER Experiment Name: At_Open_Flower_P Parameter: Age (day) Value: 21
  misc_feature: MA Experiment 20000286 PARAMETER Experiment Name: At_Open_Flower_P Parameter: Plant Line Value: WS
  misc_feature: MA Experiment 20000286 PARAMETER Experiment Name: At_Open_Flower_P Parameter: Tissue Value: Half Open vs. Whole Plant
  misc_feature: MA Experiment ID: 20000437 Result: Up-regulated in Transcription
  misc_feature: MA Experiment 20000437 PARAMETER Experiment Name: At_Drought_P Parameter: Age (day) Value: 8
  misc_feature: MA Experiment 20000437 PARAMETER Experiment Name: At_Drought_P Parameter: Organism Value: A. thaliana
  misc_feature: MA Experiment 20000437 PARAMETER Experiment Name: At_Drought_P Parameter: Plant Line Value: WS
  misc_feature: MA Experiment 20000437 PARAMETER Experiment Name: At_Drought_P Parameter: Timepoint (hr) Value: 24
  misc_feature: MA Experiment 20000437 PARAMETER Experiment Name: At_Drought_P Parameter: Tissue Value: Whole Plant
  misc_feature: MA Experiment 20000437 PARAMETER Experiment Name: At_Drought_P Parameter: Treatment Value: Drought vs. No Drought
  misc_feature: MA Experiment ID: 20001451 Result: Up-regulated in Transcription
  misc_feature: MA Experiment 20001451 PARAMETER Experiment Name: At_Far-red-induction_P Parameter: Age (day) Value: 7
  misc_feature: MA Experiment 20001451 PARAMETER Experiment Name: At_Far-red-induction_P Parameter: Light Value: Far-red vs. White
  misc_feature: MA Experiment 20001451 PARAMETER Experiment Name: At_Far-red-induction_P Parameter: Organism Value: A. thaliana
  misc_feature: MA Experiment 20001451 PARAMETER Experiment Name: At_Far-red-induction_P Parameter: Plant Line Value: Columbia
  misc_feature: MA Experiment 20001451 PARAMETER Experiment Name: At_Far-red-induction_P Parameter: Timepoint (hr) Value: 24
  misc_feature: MA Experiment 20001451 PARAMETER Experiment Name: At_Far-red-induction_P Parameter: Tissue Value: Whole Plant
  misc_feature: MA Experiment ID: 20001757 Result: Down-regulated in Transcription
  misc_feature: MA Experiment 20001757 PARAMETER Experiment Name: At_50mM_NH4NO3_L-to-H_P Parameter: Timepoint (hr) Value: 6
  misc_feature: MA Experiment 20001757 PARAMETER Experiment Name: At_50mM_NH4NO3_L-to-H_P Parameter: Tissue Value: Leaf
  misc_feature: MA Experiment 20001757 PARAMETER Experiment Name: At_50mM_NH4NO3_L-to-H_P Parameter: Treatment Value: 50mM NH4NO3 vs 100mM Mannitol
  misc_feature: Phenotype: ROSETTE LEAVES Curled-Curled 4
  misc_feature: Phenotype: CAULINE LEAVES Curled-Curled 3
  misc_feature: Phenotype: SILIQUES Length-Short
  misc_feature: Phenotype: SILIQUES Length-Short
  misc_feature: Phenotype: ROSETTE LEAVES Curled-Curled 4
  misc_feature: Phenotype: CAULINE LEAVES Curled-Curled 3
  misc_feature: Phenotype: SILIQUES Length-Short
gttagatgatctgtccatttttttcttttttcttctgtgtataaatatatttgagcacaaagaaaaactaataaccttctgttttcagcaagtagggtcttataaccttcaaagaaatattccttcaattgaaaacccataaaccaaaatagatattacaaaaggaaagagagatattttcaagaacaacataattagaaaagcagaagcagcagttaagtggtactgagataaatgatatagtttctcttcaagaacagtttctcattacccaccttctcctttttgctgatctatcgtaatcttgagaactcaggatcaatggaggaaggtgggagtagtcacgacgcagagagtagcaagaaactagggagagggaaaatagagataaagaggatagagaacacaacaaatcgtcaagttactttctgcaaacgacgcaatggtcttctcaagaaagcttatgaactctctgtcttgtgtgatgccgaagttgccctcgtcatcttctccactcgtggccgtctctatgagtacgccaacaacagtgtgaggggtacaattgaaaggtacaagaaagcttgttccgatgccgtcaaccctccttccgtcaccgaagctaatactcagtactatcagcaagaagcctctaagcttcggaggcagattcgagatattcagaattcaaataggcatattgttggggaatcacttggttccttgaacttcaaggaactcaaaaacctagaaggacgtcttgaaaaaggaatcagccgtgtccgctccaaaaagaatgagctgttagtggcagagatagagtatatgcagaagagggaaatggagttgcaacacaataacatgtacctgcgagcaaagatagccgaaggcgccagattgaatccggaccagcaggaatcgagtgtgatacaagggacgacagtttacgaatccggtgtatcttctcatgaccagtcgcagcattataatcggaactatattccggtgaaccttcttgaaccgaatcagcaattctccggccaagaccaacctcctcttcaacttgtgtaactcaaaacatgataacttgtttcttcccctcataacgattaagagagagacgagagagttcattttatatttataacgcgactgtgtattcatagtttaggttctaataatgataataacaaaactgttgtttctttgcttc

SEQ ID NO: 35284 - protein, 248 aa, Arabidopsis thaliana
  peptide (1)..(248): Ceres Seq. ID no. 12333954
  misc_feature (89)..(188): Pfam Name: K-box region Pfam Description: K-box region
  misc_feature (16)..(248): Homolog of NCBI NO: 14279306 NR Description: MAD-box transcripion factor [Vitis vinifera]
  misc_feature (1)..(248): Homolog of NCBI NO: 33308109 NR Description: AGAMOUS-like protein [Malus x domestica]
  misc_feature (1)..(248): Homolog of NCBI NO: 16973296 NR Description: C-type MADS box protein [Malus x domestica]
  misc_feature (9)..(248): Homolog of NCBI NO: 6970411 NR Description: MADS-box protein [Rosa rugosa]
  misc_feature (6)..(248): Homolog of NCBI NO: 5031217 NR Description: AGAMOUS homolog [Liquidambar styraciflua]
  misc_feature (3)..(248): Homolog of NCBI NO: 30689162 NR Description: floral homeodomain transcription factor (AGL5)
  misc_feature (3)..(247): Homolog of NCBI NO: 25307910 NR Description: floral homeodomain transcription factor (AGL5)
  misc_feature (3)..(248): Homolog of NCBI NO: 18406070 NR Description: floral homeodomain transcription factor (AGL5)
  misc_feature (1)..(248): Homolog of NCBI NO: 12655901 NR Description: SHATTERPROOF1 [Brassica napus]
  misc_feature (1)..(248): Homolog of NCBI NO: 15231135 NR Description: MADS-box protein
MEEGGSSHDAESSKKLGRGKIEIKRIENTTNRQVTFCKRRNGLLKKAYELSVLCDAEVALVIFSTRGRLYEYANNSVRGTIERYKKACSDAVNPPSVTEANTQYYQQEASKLRRQIRDIQNSNRHIVGESLGSLNFKELKNLEGRLEKGISRVRSKKNELLVAEIEYMQKREMELQHNNMYLRAKIAEGARLNPDQQESSVIQGTTVYESGVSSHDQSQHYNRNYIPVNLLEPNQQFSGQDQPPLQLV

SEQ ID NO: 35285 - DNA, 1196 bp, Arabidopsis thaliana
  misc_feature (1)..(1196): Ceres Seq. ID no. 12334143
  misc_feature: MA Experiment ID: 108573 Result: Up-regulated in Transcription
  misc_feature: MA Experiment 108573 PARAMETER Experiment Name: At_Drought_cDNA_P Parameter: Timepoint (hr) Value: 6
  misc_feature: MA Experiment 108573 PARAMETER Experiment Name: At_Drought_cDNA_P Parameter: Tissue Value: Aerial
  misc_feature: MA Experiment 108573 PARAMETER Experiment Name: At_Drought_cDNA_P Parameter: Treatment Value: Drought vs. No Drought
  misc_feature: MA Experiment ID: 108585 Result: Up-regulated in Transcription
  misc_feature: MA Experiment 108585 PARAMETER Experiment Name: At_5mM_NaNP_cDNA_P Parameter: Timepoint (hr) Value: 6
  misc_feature: MA Experiment 108585 PARAMETER Experiment Name: At_5mM_NaNP_cDNA_P Parameter: Tissue Value: Aerial
  misc_feature: MA Experiment 108585 PARAMETER Experiment Name: At_5mM_NaNP_cDNA_P Parameter: Treatment Value: null
  misc_feature: MA Experiment ID: 20001905 Result: Up-regulated in Transcription
  misc_feature: MA Experiment 20001905 PARAMETER Experiment Name: At_Drought_Reproduction_P Parameter: Age (day) Value: 40
  misc_feature: MA Experiment 20001905 PARAMETER Experiment Name: At_Drought_Reproduction_P Parameter: Organism Value: A. thaliana
  misc_feature: MA Experiment 20001905 PARAMETER Experiment Name: At_Drought_Reproduction_P Parameter: Plant Line Value: WS
  misc_feature: MA Experiment 20001905 PARAMETER Experiment Name: At_Drought_Reproduction_P Parameter: Timepoint (day) Value: 10
  misc_feature: MA Experiment 20001905 PARAMETER Experiment Name: At_Drought_Reproduction_P Parameter: Tissue Value: Rosettes
  misc_feature: MA Experiment 20001905 PARAMETER Experiment Name: At_Drought_Reproduction_P Parameter: Treatment Value: Drought vs. No Drought
tccccaattcgtctcctccaacagttttcttcttctcttcttctttgggtgttccttccaccaacggcagaaatcgatttggcttaaatctccccctcctttcgatctctctgatcgccgccgggaacattcaatttcccgggagttcaacaaaaaaaaaactctccgtttttatttttccccctttttcaccggtggaagtttccggagatggtgtcacccgaaaacgctaattggatttgtgacttgatcgatgctgattacggaagtttcacaatccaaggtcctggtttctcttggcctgttcagcaacctattggtgtttcttctaactccagtgctggagttgatggctcggctggaaactcagaagctagcaaagaacctggatccaaaaagagggggagatgtgaatcatcctctgccactagctcgaaagcatgtagagagaagcagcgacgggacaggttgaatgacaagtttatggaattgggtgcaattttggagcctggaaatcctcccaaaacagacaaggctgctatcttggttgatgctgtccgcatggtgacacagctacggggcgaggcccagaagctgaaggactccaattcaagtcttcaggacaaaatcaaagagttaaagactgagaaaaacgagctgcgagatgagaaacagaggctgaagacagagaaagaaaagctggagcagcagctgaaagccatgaatgctcctcaaccaagttttttcccagccccacctatgatgcctactgcttttgcttcagcgcaaggccaagctcctggaaacaagatggtgccaatcatcagttacccaggagttgccatgtggcagttcatgcctcctgcttcagtcgatacttctcaggatcatgtccttcgtcctcctgttgcttaatcaagaaaaatcatcaaccggtttgcttcttgcttccgcttaaaagaaaagtctccatttgttttgctctcctctctttctcggctttcttagtcttatccttttgctttgtcgtgttatcatcgtaactgttatctgttgaacaatgatatgacattgtaaactccaattgcttcgcgcaatgttatctattcacatgtaaatttaagtagagtttggcagatcgtctctcactttatgtgttcttacattaatacatagaatgtggttacttcctcgcc

SEQ ID NO: 35286 - protein, 234 aa, Arabidopsis thaliana
  peptide (1)..(234): Ceres Seq. ID no. 12334144
  misc_feature (72)..(123): Pfam Name: Helix-loop-helix DNA-binding domain Pfam Description: Helix-loop-helix DNA-binding domain
  misc_feature (70)..(209): Homolog of NCBI NO: 15230975 NR Description: bHLH protein
  misc_feature (33)..(234): Homolog of NCBI NO: 30682847 NR Description: bHLH protein [Arabidopsis thaliana]
  misc_feature (33)..(234): Homolog of NCBI NO: 18414212 NR Description: bHLH protein
  misc_feature (38)..(234): Homolog of NCBI NO: 22331274 NR Description: bHLH protein
  misc_feature (38)..(234): Homolog of NCBI NO: 20127030 NR Description: putative bHLH transcription factor [Arabidopsis
  misc_feature (40)..(234): Homolog of NCBI NO: 38636768 NR Description: helix-loop-helix-like protein
  misc_feature (40)..(234): Homolog of NCBI NO: 29367409 NR Description: helix-loop-helix-like protein
  misc_feature (1)..(234): Homolog of NCBI NO: 15223710 NR Description: bHLH protein
  misc_feature (1)..(234): Homolog of NCBI NO: 21592325 NR Description: bHLH transcription factor, putative [Arabidopsis
  misc_feature (1)..(234): Homolog of NCBI NO: 15239706 NR Description: bHLH protein
MVSPENANWICDLIDADYGSFTIQGPGFSWPVQQPIGVSSNSSAGVDGSAGNSEASKEPGSKKRGRCESSSATSSKACREKQRRDRLNDKFMELGAILEPGNPPKTDKAAILVDAVRMVTQLRGEAQKLKDSNSSLQDKIKELKTEKNELRDEKQRLKTEKEKLEQQLKAMNAPQPSFFPAPPMMPTAFASAQGQAPGNKMVPIISYPGVAMWQFMPPASVDTSQDHVLRPPVA

SEQ ID NO: 35287 - protein, 143 aa, Arabidopsis thaliana
  peptide (1)..(143): Ceres Seq. ID no. 12334145
  misc_feature (1)..(118): Homolog of NCBI NO: 15230975 NR Description: bHLH protein
  misc_feature (1)..(143): Homolog of NCBI NO: 30682847 NR Description: bHLH protein [Arabidopsis thaliana]
  misc_feature (1)..(143): Homolog of NCBI NO: 18414212 NR Description: bHLH protein
  misc_feature (1)..(143): Homolog of NCBI NO: 22331274 NR Description: bHLH protein
  misc_feature (1)..(143): Homolog of NCBI NO: 20127030 NR Description: putative bHLH transcription factor [Arabidopsis
  misc_feature (1)..(143): Homolog of NCBI NO: 38636768 NR Description: helix-loop-helix-like protein
  misc_feature (1)..(143): Homolog of NCBI NO: 29367409 NR Description: helix-loop-helix-like protein
  misc_feature (1)..(143): Homolog of NCBI NO: 15223710 NR Description: bHLH protein
  misc_feature (1)..(143): Homolog of NCBI NO: 21592325 NR Description: bHLH transcription factor, putative [Arabidopsis
  misc_feature (1)..(143): Homolog of NCBI NO: 15239706 NR Description: bHLH protein
MELGAILEPGNPPKTDKAAILVDAVRMVTQLRGEAQKLKDSNSSLQDKIKELKTEKNELRDEKQRLKTEKEKLEQQLKAMNAPQPSFFPAPPMMPTAFASAQGQAPGNKMVPIISYPGVAMWQFMPPASVDTSQDHVLRPPVA

SEQ ID NO: 35288 - protein, 117 aa, Arabidopsis thaliana
  peptide (1)..(117): Ceres Seq. ID no. 12334146
  misc_feature (1)..(92): Homolog of NCBI NO: 15230975 NR Description: bHLH protein
  misc_feature (1)..(117): Homolog of NCBI NO: 30682847 NR Description: bHLH protein [Arabidopsis thaliana]
  misc_feature (1)..(117): Homolog of NCBI NO: 18414212 NR Description: bHLH protein
  misc_feature (1)..(117): Homolog of NCBI NO: 22331274 NR Description: bHLH protein
  misc_feature (1)..(117): Homolog of NCBI NO: 20127030 NR Description: putative bHLH transcription factor [Arabidopsis
  misc_feature (1)..(117): Homolog of NCBI NO: 38636768 NR Description: helix-loop-helix-like protein
  misc_feature (1)..(117): Homolog of NCBI NO: 29367409 NR Description: helix-loop-helix-like protein
  misc_feature (1)..(117): Homolog of NCBI NO: 15223710 NR Description: bHLH protein
  misc_feature (1)..(117): Homolog of NCBI NO: 21592325 NR Description: bHLH transcription factor, putative [Arabidopsis
  misc_feature (1)..(117): Homolog of NCBI NO: 15239706 NR Description: bHLH protein
MVTQLRGEAQKLKDSNSSLQDKIKELKTEKNELRDEKQRLKTEKEKLEQQLKAMNAPQPSFFPAPPMMPTAFASAQGQAPGNKMVPIISYPGVAMWQFMPPASVDTSQDHVLRPPVA

SEQ ID NO: 35289 - DNA, 1361 bp, Arabidopsis thaliana
  misc_feature (1)..(1361): Ceres Seq. ID no. 12334139
  misc_feature: MA Experiment ID: 108573 Result: Up-regulated in Transcription
  misc_feature: MA Experiment 108573 PARAMETER Experiment Name: At_Drought_cDNA_P Parameter: Timepoint (hr) Value: 6
  misc_feature: MA Experiment 108573 PARAMETER Experiment Name: At_Drought_cDNA_P Parameter: Tissue Value: Aerial
  misc_feature: MA Experiment 108573 PARAMETER Experiment Name: At_Drought_cDNA_P Parameter: Treatment Value: Drought vs. No Drought
  misc_feature: MA Experiment ID: 108595 Result: Down-regulated in Transcription
  misc_feature: MA Experiment 108595 PARAMETER Experiment Name: At_Ler-pi_Ovule_cDNA_P Parameter: Plant Line Value: null
  misc_feature: MA Experiment ID: 20000113 Result: Up-regulated in Transcription
  misc_feature: MA Experiment 20000113 PARAMETER Experiment Name: At_42deg_Heat_cDNA_P Parameter: Temperature (deg C) Value: 42 vs. 22
  misc_feature: MA Experiment 20000113 PARAMETER Experiment Name: At_42deg_Heat_cDNA_P Parameter: Timepoint (hr) Value: 8
  misc_feature: MA Experiment 20000113 PARAMETER Experiment Name: At_42deg_Heat_cDNA_P Parameter: Tissue Value: Aerial
  misc_feature: MA Experiment ID: 20000437 Result: Up-regulated in Transcription
  misc_feature: MA Experiment 20000437 PARAMETER Experiment Name: At_Drought_P Parameter: Age (day) Value: 8
  misc_feature: MA Experiment 20000437 PARAMETER Experiment Name: At_Drought_P Parameter: Organism Value: A. thaliana
  misc_feature: MA Experiment 20000437 PARAMETER Experiment Name: At_Drought_P Parameter: Plant Line Value: WS
  misc_feature: MA Experiment 20000437 PARAMETER Experiment Name: At_Drought_P Parameter: Timepoint (hr) Value: 24
  misc_feature: MA Experiment 20000437 PARAMETER Experiment Name: At_Drought_P Parameter: Tissue Value: Whole Plant
  misc_feature: MA Experiment 20000437 PARAMETER Experiment Name: At_Drought_P Parameter: Treatment Value: Drought vs. No Drought
attcctccattaaaaagcttcttccttcgtttctcgtcggcgttttgagagacatgtgggaatcgatttgcctaacgcttgcggccaccgccggaaacaatatcggcaaggttctccagaagaagggcactattatcctccctcctctctcccttaagcttaaggtgttaagagcatatgctgaaaacaaaccatgggcgttaggttttcttatggacattgttggtgctttgttgatgctgagagcactatcacttgctcctgtgtcagttgttcagccagtctcgggatgtggccttgccattctttccgtcttttcgcatttttatttgaaggaagtcatgaatgtttttgactggattgggattactgttgccggcattgggaccataggagttggggctggtggtgaggagcaagaagcatcattaatatctgtcttccagttgctgtggctagcattggttgttgccatcttatttgtactactaaatgcgtggcttcatatcttcaaacgccagcgcagggagcaggagctgggggaatatgaagtggtggaagaaatcatatatggcttggaatctggcattttattcggaatggcatctgtagtatcaaagatgggttttgtattcgtggagcagggattttctacaatgttcattcccatgtgcatttcgattagtatatgctgtagtggaactggatttttctaccagactcggggactaaaacatgggagagcaatcgtagtatccacttgcgctgctgtggcatcaattgtaacaggtgtggttgcaggaatgtttgctctgggtgagaaattacccacttcaccatctggacggcttttacttctcctgggatggttacttatcatgctaggtgttgtattactagtgacttcatcacggcttatcagacatcttccacggtcattccggcgttcaaggcaaaccagtttagaaagaggtttcaacataaggcggacaacttctcacacaccaaaggatacaaacccaagtgcggttatccaggcagcaacattacaccatctcttatcatccccatcaaaagacaaagactaaatggattcagaaacaccgaagaatatttgcggagtgcatacttatgttacacaagttatttctcgaatttatgactaaaggtgtcagattttcatattccggggtttcatttcattgatattccaattgtgggaacagcttaaaagtcagagcttgggatcaatttatgacgtaacttgatgtctaaaatgtgaaatatgagttcccttggacatgttactctaattgtgcaaacaatctgggatatacgaaccaactttggtttattgtgtt

SEQ ID NO: 35290 - protein, 361 aa, Arabidopsis thaliana
  peptide (1)..(361): Ceres Seq. ID no. 12334140
  misc_feature (22)..(124): Pfam Name: Small Multidrug Resistance protein Pfam Description: Small Multidrug Resistance protein
  misc_feature (21)..(307): Homolog of NCBI NO: 29833793 NR Description: hypothetical protein [Streptomyces avermitilis
  misc_feature (18)..(360): Homolog of NCBI NO: 34910446 NR Description: P0510F09.19 [Oryza sativa (japonica
  misc_feature (18)..(162): Homolog of NCBI NO: 11357418 NR Description: hypothetical protein F14F18.130 - Arabidopsis
  misc_feature (143)..(289): Homolog of NCBI NO: 11357418 NR Description: hypothetical protein F14F18.130 - Arabidopsis
  misc_feature (18)..(361): Homolog of NCBI NO: 22326741 NR Description: putative protein
SSIKKLLPSFLVGVLRDMWESICLTLAATAGNNIGKVLQKKGTIILPPLSLKLKVLRAYAENKPWALGFLMDIVGALLMLRALSLAPVSVVQPVSGCGLAILSVFSHFYLKEVMNVFDWIGITVAGIGTIGVGAGGEEQEASLISVFQLLWLALVVAILFVLLNAWLHIFKRQRREQELGEYEVVEEIIYGLESGILFGMASVVSKMGFVFVEQGFSTMFIPMCISISICCSGTGFFYQTRGLKHGRAIVVSTCAAVASIVTGVVAGMFALGEKLPTSPSGRLLLLLGWLLIMLGVVLLVTSSRLIRHLPRSFRRSRQTSLERGFNIRRTTSHTPKDTNPSAVIQAATLHHLLSSPSKDKD

SEQ ID NO: 35291 - protein, 344 aa, Arabidopsis thaliana
  peptide (1)..(344): Ceres Seq. ID no. 12334141
  misc_feature (5)..(107): Pfam Name: Small Multidrug Resistance protein Pfam Description: Small Multidrug Resistance protein
  misc_feature (4)..(290): Homolog of NCBI NO: 29833793 NR Description: hypothetical protein [Streptomyces avermitilis
  misc_feature (1)..(343): Homolog of NCBI NO: 34910446 NR Description: P0510F09.19 [Oryza sativa (japonica
  misc_feature (1)..(145): Homolog of NCBI NO: 11357418 NR Description: hypothetical protein F14F18.130 - Arabidopsis
  misc_feature (126)..(272): Homolog of NCBI NO: 11357418 NR Description: hypothetical protein F14F18.130 - Arabidopsis
  misc_feature (1)..(344): Homolog of NCBI NO: 22326741 NR Description: putative protein
MWESICLTLAATAGNNIGKVLQKKGTIILPPLSLKLKVLRAYAENKPWALGFLMDIVGALLMLRALSLAPVSVVQPVSGCGLAILSVFSHFYLKEVMNVFDWIGITVAGIGTIGVGAGGEEQEASLISVFQLLWLALVVAILFVLLNAWLHIFKRQRREQELGEYEVVEEIIYGLESGILFGMASVVSKMGFVFVEQGFSTMFIPMCISISICCSGTGFFYQTRGLKHGRAIVVSTCAAVASIVTGVVAGMFALGEKLPTSPSGRLLLLLGWLLIMLGVVLLVTSSRLIRHLPRSFRRSRQTSLERGFNIRRTTSHTPKDTNPSAVIQAATLHHLLSSPSKDKD

SEQ ID NO: 35292 - protein, 291 aa, Arabidopsis thaliana
  peptide (1)..(291): Ceres Seq. ID no. 12334142
  misc_feature (1)..(54): Pfam Name: Small Multidrug Resistance protein Pfam Description: Small Multidrug Resistance protein
  misc_feature (1)..(237): Homolog of NCBI NO: 29833793 NR Description: hypothetical protein [Streptomyces avermitilis
  misc_feature (1)..(290): Homolog of NCBI NO: 34910446 NR Description: P0510F09.19 [Oryza sativa (japonica
  misc_feature (1)..(92): Homolog of NCBI NO: 11357418 NR Description: hypothetical protein F14F18.130 - Arabidopsis
  misc_feature (73)..(219): Homolog of NCBI NO: 11357418 NR Description: hypothetical protein F14F18.130 - Arabidopsis
  misc_feature (1)..(291): Homolog of NCBI NO: 22326741 NR Description: putative protein
MDIVGALLMLRALSLAPVSVVQPVSGCGLAILSVFSHFYLKEVMNVFDWIGITVAGIGTIGVGAGGEEQEASLISVFQLLWLALVVAILFVLLNAWLHIFKRQRREQELGEYEVVEEIIYGLESGILFGMASVVSKMGFVFVEQGFSTMFIPMCISISICCSGTGFFYQTRGLKHGRAIVVSTCAAVASIVTGVVAGMFALGEKLPTSPSGRLLLLLGWLLIMLGVVLLVTSSRLIRHLPRSFRRSRQTSLERGFNIRRTTSHTPKDTNPSAVIQAATLHHLLSSPSKDKD

SEQ ID NO: 35293 - DNA, 1378 bp, Arabidopsis thaliana
  misc_feature (1)..(1378): Ceres Seq. ID no. 12334204
  misc_feature: MA Experiment ID: 108434 Result: Up-regulated in Transcription
  misc_feature: MA Experiment 108434 PARAMETER Experiment Name: At_Root_Tips_cDNA_P Parameter: Tissue Value: Root Tips
  misc_feature: MA Experiment ID: 108462 Result: Down-regulated in Transcription
  misc_feature: MA Experiment 108462 PARAMETER Experiment Name: At_Germinating_Seeds_cDNA_P Parameter: Age (day) Value: 2 vs. 0
  misc_feature: MA Experiment 108462 PARAMETER Experiment Name: At_Germinating_Seeds_cDNA_P Parameter: Tissue Value: Germinating Seeds
  misc_feature: MA Experiment ID: 108463 Result: Down-regulated in Transcription
  misc_feature: MA Experiment 108463 PARAMETER Experiment Name: At_Germinating_Seeds_cDNA_P Parameter: Age (day) Value: 3 vs. 0
  misc_feature: MA Experiment 108463 PARAMETER Experiment Name: At_Germinating_Seeds_cDNA_P Parameter: Tissue Value: Germinating Seeds
  misc_feature: MA Experiment ID: 108464 Result: Down-regulated in Transcription
  misc_feature: MA Experiment 108464 PARAMETER Experiment Name: At_Germinating_Seeds_cDNA_P Parameter: Age (day) Value: 4 vs. 0
  misc_feature: MA Experiment 108464 PARAMETER Experiment Name: At_Germinating_Seeds_cDNA_P Parameter: Tissue Value: Germinating Seeds
  misc_feature: MA Experiment ID: 108561 Result: Down-regulated in Transcription
  misc_feature: MA Experiment 108561 PARAMETER Experiment Name: At_100uM_ABA_cDNA_P Parameter: Timepoint (hr) Value: 6
  misc_feature: MA Experiment 108561 PARAMETER Experiment Name: At_100uM_ABA_cDNA_P Parameter: Tissue Value: Aerial
  misc_feature: MA Experiment 108561 PARAMETER Experiment Name: At_100uM_ABA_cDNA_P Parameter: Treatment Value: 100uM ABA vs. No Treatment
  misc_feature: MA Experiment ID: 108668 Result: Down-regulated in Transcription
  misc_feature: MA Experiment 108668 PARAMETER Experiment Name: At_2mM_SA_cDNA_P Parameter: Plant Line Value: WS
  misc_feature: MA Experiment 108668 PARAMETER Experiment Name: At_2mM_SA_cDNA_P Parameter: Timepoint (hr) Value: 6
  misc_feature: MA Experiment 108668 PARAMETER Experiment Name: At_2mM_SA_cDNA_P Parameter: Treatment Value: 2mM SA vs. No Treatment
  misc_feature: MA Experiment ID: 20000169 Result: Down-regulated in Transcription
  misc_feature: MA Experiment 20000169 PARAMETER Experiment Name: At_100uM_ABA_P Parameter: Age (day) Value: 14
  misc_feature: MA Experiment 20000169 PARAMETER Experiment Name: At_100uM_ABA_P Parameter: Organism Value: A. thaliana
  misc_feature: MA Experiment 20000169 PARAMETER Experiment Name: At_100uM_ABA_P Parameter: Plant Line Value: WS
  misc_feature: MA Experiment 20000169 PARAMETER Experiment Name: At_100uM_ABA_P Parameter: Timepoint (hr) Value: 6
  misc_feature: MA Experiment 20000169 PARAMETER Experiment Name: At_100uM_ABA_P Parameter: Tissue Value: Aerial
  misc_feature: MA Experiment 20000169 PARAMETER Experiment Name: At_100uM_ABA_P Parameter: Treatment Value: 100uM ABA vs. No Treatment
  misc_feature: MA Experiment ID: 20000182 Result: Down-regulated in Transcription
  misc_feature: MA Experiment 20000182 PARAMETER Experiment Name: At_2mM_SA_P Parameter: Age (day) Value: 14
  misc_feature: MA Experiment 20000182 PARAMETER Experiment Name: At_2mM_SA_P Parameter: Organism Value: A. thaliana
  misc_feature: MA Experiment 20000182 PARAMETER Experiment Name: At_2mM_SA_P Parameter: Plant Line Value: WS
  misc_feature: MA Experiment 20000182 PARAMETER Experiment Name: At_2mM_SA_P Parameter: Timepoint (hr) Value: 6
  misc_feature: MA Experiment 20000182 PARAMETER Experiment Name: At_2mM_SA_P Parameter: Tissue Value: Aerial
  misc_feature: MA Experiment 20000182 PARAMETER Experiment Name: At_2mM_SA_P Parameter: Treatment Value: 2mM SA vs. No Treatment
  misc_feature: MA Experiment ID: 20000185 Result: Down-regulated in Transcription
  misc_feature: MA Experiment 20000185 PARAMETER Experiment Name: At_Roots__P Parameter: Age (day) Value: 7 vs. 21
  misc_feature: MA Experiment 20000185 PARAMETER Experiment Name: At_Roots__P Parameter: Organism Value: A. thaliana
  misc_feature: MA Experiment 20000185 PARAMETER Experiment Name: At_Roots__P Parameter: Tissue Value: Roots vs. Whole Plant
  misc_feature: MA Experiment ID: 20000234 Result: Up-regulated in Transcription
  misc_feature: MA Experiment 20000234 PARAMETER Experiment Name: At_Siliques_P Parameter: Age (day) Value: 21
  misc_feature: MA Experiment 20000234 PARAMETER Experiment Name: At_Siliques_P Parameter: Organism Value: A. thaliana
  misc_feature: MA Experiment 20000234 PARAMETER Experiment Name: At_Siliques_P Parameter: Plant Line Value: WS
  misc_feature: MA Experiment 20000234 PARAMETER Experiment Name: At_Siliques_P Parameter: Tissue Value: Less Than 5mm Siliques vs. Whole Plant
  misc_feature: MA Experiment ID: 20000437 Result: Down-regulated in Transcription
  misc_feature: MA Experiment 20000437 PARAMETER Experiment Name: At_Drought_P Parameter: Age (day) Value: 8
  misc_feature: MA Experiment 20000437 PARAMETER Experiment Name: At_Drought_P Parameter: Organism Value: A. thaliana
  misc_feature: MA Experiment 20000437 PARAMETER Experiment Name: At_Drought_P Parameter: Plant Line Value: WS
  misc_feature: MA Experiment 20000437 PARAMETER Experiment Name: At_Drought_P Parameter: Timepoint (hr) Value: 24
  misc_feature: MA Experiment 20000437 PARAMETER Experiment Name: At_Drought_P Parameter: Tissue Value: Whole Plant
  misc_feature: MA Experiment 20000437 PARAMETER Experiment Name: At_Drought_P Parameter: Treatment Value: Drought vs. No Drought
  misc_feature: MA Experiment ID: 20001247 Result: Down-regulated in Transcription
  misc_feature: MA Experiment 20001247 PARAMETER Experiment Name: At_Far-red-induction_P Parameter: Age (day) Value: 7
  misc_feature: MA Experiment 20001247 PARAMETER Experiment Name: At_Far-red-induction_P Parameter: Light Value: Far-red vs. White
  misc_feature: MA Experiment 20001247 PARAMETER Experiment Name: At_Far-red-induction_P Parameter: Organism Value: A. thaliana
  misc_feature: MA Experiment 20001247 PARAMETER Experiment Name: At_Far-red-induction_P Parameter: Plant Line Value: Columbia
  misc_feature: MA Experiment 20001247 PARAMETER Experiment Name: At_Far-red-induction_P Parameter: Timepoint (hr) Value: 1
  misc_feature: MA Experiment 20001247 PARAMETER Experiment Name: At_Far-red-induction_P Parameter: Tissue Value: Whole Plant
  misc_feature: MA Experiment ID: 20001557 Result: Up-regulated in Transcription
  misc_feature: MA Experiment 20001557 PARAMETER Experiment Name: At_Drought_Soil_Dry_P Parameter: Age (day) Value: 27
  misc_feature: MA Experiment 20001557 PARAMETER Experiment Name: At_Drought_Soil_Dry_P Parameter: Organism Value: A. thaliana
  misc_feature: MA Experiment 20001557 PARAMETER Experiment Name: At_Drought_Soil_Dry_P Parameter: Plant Line Value: WS
  misc_feature: MA Experiment 20001557 PARAMETER Experiment Name: At_Drought_Soil_Dry_P Parameter: Post Timepoint (hr) Value: 3
  misc_feature: MA Experiment 20001557 PARAMETER Experiment Name: At_Drought_Soil_Dry_P Parameter: Post-Treatment Value: Re-Water vs. No Drought
  misc_feature: MA Experiment 20001557 PARAMETER Experiment Name: At_Drought_Soil_Dry_P Parameter: Timepoint (day) Value: 13
  misc_feature: MA Experiment 20001557 PARAMETER Experiment Name: At_Drought_Soil_Dry_P Parameter: Treatment Value: Drought vs. No Drought
  misc_feature: MA Experiment ID: 20001558 Result: Up-regulated in Transcription
  misc_feature: MA Experiment 20001558 PARAMETER Experiment Name: At_Drought_Soil_Dry_P Parameter: Age (day) Value: 27
  misc_feature: MA Experiment 20001558 PARAMETER Experiment Name: At_Drought_Soil_Dry_P Parameter: Organism Value: A. thaliana
  misc_feature: MA Experiment 20001558 PARAMETER Experiment Name: At_Drought_Soil_Dry_P Parameter: Plant Line Value: WS
  misc_feature: MA Experiment 20001558 PARAMETER Experiment Name: At_Drought_Soil_Dry_P Parameter: Post Timepoint (hr) Value: 6
  misc_feature: MA Experiment 20001558 PARAMETER Experiment Name: At_Drought_Soil_Dry_P Parameter: Post-Treatment Value: Re-Water vs. No Drought
  misc_feature: MA Experiment 20001558 PARAMETER Experiment Name: At_Drought_Soil_Dry_P Parameter: Timepoint (day) Value: 13
  misc_feature: MA Experiment 20001558 PARAMETER Experiment Name: At_Drought_Soil_Dry_P Parameter: Treatment Value: Drought vs. No Drought
  misc_feature: MA Experiment ID: 20001560 Result: Up-regulated in Transcription
  misc_feature: MA Experiment 20001560 PARAMETER Experiment Name: At_Drought_Soil_Dry_P Parameter: Age (day) Value: 28
  misc_feature: MA Experiment 20001560 PARAMETER Experiment Name: At_Drought_Soil_Dry_P Parameter: Organism Value: A. thaliana
  misc_feature: MA Experiment 20001560 PARAMETER Experiment Name: At_Drought_Soil_Dry_P Parameter: Plant Line Value: WS
  misc_feature: MA Experiment 20001560 PARAMETER Experiment Name: At_Drought_Soil_Dry_P Parameter: Post Timepoint (hr) Value: None
  misc_feature: MA Experiment 20001560 PARAMETER Experiment Name: At_Drought_Soil_Dry_P Parameter: Post-Treatment Value: None
  misc_feature: MA Experiment 20001560 PARAMETER Experiment Name: At_Drought_Soil_Dry_P Parameter: Timepoint (day) Value: 14
  misc_feature: MA Experiment 20001560 PARAMETER Experiment Name: At_Drought_Soil_Dry_P Parameter: Treatment Value: Drought vs. No Drought
  misc_feature: MA Experiment ID: 20001757 Result: Up-regulated in Transcription
  misc_feature: MA Experiment 20001757 PARAMETER Experiment Name: At_50mM_NH4NO3_L-to-H_P Parameter: Timepoint (hr) Value: 6
  misc_feature: MA Experiment 20001757 PARAMETER Experiment Name: At_50mM_NH4NO3_L-to-H_P Parameter: Tissue Value: Leaf
  misc_feature: MA Experiment 20001757 PARAMETER Experiment Name: At_50mM_NH4NO3_L-to-H_P Parameter: Treatment Value: 50mM NH4NO3 vs 100mM Mannitol
aagcaatccctctctagtaatggcggtcgcaatacctcaagccacttctcttacgaacctcgtcttcctcacgaaattaatcccacgaggaagcttcaccaccatactacctaagcatcatcggaaaccaatcttcgtattctctctccagactcaattttcttctccagtaaccacactcacctccaaaaaccctaaagatgatgagcaacagcaaaaactctccttcaccctcaactaccttatcgactcatgtggactatctccagattccgccaccgtagcctctcgtaagctcttactagattcaccagaacgacccaacacagttctcaaccttcttcgtgaccatggattcaccacagctcaaatctcatctctcgtcaagaaacgtcctgttctcttattagccaatgctgaatctgtcctcctcccgaaactcagcttctttctctcaattggtgtctcaaaatctttacttgctcgaactttagcttctgatccaaccattttgactagatcccttgttaatcagcttatcccttcttacaatttccttaaaagcgttcttgattccgatgagaagattgtggcggcgttgcggaggacgacttgggttttccttgaggatcacactaagaaccttgtcccaaacatcaactatatggcggagactggtgttcctgagaaatgtatcaagctgcttctcacgcattttcctgaagctgtgatgcagaagaaccatgagttccaagcaattgctaagcaagctcaagagatggggttcaatcctcaaaaatcaacatttgtgttggccattcatgctctctctgggaaaggaaacaaatcgatatgggacaaatgttttgaggtttatcagagatggggatggtcggaagatgatatcatgtgtgcgttcaagaagcaccctcattgtatgatgttgtctgagaggaagattaacagaacgatggaatattttgtgaatgagatgaatatggcgcctagatcgatcgcacagtgtccagtggtgctcttcttcagccttgagaagaggattatcccgaggtgttcggttactaaggttttggtatcgaacgggcttgtgaaagaggattggagcttgacgtctttgttggttccagtggagaaagtgttcttggagaagctcgtgatcaagtacgaagaggagttgcctgagttgatgaatctgtatctaggatgcaccaaactctgagcttttgtttttgactgttttcattatcaaatgtcagatgctgagagacatgaatctttgtgaaaagagtctagtgtgtaatccaattttggtagtgaaaggaaagctgattagcaagcccaacgtgtgttttaaagacag

SEQ ID NO: 35294 - protein, 411 aa, Arabidopsis thaliana
  peptide (1)..(411): Ceres Seq. ID no. 12334205
  misc_feature (111)..(388): Pfam Name: mTERF Pfam Description: mTERF
  misc_feature (78)..(411): Homolog of NCBI NO: 21553423 NR Description: unknown [Arabidopsis thaliana]
  misc_feature (78)..(411): Homolog of NCBI NO: 15238313 NR Description: putative protein
  misc_feature (290)..(405): Homolog of NCBI NO: 15220717 NR Description: hypothetical protein; protein id: At1g62150.1
  misc_feature (46)..(325): Homolog of NCBI NO: 15220717 NR Description: hypothetical protein; protein id: At1g62150.1
  misc_feature (75)..(405): Homolog of NCBI NO: 34394750 NR Description: unknown protein [Oryza sativa (japonica
  misc_feature (290)..(407): Homolog of NCBI NO: 25345734 NR Description: hypothetical protein F19K23.4 [imported] -
  misc_feature (38)..(325): Homolog of NCBI NO: 25345734 NR Description: hypothetical protein F19K23.4 [imported] -
  misc_feature (63)..(402): Homolog of NCBI NO: 25511650 NR Description: T22I11.2 protein - Arabidopsis thaliana
  misc_feature (63)..(402): Homolog of NCBI NO: 15218140 NR Description: hypothetical protein; protein id: At1g21150.1
  misc_feature (7)..(411): Homolog of NCBI NO: 18415647 NR Description: expressed protein
SNPSLVMAVAIPQATSLTNLVFLTKLIPRGSFTTILPKHHRKPIFVFSLQTQFSSPVTTLTSKNPKDDEQQQKLSFTLNYLIDSCGLSPDSATVASRKLLLDSPERPNTVLNLLRDHGFTTAQISSLVKKRPVLLLANAESVLLPKLSFFLSIGVSKSLLARTLASDPTILTRSLVNQLIPSYNFLKSVLDSDEKIVAALRRTTWVFLEDHTKNLVPNINYMAETGVPEKCIKLLLTHFPEAVMQKNHEFQAIAKQAQEMGFNPQKSTFVLAIHALSGKGNKSIWDKCFEVYQRWGWSEDDIMCAFKKHPHCMMLSERKINRTMEYFVNEMNMAPRSIAQCPVVLFFSLEKRIIPRCSVTKVLVSNGLVKEDWSLTSLLVPVEKVFLEKLVIKYEEELPELMNLYLGCTKL

SEQ ID NO: 35295 - protein, 405 aa, Arabidopsis thaliana
  peptide (1)..(405): Ceres Seq. ID no. 12334206
  misc_feature (105)..(382): Pfam Name: mTERF Pfam Description: mTERF
  misc_feature (72)..(405): Homolog of NCBI NO: 21553423 NR Description: unknown [Arabidopsis thaliana]
  misc_feature (72)..(405): Homolog of NCBI NO: 15238313 NR Description: putative protein
  misc_feature (284)..(399): Homolog of NCBI NO: 15220717 NR Description: hypothetical protein; protein id: At1g62150.1
  misc_feature (40)..(319): Homolog of NCBI NO: 15220717 NR Description: hypothetical protein; protein id: At1g62150.1
  misc_feature (69)..(399): Homolog of NCBI NO: 34394750 NR Description: unknown protein [Oryza sativa (japonica
  misc_feature (284)..(401): Homolog of NCBI NO: 25345734 NR Description: hypothetical protein F19K23.4 [imported] -
  misc_feature (32)..(319): Homolog of NCBI NO: 25345734 NR Description: hypothetical protein F19K23.4 [imported] -
  misc_feature (57)..(396): Homolog of NCBI NO: 25511650 NR Description: T22I11.2 protein - Arabidopsis thaliana
  misc_feature (57)..(396): Homolog of NCBI NO: 15218140 NR Description: hypothetical protein; protein id: At1g21150.1
  misc_feature (1)..(405): Homolog of NCBI NO: 18415647 NR Description: expressed protein
MAVAIPQATSLTNLVFLTKLIPRGSFTTILPKHHRKPIFVFSLQTQFSSPVTTLTSKNPKDDEQQQKLSFTLNYLIDSCGLSPDSATVASRKLLLDSPERPNTVLNLLRDHGFTTAQISSLVKKRPVLLLANAESVLLPKLSFFLSIGVSKSLLARTLASDPTILTRSLVNQLIPSYNFLKSVLDSDEKIVAALRRTTWVFLEDHTKNLVPNINYMAETGVPEKCIKLLLTHFPEAVMQKNHEFQAIAKQAQEMGFNPQKSTFVLAIHALSGKGNKSIWDKCFEVYQRWGWSEDDIMCAFKKHPHCMMLSERKINRTMEYFVNEMNMAPRSIAQCPVVLFFSLEKRIIPRCSVTKVLVSNGLVKEDWSLTSLLVPVEKVFLEKLVIKYEEELPELMNLYLGCTKL

SEQ ID NO: 35296 - DNA, 2008 bp, Arabidopsis thaliana
  misc_feature (1)..(2008): Ceres Seq. ID no. 12488412
  misc_feature: MA Experiment ID: 20000171 Result: Up-regulated in Transcription
  misc_feature: MA Experiment 20000171 PARAMETER Experiment Name: At_42deg_Heat_P Parameter: Age (day) Value: 14
  misc_feature: MA Experiment 20000171 PARAMETER Experiment Name: At_42deg_Heat_P Parameter: Organism Value: A. thaliana
  misc_feature: MA Experiment 20000171 PARAMETER Experiment Name: At_42deg_Heat_P Parameter: Plant Line Value: WS
  misc_feature: MA Experiment 20000171 PARAMETER Experiment Name: At_42deg_Heat_P Parameter: Temperature (deg C) Value: 42 vs. 22
  misc_feature: MA Experiment 20000171 PARAMETER Experiment Name: At_42deg_Heat_P Parameter: Timepoint (hr) Value: 1
  misc_feature: MA Experiment 20000171 PARAMETER Experiment Name: At_42deg_Heat_P Parameter: Tissue Value: Aerial
  misc_feature: MA Experiment ID: 20000173 Result: Up-regulated in Transcription
  misc_feature: MA Experiment 20000173 PARAMETER Experiment Name: At_42deg_Heat_P Parameter: Age (day) Value: 14
  misc_feature: MA Experiment 20000173 PARAMETER Experiment Name: At_42deg_Heat_P Parameter: Organism Value: A. thaliana
  misc_feature: MA Experiment 20000173 PARAMETER Experiment Name: At_42deg_Heat_P Parameter: Plant Line Value: WS
  misc_feature: MA Experiment 20000173 PARAMETER Experiment Name: At_42deg_Heat_P Parameter: Temperature (deg C) Value: 42 vs. 22
  misc_feature: MA Experiment 20000173 PARAMETER Experiment Name: At_42deg_Heat_P Parameter: Timepoint (hr) Value: 6
  misc_feature: MA Experiment 20000173 PARAMETER Experiment Name: At_42deg_Heat_P Parameter: Tissue Value: Aerial
  misc_feature: MA Experiment ID: 20000185 Result: Up-regulated in Transcription
  misc_feature: MA Experiment 20000185 PARAMETER Experiment Name: At_Roots__P Parameter: Age (day) Value: 7 vs. 21
  misc_feature: MA Experiment 20000185 PARAMETER Experiment Name: At_Roots__P Parameter: Organism Value: A. thaliana
  misc_feature: MA Experiment 20000185 PARAMETER Experiment Name: At_Roots__P Parameter: Tissue Value: Roots vs. Whole Plant
  misc_feature: MA Experiment ID: 20000227 Result: Up-regulated in Transcription
  misc_feature: MA Experiment 20000227 PARAMETER Experiment Name: At_Root-Tips-vs-Tops_P Parameter: Tissue Value: Root Tips vs. Root Tops
  misc_feature: MA Experiment ID: 20000234 Result: Up-regulated in Transcription
  misc_feature: MA Experiment 20000234 PARAMETER Experiment Name: At_Siliques_P Parameter: Age (day) Value: 21
  misc_feature: MA Experiment 20000234 PARAMETER Experiment Name: At_Siliques_P Parameter: Organism Value: A. thaliana
  misc_feature: MA Experiment 20000234 PARAMETER Experiment Name: At_Siliques_P Parameter: Plant Line Value: WS
  misc_feature: MA Experiment 20000234 PARAMETER Experiment Name: At_Siliques_P Parameter: Tissue Value: Less Than 5mm Siliques vs. Whole Plant
  misc_feature: MA Experiment ID: 20000264 Result: Up-regulated in Transcription
  misc_feature: MA Experiment 20000264 PARAMETER Experiment Name: At_Open_Flower_P Parameter: Age (day) Value: 21
  misc_feature: MA Experiment 20000264 PARAMETER Experiment Name: At_Open_Flower_P Parameter: Plant Line Value: WS
  misc_feature: MA Experiment 20000264 PARAMETER Experiment Name: At_Open_Flower_P Parameter: Tissue Value: Open Flower vs. Whole Plant
  misc_feature: MA Experiment ID: 20000265 Result: Up-regulated in Transcription
  misc_feature: MA Experiment 20000265 PARAMETER Experiment Name: At_Open_Flower_P Parameter: Age (day) Value: 21
  misc_feature: MA Experiment 20000265 PARAMETER Experiment Name: At_Open_Flower_P Parameter: Plant Line Value: WS
  misc_feature: MA Experiment 20000265 PARAMETER Experiment Name: At_Open_Flower_P Parameter: Tissue Value: Closed Flower vs. Whole Plant
  misc_feature: MA Experiment ID: 20000286 Result: Up-regulated in Transcription
  misc_feature: MA Experiment 20000286 PARAMETER Experiment Name: At_Open_Flower_P Parameter: Age (day) Value: 21
  misc_feature: MA Experiment 20000286 PARAMETER Experiment Name: At_Open_Flower_P Parameter: Plant Line Value: WS
  misc_feature: MA Experiment 20000286 PARAMETER Experiment Name: At_Open_Flower_P Parameter: Tissue Value: Half Open vs. Whole Plant
  misc_feature: MA Experiment ID: 20001247 Result: Down-regulated in Transcription
  misc_feature: MA Experiment 20001247 PARAMETER Experiment Name: At_Far-red-induction_P Parameter: Age (day) Value: 7
  misc_feature: MA Experiment 20001247 PARAMETER Experiment Name: At_Far-red-induction_P Parameter: Light Value: Far-red vs. White
  misc_feature: MA Experiment 20001247 PARAMETER Experiment Name: At_Far-red-induction_P Parameter: Organism Value: A. thaliana
  misc_feature: MA Experiment 20001247 PARAMETER Experiment Name: At_Far-red-induction_P Parameter: Plant Line Value: Columbia
  misc_feature: MA Experiment 20001247 PARAMETER Experiment Name: At_Far-red-induction_P Parameter: Timepoint (hr) Value: 1
  misc_feature: MA Experiment 20001247 PARAMETER Experiment Name: At_Far-red-induction_P Parameter: Tissue Value: Whole Plant
  misc_feature: MA Experiment ID: 20001248 Result: Down-regulated in Transcription
  misc_feature: MA Experiment 20001248 PARAMETER Experiment Name: At_Far-red-induction_P Parameter: Age (day) Value: 7
  misc_feature: MA Experiment 20001248 PARAMETER Experiment Name: At_Far-red-induction_P Parameter: Light Value: Far-red vs. White
  misc_feature: MA Experiment 20001248 PARAMETER Experiment Name: At_Far-red-induction_P Parameter: Organism Value: A. thaliana
  misc_feature: MA Experiment 20001248 PARAMETER Experiment Name: At_Far-red-induction_P Parameter: Plant Line Value: Columbia
  misc_feature: MA Experiment 20001248 PARAMETER Experiment Name: At_Far-red-induction_P Parameter: Timepoint (hr) Value: 4
  misc_feature: MA Experiment 20001248 PARAMETER Experiment Name: At_Far-red-induction_P Parameter: Tissue Value: Whole Plant
  misc_feature: MA Experiment ID: 20001450 Result: Down-regulated in Transcription
  misc_feature: MA Experiment 20001450 PARAMETER Experiment Name: At_Far-red-induction_P Parameter: Age (day) Value: 7
  misc_feature: MA Experiment 20001450 PARAMETER Experiment Name: At_Far-red-induction_P Parameter: Light Value: Far-red vs. White
  misc_feature: MA Experiment 20001450 PARAMETER Experiment Name: At_Far-red-induction_P Parameter: Organism Value: A. thaliana
  misc_feature: MA Experiment 20001450 PARAMETER Experiment Name: At_Far-red-induction_P Parameter: Plant Line Value: Columbia
  misc_feature: MA Experiment 20001450 PARAMETER Experiment Name: At_Far-red-induction_P Parameter: Timepoint (hr) Value: 8
  misc_feature: MA Experiment 20001450 PARAMETER Experiment Name: At_Far-red-induction_P Parameter: Tissue Value: Whole Plant
  misc_feature: MA Experiment ID: 20001451 Result: Down-regulated in Transcription
  misc_feature: MA Experiment 20001451 PARAMETER Experiment Name: At_Far-red-induction_P Parameter: Age (day) Value: 7
  misc_feature: MA Experiment 20001451 PARAMETER Experiment Name: At_Far-red-induction_P Parameter: Light Value: Far-red vs. White
  misc_feature: MA Experiment 20001451 PARAMETER Experiment Name: At_Far-red-induction_P Parameter: Organism Value: A. thaliana
  misc_feature: MA Experiment 20001451 PARAMETER Experiment Name: At_Far-red-induction_P Parameter: Plant Line Value: Columbia
  misc_feature: MA Experiment 20001451 PARAMETER Experiment Name: At_Far-red-induction_P Parameter: Timepoint (hr) Value: 24
  misc_feature: MA Experiment 20001451 PARAMETER Experiment Name: At_Far-red-induction_P Parameter: Tissue Value: Whole Plant
  misc_feature: MA Experiment ID: 20001556 Result: Up-regulated in Transcription
  misc_feature: MA Experiment 20001556 PARAMETER Experiment Name: At_Drought_Soil_Dry_P Parameter: Age (day) Value: 26
  misc_feature: MA Experiment 20001556 PARAMETER Experiment Name: At_Drought_Soil_Dry_P Parameter: Organism Value: A. thaliana
  misc_feature: MA Experiment 20001556 PARAMETER Experiment Name: At_Drought_Soil_Dry_P Parameter: Plant Line Value: WS
  misc_feature: MA Experiment 20001556 PARAMETER Experiment Name: At_Drought_Soil_Dry_P Parameter: Post Timepoint (hr) Value: None
  misc_feature: MA Experiment 20001556 PARAMETER Experiment Name: At_Drought_Soil_Dry_P Parameter: Post-Treatment Value: None
  misc_feature: MA Experiment 20001556 PARAMETER Experiment Name: At_Drought_Soil_Dry_P Parameter: Timepoint (day) Value: 12
  misc_feature: MA Experiment 20001556 PARAMETER Experiment Name: At_Drought_Soil_Dry_P Parameter: Treatment Value: Drought vs. No Drought
  misc_feature: MA Experiment ID: 20001557 Result: Up-regulated in Transcription
  misc_feature: MA Experiment 20001557 PARAMETER Experiment Name: At_Drought_Soil_Dry_P Parameter: Age (day) Value: 27
  misc_feature: MA Experiment 20001557 PARAMETER Experiment Name: At_Drought_Soil_Dry_P Parameter: Organism Value: A. thaliana
  misc_feature: MA Experiment 20001557 PARAMETER Experiment Name: At_Drought_Soil_Dry_P Parameter: Plant Line Value: WS
  misc_feature: MA Experiment 20001557 PARAMETER Experiment Name: At_Drought_Soil_Dry_P Parameter: Post Timepoint (hr) Value: 3
  misc_feature: MA Experiment 20001557 PARAMETER Experiment Name: At_Drought_Soil_Dry_P Parameter: Post-Treatment Value: Re-Water vs. No Drought
  misc_feature: MA Experiment 20001557 PARAMETER Experiment Name: At_Drought_Soil_Dry_P Parameter: Timepoint (day) Value: 13
  misc_feature: MA Experiment 20001557 PARAMETER Experiment Name: At_Drought_Soil_Dry_P Parameter: Treatment Value: Drought vs. No Drought
  misc_feature: MA Experiment ID: 20001558 Result: Up-regulated in Transcription
  misc_feature: MA Experiment 20001558 PARAMETER Experiment Name: At_Drought_Soil_Dry_P Parameter: Age (day) Value: 27
  misc_feature: MA Experiment 20001558 PARAMETER Experiment Name: At_Drought_Soil_Dry_P Parameter: Organism Value: A. thaliana
  misc_feature: MA Experiment 20001558 PARAMETER Experiment Name: At_Drought_Soil_Dry_P Parameter: Plant Line Value: WS
  misc_feature: MA Experiment 20001558 PARAMETER Experiment Name: At_Drought_Soil_Dry_P Parameter: Post Timepoint (hr) Value: 6
  misc_feature: MA Experiment 20001558 PARAMETER Experiment Name: At_Drought_Soil_Dry_P Parameter: Post-Treatment Value: Re-Water vs. No Drought
  misc_feature: MA Experiment 20001558 PARAMETER Experiment Name: At_Drought_Soil_Dry_P Parameter: Timepoint (day) Value: 13
  misc_feature: MA Experiment 20001558 PARAMETER Experiment Name: At_Drought_Soil_Dry_P Parameter: Treatment Value: Drought vs. No Drought
  misc_feature: MA Experiment ID: 20001560 Result: Up-regulated in Transcription
  misc_feature: MA Experiment 20001560 PARAMETER Experiment Name: At_Drought_Soil_Dry_P Parameter: Age (day) Value: 28
  misc_feature: MA Experiment 20001560 PARAMETER Experiment Name: At_Drought_Soil_Dry_P Parameter: Organism Value: A. thaliana
  misc_feature: MA Experiment 20001560 PARAMETER Experiment Name: At_Drought_Soil_Dry_P Parameter: Plant Line Value: WS
  misc_feature: MA Experiment 20001560 PARAMETER Experiment Name: At_Drought_Soil_Dry_P Parameter: Post Timepoint (hr) Value: None
  misc_feature: MA Experiment 20001560 PARAMETER Experiment Name: At_Drought_Soil_Dry_P Parameter: Post-Treatment Value: None
  misc_feature: MA Experiment 20001560 PARAMETER Experiment Name: At_Drought_Soil_Dry_P Parameter: Timepoint (day) Value: 14
  misc_feature: MA Experiment 20001560 PARAMETER Experiment Name: At_Drought_Soil_Dry_P Parameter: Treatment Value: Drought vs. No Drought
ctctccgcctgttctccattgatctaatctaactcgctcatcagaatcatctcttcatcgttaatcctcttccttctcactcaccatgtatcgtttcgcttctaacctcgcctccaaggcaaggattgctcaaaacgctcgccaggtttccagcagaatgagctggagcaggaactatgcagcgaaagagattaagtttggtgttgaagctcgagctttgatgcttaagggtgttgaagatcttgctgatgctgttaaagtcaccatgggtcccaagggacgtaatgttgtgattgagcaaagttggggtgctcctaaagtgacaaaagatggtgttactgttgccaaaagtattgagttcaaagacaaaattaagaacgttggtgctagtcttgtgaagcaggttgcaaatgctactaatgatgttgctggtgatggtactacttgtgctactgtcctcacccgggctatatttgccgaaggatgcaaatcagttgccgcaggaatgaatgcaatggacttgcgaagaggtatttccatggcagttgatgctgtggtgacaaaccttaaaagcaaggctaggatgatcagcacatctgaagagattgctcaggttggaaccatttctgctaatggagagagggaaattggtgaacttattgccaaggctatggagaaggttggcaaagaaggtgttatcacaatccaagatggaaagacattgtttaacgagttggaagttgtagaggggatgaaattggacagaggttatacttcaccatactttatcactaatcaaaaaacccaaaaatgtgaactagacgatcctctcattcttatccacgagaagaagatctcaagcatcaactctatagtgaaagtgttggagttggctctgaagaggcaaagaccactattgattgtttctgaagatgtggaaagtgatgctcttgcaactcttatccttaacaagctccgtgccggaattaaggtctgtgccatcaaggcccctgggtttggagagaataggaaggccaatttgcaagaccttgctgcccttactggtggagaggttatcacagacgagcttggcatgaatctggagaaggtggacctaagcatgctaggaacctgcaaaaaggttacagtctccaaggacgacactgttattcttgatggggctggcgacaagaaaggaattgaggaaagatgtgaacagattaggtcagcaattgaactgagcacctcagattatgacaaggaaaaactgcaagaaaggttggctaagctctctggaggtgttgcagtgttgaagattggaggagcaagtgaagctgaagttggtgagaagaaagacagagtgacagatgctttgaatgccactaaagcagcagttgaagagggtattttaccaggaggaggtgtggctcttctatacgcagcaagagagttggaaaaacttccaacagccaactttgaccagaagattggtgtccagattattcagaacgcattgaagactcctgtttacacaatcgcttcaaatgctggagttgaaggtgctgttattgttggcaagctcttggagcaagataacccagacctcggttatgatgctgctaaaggtgaatatgtggatatggtgaaagctggaatcatagaccctctgaaagtgatcaggacagctttggttgatgctgcgagtgtgtcatctttgttgacgacaacggaagctgtagtggttgatcttccgaaagacgaaagcgagtcaggagcagcaggagcaggcatgggtggaatgggaggcatggactactagatccactaaattctgtcttttgttttcaccaatcaccatcttaacttgagaagagagatacgattcttttaggagttttagtcttcgtctttgccttattgttgctcaataacctcaaaagttttacaataaacagagcacacttggcaatgttacgagacacactattagcatcaacaattaaaaccg

SEQ ID NO: 35297 - protein, 577 aa, Arabidopsis thaliana
  peptide (1)..(577): Ceres Seq. ID no. 12488413
  misc_feature (53)..(556): Pfam Name: TCP-1/cpn60 chaperonin family Pfam Description: TCP-1/cpn60 chaperonin family
  misc_feature (1)..(575): Homolog of NCBI NO: 4099014 NR Description: heat-shock protein [Coccidioides immitis]
  misc_feature (1)..(577): Homolog of NCBI NO: 2493646 NR Description: CHAPERONIN CPN60-2, MITOCHONDRIAL PRECURSOR
  misc_feature (1)..(577): Homolog of NCBI NO: 309557 NR Description: chaperonin 60
  misc_feature (1)..(577): Homolog of NCBI NO: 2506275 NR Description: CHAPERONIN CPN60-1, MITOCHONDRIAL PRECURSOR
  misc_feature (1)..(577): Homolog of NCBI NO: 283035 NR Description: chaperonin hsp60 - maize
  misc_feature (1)..(577): Homolog of NCBI NO: 37535140 NR Description: mitochondrial chaperonin-60
  misc_feature (1)..(577): Homolog of NCBI NO: 461735 NR Description: CHAPERONIN CPN60-1, MITOCHONDRIAL PRECURSOR
  misc_feature (1)..(577): Homolog of NCBI NO: 461736 NR Description: CHAPERONIN CPN60-2, MITOCHONDRIAL PRECURSOR
  misc_feature (1)..(577): Homolog of NCBI NO: 99676 NR Description: chaperonin hsp60 precursor - Arabidopsis thaliana
  misc_feature (1)..(577): Homolog of NCBI NO: 15229559 NR Description: mitochondrial chaperonin hsp60
MYRFASNLASKARIAQNARQVSSRMSWSRNYAAKEIKFGVEARALMLKGVEDLADAVKVTMGPKGRNVVIEQSWGAPKVTKDGVTVAKSIEFKDKIKNVGASLVKQVANATNDVAGDGTTCATVLTRAIFAEGCKSVAAGMNAMDLRRGISMAVDAVVTNLKSKARMISTSEEIAQVGTISANGEREIGELIAKAMEKVGKEGVITIQDGKTLFNELEVVEGMKLDRGYTSPYFITNQKTQKCELDDPLILIHEKKISSINSIVKVLELALKRQRPLLIVSEDVESDALATLILNKLRAGIKVCAIKAPGFGENRKANLQDLAALTGGEVITDELGMNLEKVDLSMLGTCKKVTVSKDDTVILDGAGDKKGIEERCEQIRSAIELSTSDYDKEKLQERLAKLSGGVAVLKIGGASEAEVGEKKDRVTDALNATKAAVEEGILPGGGVALLYAARELEKLPTANFDQKIGVQIIQNALKTPVYTIASNAGVEGAVIVGKLLEQDNPDLGYDAAKGEYVDMVKAGIIDPLKVIRTALVDAASVSSLLTTTEAVVVDLPKDESESGAAGAGMGGMGGMDY

SEQ ID NO: 35298 - protein, 553 aa, Arabidopsis thaliana
  peptide (1)..(553): Ceres Seq. ID no. 12488414
  misc_feature (29)..(532): Pfam Name: TCP-1/cpn60 chaperonin family Pfam Description: TCP-1/cpn60 chaperonin family
  misc_feature (1)..(551): Homolog of NCBI NO: 4099014 NR Description: heat-shock protein [Coccidioides immitis]
  misc_feature (1)..(553): Homolog of NCBI NO: 2493646 NR Description: CHAPERONIN CPN60-2, MITOCHONDRIAL PRECURSOR
  misc_feature (1)..(553): Homolog of NCBI NO: 309557 NR Description: chaperonin 60
  misc_feature (1)..(553): Homolog of NCBI NO: 2506275 NR Description: CHAPERONIN CPN60-1, MITOCHONDRIAL PRECURSOR
  misc_feature (1)..(553): Homolog of NCBI NO: 283035 NR Description: chaperonin hsp60 - maize
  misc_feature (1)..(553): Homolog of NCBI NO: 37535140 NR Description: mitochondrial chaperonin-60
  misc_feature (1)..(553): Homolog of NCBI NO: 461735 NR Description: CHAPERONIN CPN60-1, MITOCHONDRIAL PRECURSOR
  misc_feature (1)..(553): Homolog of NCBI NO: 461736 NR Description: CHAPERONIN CPN60-2, MITOCHONDRIAL PRECURSOR
  misc_feature (1)..(553): Homolog of NCBI NO: 99676 NR Description: chaperonin hsp60 precursor - Arabidopsis thaliana
  misc_feature (1)..(553): Homolog of NCBI NO: 15229559 NR Description: mitochondrial chaperonin hsp60
MSWSRNYAAKEIKFGVEARALMLKGVEDLADAVKVTMGPKGRNVVIEQSWGAPKVTKDGVTVAKSIEFKDKIKNVGASLVKQVANATNDVAGDGTTCATVLTRAIFAEGCKSVAAGMNAMDLRRGISMAVDAVVTNLKSKARMISTSEEIAQVGTISANGEREIGELIAKAMEKVGKEGVITIQDGKTLFNELEVVEGMKLDRGYTSPYFITNQKTQKCELDDPLILIHEKKISSINSIVKVLELALKRQRPLLIVSEDVESDALATLILNKLRAGIKVCAIKAPGFGENRKANLQDLAALTGGEVITDELGMNLEKVDLSMLGTCKKVTVSKDDTVILDGAGDKKGIEERCEQIRSAIELSTSDYDKEKLQERLAKLSGGVAVLKIGGASEAEVGEKKDRVTDALNATKAAVEEGILPGGGVALLYAARELEKLPTANFDQKIGVQIIQNALKTPVYTIASNAGVEGAVIVGKLLEQDNPDLGYDAAKGEYVDMVKAGIIDPLKVIRTALVDAASVSSLLTTTEAVVVDLPKDESESGAAGAGMGGMGGMDY

SEQ ID NO: 35299 - protein, 532 aa, Arabidopsis thaliana
  peptide (1)..(532): Ceres Seq. ID no. 12488415
  misc_feature (8)..(511): Pfam Name: TCP-1/cpn60 chaperonin family Pfam Description: TCP-1/cpn60 chaperonin family
  misc_feature (1)..(530): Homolog of NCBI NO: 4099014 NR Description: heat-shock protein [Coccidioides immitis]
  misc_feature (1)..(532): Homolog of NCBI NO: 2493646 NR Description: CHAPERONIN CPN60-2, MITOCHONDRIAL PRECURSOR
  misc_feature (1)..(532): Homolog of NCBI NO: 309557 NR Description: chaperonin 60
  misc_feature (1)..(532): Homolog of NCBI NO: 2506275 NR Description: CHAPERONIN CPN60-1, MITOCHONDRIAL PRECURSOR
  misc_feature (1)..(532): Homolog of NCBI NO: 283035 NR Description: chaperonin hsp60 - maize
  misc_feature (1)..(532): Homolog of NCBI NO: 37535140 NR Description: mitochondrial chaperonin-60
  misc_feature (1)..(532): Homolog of NCBI NO: 461735 NR Description: CHAPERONIN CPN60-1, MITOCHONDRIAL PRECURSOR
  misc_feature (1)..(532): Homolog of NCBI NO: 461736 NR Description: CHAPERONIN CPN60-2, MITOCHONDRIAL PRECURSOR
  misc_feature (1)..(532): Homolog of NCBI NO: 99676 NR Description: chaperonin hsp60 precursor - Arabidopsis thaliana
  misc_feature (1)..(532): Homolog of NCBI NO: 15229559 NR Description: mitochondrial chaperonin hsp60
MLKGVEDLADAVKVTMGPKGRNVVIEQSWGAPKVTKDGVTVAKSIEFKDKIKNVGASLVKQVANATNDVAGDGTTCATVLTRAIFAEGCKSVAAGMNAMDLRRGISMAVDAVVTNLKSKARMISTSEEIAQVGTISANGEREIGELIAKAMEKVGKEGVITIQDGKTLFNELEVVEGMKLDRGYTSPYFITNQKTQKCELDDPLILIHEKKISSINSIVKVLELALKRQRPLLIVSEDVESDALATLILNKLRAGIKVCAIKAPGFGENRKANLQDLAALTGGEVITDELGMNLEKVDLSMLGTCKKVTVSKDDTVILDGAGDKKGIEERCEQIRSAIELSTSDYDKEKLQERLAKLSGGVAVLKIGGASEAEVGEKKDRVTDALNATKAAVEEGILPGGGVALLYAARELEKLPTANFDQKIGVQIIQNALKTPVYTIASNAGVEGAVIVGKLLEQDNPDLGYDAAKGEYVDMVKAGIIDPLKVIRTALVDAASVSSLLTTTEAVVVDLPKDESESGAAGAGMGGMGGMDY

SEQ ID NO: 35300 - DNA, 1784 bp, Arabidopsis thaliana
  misc_feature (1)..(1784): Ceres Seq. ID no. 12738915
  misc_feature: MA Experiment ID: 108434 Result: Down-regulated in Transcription
  misc_feature: MA Experiment 108434 PARAMETER Experiment Name: At_Root_Tips_cDNA_P Parameter: Tissue Value: Root Tips
  misc_feature: MA Experiment ID: 108461 Result: Down-regulated in Transcription
  misc_feature: MA Experiment 108461 PARAMETER Experiment Name: At_Germinating_Seeds_cDNA_P Parameter: Age (day) Value: 1 vs. 0
  misc_feature: MA Experiment 108461 PARAMETER Experiment Name: At_Germinating_Seeds_cDNA_P Parameter: Tissue Value: Germinating Seeds
  misc_feature: MA Experiment ID: 108464 Result: Up-regulated in Transcription
  misc_feature: MA Experiment 108464 PARAMETER Experiment Name: At_Germinating_Seeds_cDNA_P Parameter: Age (day) Value: 4 vs. 0
  misc_feature: MA Experiment 108464 PARAMETER Experiment Name: At_Germinating_Seeds_cDNA_P Parameter: Tissue Value: Germinating Seeds
  misc_feature: MA Experiment ID: 108572 Result: Down-regulated in Transcription
  misc_feature: MA Experiment 108572 PARAMETER Experiment Name: At_Drought_cDNA_P Parameter: Timepoint (hr) Value: 1
  misc_feature: MA Experiment 108572 PARAMETER Experiment Name: At_Drought_cDNA_P Parameter: Tissue Value: Aerial
  misc_feature: MA Experiment 108572 PARAMETER Experiment Name: At_Drought_cDNA_P Parameter: Treatment Value: Drought vs. No Drought
  misc_feature: MA Experiment ID: 108573 Result: Down-regulated in Transcription
  misc_feature: MA Experiment 108573 PARAMETER Experiment Name: At_Drought_cDNA_P Parameter: Timepoint (hr) Value: 6
  misc_feature: MA Experiment 108573 PARAMETER Experiment Name: At_Drought_cDNA_P Parameter: Tissue Value: Aerial
  misc_feature: MA Experiment 108573 PARAMETER Experiment Name: At_Drought_cDNA_P Parameter: Treatment Value: Drought vs. No Drought
  misc_feature: MA Experiment ID: 108576 Result: Down-regulated in Transcription
  misc_feature: MA Experiment 108576 PARAMETER Experiment Name: At_42deg_Heat_cDNA_P Parameter: Temperature (deg C) Value: 42 vs. 22
  misc_feature: MA Experiment 108576 PARAMETER Experiment Name: At_42deg_Heat_cDNA_P Parameter: Timepoint (hr) Value: 1
  misc_feature: MA Experiment 108576 PARAMETER Experiment Name: At_42deg_Heat_cDNA_P Parameter: Tissue Value: Aerial
  misc_feature: MA Experiment ID: 108577 Result: Down-regulated in Transcription
  misc_feature: MA Experiment 108577 PARAMETER Experiment Name: At_42deg_Heat_cDNA_P Parameter: Temperature (deg C) Value: 42 vs. 22
  misc_feature: MA Experiment 108577 PARAMETER Experiment Name: At_42deg_Heat_cDNA_P Parameter: Timepoint (hr) Value: 6
  misc_feature: MA Experiment 108577 PARAMETER Experiment Name: At_42deg_Heat_cDNA_P Parameter: Tissue Value: Aerial
  misc_feature: MA Experiment ID: 108585 Result: Up-regulated in Transcription
  misc_feature: MA Experiment 108585 PARAMETER Experiment Name: At_5mM_NaNP_cDNA_P Parameter: Timepoint (hr) Value: 6
  misc_feature: MA Experiment 108585 PARAMETER Experiment Name: At_5mM_NaNP_cDNA_P Parameter: Tissue Value: Aerial
  misc_feature: MA Experiment 108585 PARAMETER Experiment Name: At_5mM_NaNP_cDNA_P Parameter: Treatment Value: null
  misc_feature: MA Experiment ID: 108595 Result: Down-regulated in Transcription
  misc_feature: MA Experiment 108595 PARAMETER Experiment Name: At_Ler-pi_Ovule_cDNA_P Parameter: Plant Line Value: null
  misc_feature: MA Experiment ID: 108607 Result: Down-regulated in Transcription
  misc_feature: MA Experiment 108607 PARAMETER Experiment Name: At_100uM_ABA_cDNA_P Parameter: Timepoint (hr) Value: 4
  misc_feature: MA Experiment 108607 PARAMETER Experiment Name: At_100uM_ABA_cDNA_P Parameter: Tissue Value: Aerial
  misc_feature: MA Experiment 108607 PARAMETER Experiment Name: At_100uM_ABA_cDNA_P Parameter: Treatment Value: 100uM ABA vs. No Treatment
  misc_feature: MA Experiment ID: 108608 Result: Down-regulated in Transcription
  misc_feature: MA Experiment 108608 PARAMETER Experiment Name: At_100uM_ABA_cDNA_P Parameter: Timepoint (hr) Value: 1
  misc_feature: MA Experiment 108608 PARAMETER Experiment Name: At_100uM_ABA_cDNA_P Parameter: Tissue Value: Aerial
  misc_feature: MA Experiment 108608 PARAMETER Experiment Name: At_100uM_ABA_cDNA_P Parameter: Treatment Value: 100uM ABA vs. No Treatment
  misc_feature: MA Experiment ID: 108668 Result: Down-regulated in Transcription
  misc_feature: MA Experiment 108668 PARAMETER Experiment Name: At_2mM_SA_cDNA_P Parameter: Plant Line Value: WS
  misc_feature: MA Experiment 108668 PARAMETER Experiment Name: At_2mM_SA_cDNA_P Parameter: Timepoint (hr) Value: 6
  misc_feature: MA Experiment 108668 PARAMETER Experiment Name: At_2mM_SA_cDNA_P Parameter: Treatment Value: 2mM SA vs. No Treatment
  misc_feature: MA Experiment ID: 20000112 Result: Down-regulated in Transcription
  misc_feature: MA Experiment 20000112 PARAMETER Experiment Name: At_42deg_Heat_cDNA_P Parameter: Temperature (deg C) Value: 42 vs. 22
  misc_feature: MA Experiment 20000112 PARAMETER Experiment Name: At_42deg_Heat_cDNA_P Parameter: Timepoint (hr) Value: 2
  misc_feature: MA Experiment 20000112 PARAMETER Experiment Name: At_42deg_Heat_cDNA_P Parameter: Tissue Value: Aerial
  misc_feature: MA Experiment ID: 20000113 Result: Down-regulated in Transcription
  misc_feature: MA Experiment 20000113 PARAMETER Experiment Name: At_42deg_Heat_cDNA_P Parameter: Temperature (deg C) Value: 42 vs. 22
  misc_feature: MA Experiment 20000113 PARAMETER Experiment Name: At_42deg_Heat_cDNA_P Parameter: Timepoint (hr) Value: 8
  misc_feature: MA Experiment 20000113 PARAMETER Experiment Name: At_42deg_Heat_cDNA_P Parameter: Tissue Value: Aerial
  misc_feature: MA Experiment ID: 20000144 Result: Down-regulated in Transcription
  misc_feature: MA Experiment 20000144 PARAMETER Experiment Name: At_42deg_Heat_cDNA_P Parameter: Temperature (deg C) Value: 42 vs. 22
  misc_feature: MA Experiment 20000144 PARAMETER Experiment Name: At_42deg_Heat_cDNA_P Parameter: Timepoint (hr) Value: 1
  misc_feature: MA Experiment 20000144 PARAMETER Experiment Name: At_42deg_Heat_cDNA_P Parameter: Tissue Value: Aerial
  misc_feature: MA Experiment ID: 20000166 Result: Down-regulated in Transcription
  misc_feature: MA Experiment 20000166 PARAMETER Experiment Name: At_100uM_ABA_P Parameter: Age (day) Value: 14
  misc_feature: MA Experiment 20000166 PARAMETER Experiment Name: At_100uM_ABA_P Parameter: Organism Value: A. thaliana
  misc_feature: MA Experiment 20000166 PARAMETER Experiment Name: At_100uM_ABA_P Parameter: Plant Line Value: WS
  misc_feature: MA Experiment 20000166 PARAMETER Experiment Name: At_100uM_ABA_P Parameter: Timepoint (hr) Value: 1
  misc_feature: MA Experiment 20000166 PARAMETER Experiment Name: At_100uM_ABA_P Parameter: Tissue Value: Aerial
  misc_feature: MA Experiment 20000166 PARAMETER Experiment Name: At_100uM_ABA_P Parameter: Treatment Value: 100uM ABA vs. No Treatment
  misc_feature: MA Experiment ID: 20000171 Result: Down-regulated in Transcription
  misc_feature: MA Experiment 20000171 PARAMETER Experiment Name: At_42deg_Heat_P Parameter: Age (day) Value: 14
  misc_feature: MA Experiment 20000171 PARAMETER Experiment Name: At_42deg_Heat_P Parameter: Organism Value: A. thaliana
  misc_feature: MA Experiment 20000171 PARAMETER Experiment Name: At_42deg_Heat_P Parameter: Plant Line Value: WS
  misc_feature: MA Experiment 20000171 PARAMETER Experiment Name: At_42deg_Heat_P Parameter: Temperature (deg C) Value: 42 vs. 22
  misc_feature: MA Experiment 20000171 PARAMETER Experiment Name: At_42deg_Heat_P Parameter: Timepoint (hr) Value: 1
  misc_feature: MA Experiment 20000171 PARAMETER Experiment Name: At_42deg_Heat_P Parameter: Tissue Value: Aerial
  misc_feature: MA Experiment ID: 20000173 Result: Down-regulated in Transcription
  misc_feature: MA Experiment 20000173 PARAMETER Experiment Name: At_42deg_Heat_P Parameter: Age (day) Value: 14
  misc_feature: MA Experiment 20000173 PARAMETER Experiment Name: At_42deg_Heat_P Parameter: Organism Value: A. thaliana
  misc_feature: MA Experiment 20000173 PARAMETER Experiment Name: At_42deg_Heat_P Parameter: Plant Line Value: WS
  misc_feature: MA Experiment 20000173 PARAMETER Experiment Name: At_42deg_Heat_P Parameter: Temperature (deg C) Value: 42 vs. 22
  misc_feature: MA Experiment 20000173 PARAMETER Experiment Name: At_42deg_Heat_P Parameter: Timepoint (hr) Value: 6
  misc_feature: MA Experiment 20000173 PARAMETER Experiment Name: At_42deg_Heat_P Parameter: Tissue Value: Aerial
  misc_feature: MA Experiment ID: 20000179 Result: Down-regulated in Transcription
  misc_feature: MA Experiment 20000179 PARAMETER Experiment Name: At_Germinating_Seeds_P Parameter: Age (hr) Value: 6 vs. 0
  misc_feature: MA Experiment 20000179 PARAMETER Experiment Name: At_Germinating_Seeds_P Parameter: Tissue Value: Germinating Seeds
  misc_feature: MA Experiment ID: 20000180 Result: Down-regulated in Transcription
  misc_feature: MA Experiment 20000180 PARAMETER Experiment Name: At_Germinating_Seeds_P Parameter: Age (hr) Value: 24 vs. 0
  misc_feature: MA Experiment 20000180 PARAMETER Experiment Name: At_Germinating_Seeds_P Parameter: Tissue Value: Germinating Seeds
  misc_feature: MA Experiment ID: 20000185 Result: Down-regulated in Transcription
  misc_feature: MA Experiment 20000185 PARAMETER Experiment Name: At_Roots__P Parameter: Age (day) Value: 7 vs. 21
  misc_feature: MA Experiment 20000185 PARAMETER Experiment Name: At_Roots__P Parameter: Organism Value: A. thaliana
  misc_feature: MA Experiment 20000185 PARAMETER Experiment Name: At_Roots__P Parameter: Tissue Value: Roots vs. Whole Plant
  misc_feature: MA Experiment ID: 20000234 Result: Down-regulated in Transcription
  misc_feature: MA Experiment 20000234 PARAMETER Experiment Name: At_Siliques_P Parameter: Age (day) Value: 21
  misc_feature: MA Experiment 20000234 PARAMETER Experiment Name: At_Siliques_P Parameter: Organism Value: A. thaliana
  misc_feature: MA Experiment 20000234 PARAMETER Experiment Name: At_Siliques_P Parameter: Plant Line Value: WS
  misc_feature: MA Experiment 20000234 PARAMETER Experiment Name: At_Siliques_P Parameter: Tissue Value: Less Than 5mm Siliques vs. Whole Plant
  misc_feature: MA Experiment ID: 20000264 Result: Down-regulated in Transcription
  misc_feature: MA Experiment 20000264 PARAMETER Experiment Name: At_Open_Flower_P Parameter: Age (day) Value: 21
  misc_feature: MA Experiment 20000264 PARAMETER Experiment Name: At_Open_Flower_P Parameter: Plant Line Value: WS
  misc_feature: MA Experiment 20000264 PARAMETER Experiment Name: At_Open_Flower_P Parameter: Tissue Value: Open Flower vs. Whole Plant
  misc_feature: MA Experiment ID: 20000265 Result: Down-regulated in Transcription
  misc_feature: MA Experiment 20000265 PARAMETER Experiment Name: At_Open_Flower_P Parameter: Age (day) Value: 21
  misc_feature: MA Experiment 20000265 PARAMETER Experiment Name: At_Open_Flower_P Parameter: Plant Line Value: WS
  misc_feature: MA Experiment 20000265 PARAMETER Experiment Name: At_Open_Flower_P Parameter: Tissue Value: Closed Flower vs. Whole Plant
  misc_feature: MA Experiment ID: 20000268 Result: Down-regulated in Transcription
  misc_feature: MA Experiment 20000268 PARAMETER Experiment Name: At_100mM_NaCl__P Parameter: Age (day) Value: 14
  misc_feature: MA Experiment 20000268 PARAMETER Experiment Name: At_100mM_NaCl__P Parameter: Organism Value: A. thaliana
  misc_feature: MA Experiment 20000268 PARAMETER Experiment Name: At_100mM_NaCl__P Parameter: Plant Line Value: WS
  misc_feature: MA Experiment 20000268 PARAMETER Experiment Name: At_100mM_NaCl__P Parameter: Timepoint (hr) Value: 6
  misc_feature: MA Experiment 20000268 PARAMETER Experiment Name: At_100mM_NaCl__P Parameter: Tissue Value: Whole Plant
  misc_feature: MA Experiment 20000268 PARAMETER Experiment Name: At_100mM_NaCl__P Parameter: Treatment Value: 100mM NaCl vs. No Treatment
  misc_feature: MA Experiment ID: 20000286 Result: Down-regulated in Transcription
  misc_feature: MA Experiment 20000286 PARAMETER Experiment Name: At_Open_Flower_P Parameter: Age (day) Value: 21
  misc_feature: MA Experiment 20000286 PARAMETER Experiment Name: At_Open_Flower_P Parameter: Plant Line Value: WS
  misc_feature: MA Experiment 20000286 PARAMETER Experiment Name: At_Open_Flower_P Parameter: Tissue Value: Half Open vs. Whole Plant
  misc_feature: MA Experiment ID: 20000437 Result: Down-regulated in Transcription
  misc_feature: MA Experiment 20000437 PARAMETER Experiment Name: At_Drought_P Parameter: Age (day) Value: 8
  misc_feature: MA Experiment 20000437 PARAMETER Experiment Name: At_Drought_P Parameter: Organism Value: A. thaliana
  misc_feature: MA Experiment 20000437 PARAMETER Experiment Name: At_Drought_P Parameter: Plant Line Value: WS
  misc_feature: MA Experiment 20000437 PARAMETER Experiment Name: At_Drought_P Parameter: Timepoint (hr) Value: 24
  misc_feature: MA Experiment 20000437 PARAMETER Experiment Name: At_Drought_P Parameter: Tissue Value: Whole Plant
  misc_feature: MA Experiment 20000437 PARAMETER Experiment Name: At_Drought_P Parameter: Treatment Value: Drought vs. No Drought
  misc_feature: MA Experiment ID: 20000439 Result: Down-regulated in Transcription
  misc_feature: MA Experiment 20000439 PARAMETER Experiment Name: At_Roots__P Parameter: Age (day) Value: 14 vs. 21
  misc_feature: MA Experiment 20000439 PARAMETER Experiment Name: At_Roots__P Parameter: Organism Value: A. thaliana
  misc_feature: MA Experiment 20000439 PARAMETER Experiment Name: At_Roots__P Parameter: Tissue Value: Roots vs. Whole Plant
  misc_feature: MA Experiment ID: 20000441 Result: Up-regulated in Transcription
  misc_feature: MA Experiment 20000441 PARAMETER Experiment Name: At_1uM_BR-BRZ__P Parameter: Tissue Value: Shoot Apices
  misc_feature: MA Experiment 20000441 PARAMETER Experiment Name: At_1uM_BR-BRZ__P Parameter: Treatment Value: 1uM BR vs. No Treatment
  misc_feature: MA Experiment ID: 20000443 Result: Up-regulated in Transcription
  misc_feature: MA Experiment 20000443 PARAMETER Experiment Name: At_1uM_BR-BRZ__P Parameter: Tissue Value: Shoot Apices
  misc_feature: MA Experiment 20000443 PARAMETER Experiment Name: At_1uM_BR-BRZ__P Parameter: Treatment Value: 1uM BRZ vs. No Treatment
  misc_feature: MA Experiment ID: 20000573 Result: Down-regulated in Transcription
  misc_feature: MA Experiment 20000573 PARAMETER Experiment Name: At_100uM_ABA_Mutants__P Parameter: Organism Value: A. thaliana
  misc_feature: MA Experiment 20000573 PARAMETER Experiment Name: At_100uM_ABA_Mutants__P Parameter: Plant Line Value: CS22 vs. Ler wt
  misc_feature: MA Experiment 20000573 PARAMETER Experiment Name: At_100uM_ABA_Mutants__P Parameter: Timepoint (hr) Value: N/A
  misc_feature: MA Experiment 20000573 PARAMETER Experiment Name: At_100uM_ABA_Mutants__P Parameter: Tissue Value: Whole Plant
  misc_feature: MA Experiment 20000573 PARAMETER Experiment Name: At_100uM_ABA_Mutants__P Parameter: Treatment Value: None
  misc_feature: MA Experiment ID: 20000794 Result: Down-regulated in Transcription
  misc_feature: MA Experiment 20000794 PARAMETER Experiment Name: At_Petals_P Parameter: Age (day) Value: 23-25 days
  misc_feature: MA Experiment 20000794 PARAMETER Experiment Name: At_Petals_P Parameter: Plant Line Value: WS
  misc_feature: MA Experiment 20000794 PARAMETER Experiment Name: At_Petals_P Parameter: Tissue Value: Petals vs. Whole plant
  misc_feature: MA Experiment ID: 20001248 Result: Down-regulated in Transcription
  misc_feature: MA Experiment 20001248 PARAMETER Experiment Name: At_Far-red-induction_P Parameter: Age (day) Value: 7
  misc_feature: MA Experiment 20001248 PARAMETER Experiment Name: At_Far-red-induction_P Parameter: Light Value: Far-red vs. White
  misc_feature: MA Experiment 20001248 PARAMETER Experiment Name: At_Far-red-induction_P Parameter: Organism Value: A. thaliana
  misc_feature: MA Experiment 20001248 PARAMETER Experiment Name: At_Far-red-induction_P Parameter: Plant Line Value: Columbia
  misc_feature: MA Experiment 20001248 PARAMETER Experiment Name: At_Far-red-induction_P Parameter: Timepoint (hr) Value: 4
  misc_feature: MA Experiment 20001248 PARAMETER Experiment Name: At_Far-red-induction_P Parameter: Tissue Value: Whole Plant
  misc_feature: MA Experiment ID: 20001450 Result: Down-regulated in Transcription
  misc_feature: MA Experiment 20001450 PARAMETER Experiment Name: At_Far-red-induction_P Parameter: Age (day) Value: 7
  misc_feature: MA Experiment 20001450 PARAMETER Experiment Name: At_Far-red-induction_P Parameter: Light Value: Far-red vs. White
  misc_feature: MA Experiment 20001450 PARAMETER Experiment Name: At_Far-red-induction_P Parameter: Organism Value: A. thaliana
  misc_feature: MA Experiment 20001450 PARAMETER Experiment Name: At_Far-red-induction_P Parameter: Plant Line Value: Columbia
  misc_feature: MA Experiment 20001450 PARAMETER Experiment Name: At_Far-red-induction_P Parameter: Timepoint (hr) Value: 8
  misc_feature: MA Experiment 20001450 PARAMETER Experiment Name: At_Far-red-induction_P Parameter: Tissue Value: Whole Plant
  misc_feature: MA Experiment ID: 20001451 Result: Down-regulated in Transcription
  misc_feature: MA Experiment 20001451 PARAMETER Experiment Name: At_Far-red-induction_P Parameter: Age (day) Value: 7
  misc_feature: MA Experiment 20001451 PARAMETER Experiment Name: At_Far-red-induction_P Parameter: Light Value: Far-red vs. White
  misc_feature: MA Experiment 20001451 PARAMETER Experiment Name: At_Far-red-induction_P Parameter: Organism Value: A. thaliana
  misc_feature: MA Experiment 20001451 PARAMETER Experiment Name: At_Far-red-induction_P Parameter: Plant Line Value: Columbia
  misc_feature: MA Experiment 20001451 PARAMETER Experiment Name: At_Far-red-induction_P Parameter: Timepoint (hr) Value: 24
  misc_feature: MA Experiment 20001451 PARAMETER Experiment Name: At_Far-red-induction_P Parameter: Tissue Value: Whole Plant
  misc_feature: MA Experiment ID: 20001560 Result: Down-regulated in Transcription
  misc_feature: MA Experiment 20001560 PARAMETER Experiment Name: At_Drought_Soil_Dry_P Parameter: Age (day) Value: 28
  misc_feature: MA Experiment 20001560 PARAMETER Experiment Name: At_Drought_Soil_Dry_P Parameter: Organism Value: A. thaliana
  misc_feature: MA Experiment 20001560 PARAMETER Experiment Name: At_Drought_Soil_Dry_P Parameter: Plant Line Value: WS
  misc_feature: MA Experiment 20001560 PARAMETER Experiment Name: At_Drought_Soil_Dry_P Parameter: Post Timepoint (hr) Value: None
  misc_feature: MA Experiment 20001560 PARAMETER Experiment Name: At_Drought_Soil_Dry_P Parameter: Post-Treatment Value: None
  misc_feature: MA Experiment 20001560 PARAMETER Experiment Name: At_Drought_Soil_Dry_P Parameter: Timepoint (day) Value: 14
  misc_feature: MA Experiment 20001560 PARAMETER Experiment Name: At_Drought_Soil_Dry_P Parameter: Treatment Value: Drought vs. No Drought
accacacaacacaaaacctccaaaccaataatcagaacacagtgagatatttctctctgaagccaaagatggaaacggcgtcttctaatttctctctctcgcagatcctcaatattgaggaaccctacagctccgtgatgctcggtgtcgccgctctcttggccgttgtttgctatttctggatacaggggaagtccaaatccaagaacggaccaccgttgcctccgggaccttggccacttccgatcgtcggcaacctcccgttcctaaactctgacgtcctccacacgcaattccaagccctaaccctaaaacatggccctctcatgaagatccacctcggttccaaacttgcgatcgtcgtctcttcccctgacatggctcgcgaggttctcaagactcatgacatcactttcgccaaccacgatctacccgaagttggaaagatcaacacttacggtggagaagacatcctctggtctccttacggtactcattggaggagacttcgtaagctctgcgtcatgaagatgttcactaccccaactctcgaagcttcctactccactcgccgggaagaaacccgacaaaccatcgtccacatgtcggaaatggctcatgaaggatcaccagtcaacctcggagagcaaatctttctttccattttcaacgtcgtgacaagaatgatgtggggtgcgactgttgaaggagacgagagaacaagcttaggaaacgagctcaaaaccctaatctctgatatctccgacatataagggattcaaaactattcagatttctttccattgttctcaagattcgatttccaaggattggttaagcagatgaaaggccatgtgaagaagctcgatctcttgttcgatagagttatggagagtcatgtcaaaatggtgggaaagaagagcgaagaagaagaagatttcttacaatacttgcttagagttaaggacgatgatgagaaagctcctctgtccatgactcatgtcaagtctctcctcatggatatggttcttggtggtgtcgacacatcggttaacgcatccgaattcgctatggcagagattgtgagcagaccggaagtgttaaacaagatccgacaagaacttgaccaagttgttggcaaagacaacatcgttgaggaatcacatttacctaagcttccttacctacaagcggttatgaaagagactcttaggcttcaccctacgcttcctcttcttgttcctcacagaaacagcgaaacctcggtggttgcgggatacactgtgcctaaagactccaagattttcatcaacgtttgggcgattcatagagatcctaaaaattgggatgaaccaaacgaattcaaacctgagaggtttttggagaactcgcttgatttcaatggaggtgattttaagtacttgccttttgggtcaggaaggaggatttgtgcggcgataaacatggctgagagacttgttctgttcaacattgcttcacttcttcactcttttgattggaaagctcctcaaggacagaagtttgaggttgaagagaagtttggtcttgttcttaagttgaagtctccacttgtggctattcctgttccaaggttgtccgatccaaaactctatacagcttaagtaagtaagaaggaaatttggtttgagcttatgagaggaagttgaattgagttttcttgtttaaagtttatttttctttattcgtgtttggattttgatgctttgtaaaaaaagatgtgtaagttaaatttaattttgatt

SEQ ID NO: 35301 - protein, 266 aa, Arabidopsis thaliana
  peptide (1)..(266): Ceres Seq. ID no. 12738916
  misc_feature (1)..(225): Homolog of NCBI NO: 16226350 NR Description: AT5g44620/K15C23_6 [Arabidopsis thaliana]
  misc_feature (1)..(264): Homolog of NCBI NO: 15234517 NR Description: cytochrome p450, putative; protein id:
  misc_feature (1)..(264): Homolog of NCBI NO: 15234514 NR Description: cytochrome p450 family; protein id: At4g12300.1
  misc_feature (1)..(264): Homolog of NCBI NO: 15234521 NR Description: cytochrome p450 family
  misc_feature (1)..(264): Homolog of NCBI NO: 11345411 NR Description: putative cytochrome P450 [Matthiola incana]
  misc_feature (1)..(264): Homolog of NCBI NO: 15241541 NR Description: cytochrome p450 family
  misc_feature (1)..(266): Homolog of NCBI NO: 15235775 NR Description: cytochrome p450 family; protein id: At4g22710.1
  misc_feature (1)..(266): Homolog of NCBI NO: 15810341 NR Description: putative cytochrome P450 protein [Arabidopsis
  misc_feature (1)..(266): Homolog of NCBI NO: 7430667 NR Description: cytochrome P450 homolog T12H17.80 - Arabidopsis
  misc_feature (1)..(266): Homolog of NCBI NO: 30685891 NR Description: cytochrome P450 family [Arabidopsis thaliana]
MKGHVKKLDLLFDRVMESHVKMVGKKSEEEEDFLQYLLRVKDDDEKAPLSMTHVKSLLMDMVLGGVDTSVNASEFAMAEIVSRPEVLNKIRQELDQVVGKDNIVEESHLPKLPYLQAVMKETLRLHPTLPLLVPHRNSETSVVAGYTVPKDSKIFINVWAIHRDPKNWDEPNEFKPERFLENSLDFNGGDFKYLPFGSGRRICAAINMAERLVLFNIASLLHSFDWKAPQGQKFEVEEKFGLVLKLKSPLVAIPVPRLSDPKLYTA

SEQ ID NO: 35302 - protein, 256 aa, Arabidopsis thaliana
  peptide (1)..(256): Ceres Seq. ID no. 12738917
  misc_feature (52)..(256): Homolog of NCBI NO: 16226350 NR Description: AT5g44620/K15C23_6 [Arabidopsis thaliana]
  misc_feature (41)..(256): Homolog of NCBI NO: 15234517 NR Description: cytochrome p450, putative; protein id:
  misc_feature (28)..(256): Homolog of NCBI NO: 15234514 NR Description: cytochrome p450 family; protein id: At4g12300.1
  misc_feature (30)..(256): Homolog of NCBI NO: 15234521 NR Description: cytochrome p450 family
  misc_feature (49)..(256): Homolog of NCBI NO: 11345411 NR Description: putative cytochrome P450 [Matthiola incana]
  misc_feature (52)..(256): Homolog of NCBI NO: 15241541 NR Description: cytochrome p450 family
  misc_feature (23)..(256): Homolog of NCBI NO: 15235775 NR Description: cytochrome p450 family; protein id: At4g22710.1
  misc_feature (23)..(256): Homolog of NCBI NO: 15810341 NR Description: putative cytochrome P450 protein [Arabidopsis
  misc_feature (23)..(256): Homolog of NCBI NO: 7430667 NR Description: cytochrome P450 homolog T12H17.80 - Arabidopsis
  misc_feature (1)..(256): Homolog of NCBI NO: 30685891 NR Description: cytochrome P450 family [Arabidopsis thaliana]
HTTQNLQTNNQNTVRYFSLKPKMETASSNFSLSQILNIEEPYSSVMLGVAALLAVVCYFWIQGKSKSKNGPPLPPGPWPLPIVGNLPFLNSDVLHTQFQALTLKHGPLMKIHLGSKLAIVVSSPDMAREVLKTHDITFANHDLPEVGKINTYGGEDILWSPYGTHWRRLRKLCVMKMFTTPTLEASYSTRREETRQTIVHMSEMAHEGSPVNLGEQIFLSIFNVVTRMMWGATVEGDERTSLGNELKTLISDISDI

SEQ ID NO: 35303 - protein, 251 aa, Arabidopsis thaliana
  peptide (1)..(251): Ceres Seq. ID no. 12738918
  misc_feature (1)..(210): Homolog of NCBI NO: 16226350 NR Description: AT5g44620/K15C23_6 [Arabidopsis thaliana]
  misc_feature (1)..(249): Homolog of NCBI NO: 15234517 NR Description: cytochrome p450, putative; protein id:
  misc_feature (1)..(249): Homolog of NCBI NO: 15234514 NR Description: cytochrome p450 family; protein id: At4g12300.1
  misc_feature (1)..(249): Homolog of NCBI NO: 15234521 NR Description: cytochrome p450 family
  misc_feature (1)..(249): Homolog of NCBI NO: 11345411 NR Description: putative cytochrome P450 [Matthiola incana]
  misc_feature (1)..(249): Homolog of NCBI NO: 15241541 NR Description: cytochrome p450 family
  misc_feature (1)..(251): Homolog of NCBI NO: 15235775 NR Description: cytochrome p450 family; protein id: At4g22710.1
  misc_feature (1)..(251): Homolog of NCBI NO: 15810341 NR Description: putative cytochrome P450 protein [Arabidopsis
  misc_feature (1)..(251): Homolog of NCBI NO: 7430667 NR Description: cytochrome P450 homolog T12H17.80 - Arabidopsis
  misc_feature (1)..(251): Homolog of NCBI NO: 30685891 NR Description: cytochrome P450 family [Arabidopsis thaliana]
MESHVKMVGKKSEEEEDFLQYLLRVKDDDEKAPLSMTHVKSLLMDMVLGGVDTSVNASEFAMAEIVSRPEVLNKIRQELDQVVGKDNIVEESHLPKLPYLQAVMKETLRLHPTLPLLVPHRNSETSVVAGYTVPKDSKIFINVWAIHRDPKNWDEPNEFKPERFLENSLDFNGGDFKYLPFGSGRRICAAINMAERLVLFNIASLLHSFDWKAPQGQKFEVEEKFGLVLKLKSPLVAIPVPRLSDPKLYTA

SEQ ID NO: 35304 - DNA, 2663 bp, Arabidopsis thaliana
  misc_feature (1)..(2663): Ceres Seq. ID no. 13591835
  misc_feature: MA Experiment ID: 108434 Result: Up-regulated in Transcription
  misc_feature: MA Experiment 108434 PARAMETER Experiment Name: At_Root_Tips_cDNA_P Parameter: Tissue Value: Root Tips
  misc_feature: MA Experiment ID: 108462 Result: Down-regulated in Transcription
  misc_feature: MA Experiment 108462 PARAMETER Experiment Name: At_Germinating_Seeds_cDNA_P Parameter: Age (day) Value: 2 vs. 0
  misc_feature: MA Experiment 108462 PARAMETER Experiment Name: At_Germinating_Seeds_cDNA_P Parameter: Tissue Value: Germinating Seeds
  misc_feature: MA Experiment ID: 108463 Result: Down-regulated in Transcription
  misc_feature: MA Experiment 108463 PARAMETER Experiment Name: At_Germinating_Seeds_cDNA_P Parameter: Age (day) Value: 3 vs. 0
  misc_feature: MA Experiment 108463 PARAMETER Experiment Name: At_Germinating_Seeds_cDNA_P Parameter: Tissue Value: Germinating Seeds
  misc_feature: MA Experiment ID: 108464 Result: Down-regulated in Transcription
  misc_feature: MA Experiment 108464 PARAMETER Experiment Name: At_Germinating_Seeds_cDNA_P Parameter: Age (day) Value: 4 vs. 0
  misc_feature: MA Experiment 108464 PARAMETER Experiment Name: At_Germinating_Seeds_cDNA_P Parameter: Tissue Value: Germinating Seeds
  misc_feature: MA Experiment ID: 108474 Result: Up-regulated in Transcription
  misc_feature: MA Experiment 108474 PARAMETER Experiment Name: At_Drought_Flowers_cDNA_P Parameter: Timepoint (hr) Value: null
  misc_feature: MA Experiment 108474 PARAMETER Experiment Name: At_Drought_Flowers_cDNA_P Parameter: Treatment Value: Drought vs. No Drought
  misc_feature: MA Experiment ID: 108573 Result: Down-regulated in Transcription
  misc_feature: MA Experiment 108573 PARAMETER Experiment Name: At_Drought_cDNA_P Parameter: Timepoint (hr) Value: 6
  misc_feature: MA Experiment 108573 PARAMETER Experiment Name: At_Drought_cDNA_P Parameter: Tissue Value: Aerial
  misc_feature: MA Experiment 108573 PARAMETER Experiment Name: At_Drought_cDNA_P Parameter: Treatment Value: Drought vs. No Drought
  misc_feature: MA Experiment ID: 108576 Result: Up-regulated in Transcription
  misc_feature: MA Experiment 108576 PARAMETER Experiment Name: At_42deg_Heat_cDNA_P Parameter: Temperature (deg C) Value: 42 vs. 22
  misc_feature: MA Experiment 108576 PARAMETER Experiment Name: At_42deg_Heat_cDNA_P Parameter: Timepoint (hr) Value: 1
  misc_feature: MA Experiment 108576 PARAMETER Experiment Name: At_42deg_Heat_cDNA_P Parameter: Tissue Value: Aerial
  misc_feature: MA Experiment ID: 108577 Result: Up-regulated in Transcription
  misc_feature: MA Experiment 108577 PARAMETER Experiment Name: At_42deg_Heat_cDNA_P Parameter: Temperature (deg C) Value: 42 vs. 22
  misc_feature: MA Experiment 108577 PARAMETER Experiment Name: At_42deg_Heat_cDNA_P Parameter: Timepoint (hr) Value: 6
  misc_feature: MA Experiment 108577 PARAMETER Experiment Name: At_42deg_Heat_cDNA_P Parameter: Tissue Value: Aerial
  misc_feature: MA Experiment ID: 108595 Result: Down-regulated in Transcription
  misc_feature: MA Experiment 108595 PARAMETER Experiment Name: At_Ler-pi_Ovule_cDNA_P Parameter: Plant Line Value: null
  misc_feature: MA Experiment ID: 108605 Result: Down-regulated in Transcription
  misc_feature: MA Experiment 108605 PARAMETER Experiment Name: At_100uM_ABA_cDNA_P Parameter: Timepoint (hr) Value: 6
  misc_feature: MA Experiment 108605 PARAMETER Experiment Name: At_100uM_ABA_cDNA_P Parameter: Tissue Value: Aerial
  misc_feature: MA Experiment 108605 PARAMETER Experiment Name: At_100uM_ABA_cDNA_P Parameter: Treatment Value: 100uM ABA vs. No Treatment
  misc_feature: MA Experiment ID: 20000071 Result: Down-regulated in Transcription
  misc_feature: MA Experiment 20000071 PARAMETER Experiment Name: At_100uM_ABA_Mutants_cDNA_P Parameter: Plant Line Value: CS8104
  misc_feature: MA Experiment 20000071 PARAMETER Experiment Name: At_100uM_ABA_Mutants_cDNA_P Parameter: Timepoint (hr) Value: 6
  misc_feature: MA Experiment 20000071 PARAMETER Experiment Name: At_100uM_ABA_Mutants_cDNA_P Parameter: Tissue Value: Aerial
  misc_feature: MA Experiment 20000071 PARAMETER Experiment Name: At_100uM_ABA_Mutants_cDNA_P Parameter: Treatment Value: 100uM ABA vs. No Treatment
  misc_feature: MA Experiment ID: 20000072 Result: Down-regulated in Transcription
  misc_feature: MA Experiment 20000072 PARAMETER Experiment Name: At_100uM_ABA_Mutants_cDNA_P Parameter: Plant Line Value: CS8105
  misc_feature: MA Experiment 20000072 PARAMETER Experiment Name: At_100uM_ABA_Mutants_cDNA_P Parameter: Timepoint (hr) Value: 6
  misc_feature: MA Experiment 20000072 PARAMETER Experiment Name: At_100uM_ABA_Mutants_cDNA_P Parameter: Tissue Value: Aerial
  misc_feature: MA Experiment 20000072 PARAMETER Experiment Name: At_100uM_ABA_Mutants_cDNA_P Parameter: Treatment Value: 100uM ABA vs. No Treatment
  misc_feature: MA Experiment ID: 20000093 Result: Up-regulated in Transcription
  misc_feature: MA Experiment 20000093 PARAMETER Experiment Name: At_42deg_Heat_cDNA_P Parameter: Temperature (deg C) Value: 42 vs. 22
  misc_feature: MA Experiment 20000093 PARAMETER Experiment Name: At_42deg_Heat_cDNA_P Parameter: Timepoint (hr) Value: 0.5
  misc_feature: MA Experiment 20000093 PARAMETER Experiment Name: At_42deg_Heat_cDNA_P Parameter: Tissue Value: Aerial
  misc_feature: MA Experiment ID: 20000112 Result: Up-regulated in Transcription
  misc_feature: MA Experiment 20000112 PARAMETER Experiment Name: At_42deg_Heat_cDNA_P Parameter: Temperature (deg C) Value: 42 vs. 22
  misc_feature: MA Experiment 20000112 PARAMETER Experiment Name: At_42deg_Heat_cDNA_P Parameter: Timepoint (hr) Value: 2
  misc_feature: MA Experiment 20000112 PARAMETER Experiment Name: At_42deg_Heat_cDNA_P Parameter: Tissue Value: Aerial
  misc_feature: MA Experiment ID: 20000113 Result: Up-regulated in Transcription
  misc_feature: MA Experiment 20000113 PARAMETER Experiment Name: At_42deg_Heat_cDNA_P Parameter: Temperature (deg C) Value: 42 vs. 22
  misc_feature: MA Experiment 20000113 PARAMETER Experiment Name: At_42deg_Heat_cDNA_P Parameter: Timepoint (hr) Value: 8
  misc_feature: MA Experiment 20000113 PARAMETER Experiment Name: At_42deg_Heat_cDNA_P Parameter: Tissue Value: Aerial
  misc_feature: MA Experiment ID: 20000144 Result: Up-regulated in Transcription
  misc_feature: MA Experiment 20000144 PARAMETER Experiment Name: At_42deg_Heat_cDNA_P Parameter: Temperature (deg C) Value: 42 vs. 22
  misc_feature: MA Experiment 20000144 PARAMETER Experiment Name: At_42deg_Heat_cDNA_P Parameter: Timepoint (hr) Value: 1
  misc_feature: MA Experiment 20000144 PARAMETER Experiment Name: At_42deg_Heat_cDNA_P Parameter: Tissue Value: Aerial
  misc_feature: MA Experiment ID: 20000171 Result: Up-regulated in Transcription
  misc_feature: MA Experiment 20000171 PARAMETER Experiment Name: At_42deg_Heat_P Parameter: Age (day) Value: 14
  misc_feature: MA Experiment 20000171 PARAMETER Experiment Name: At_42deg_Heat_P Parameter: Organism Value: A. thaliana
  misc_feature: MA Experiment 20000171 PARAMETER Experiment Name: At_42deg_Heat_P Parameter: Plant Line Value: WS
  misc_feature: MA Experiment 20000171 PARAMETER Experiment Name: At_42deg_Heat_P Parameter: Temperature (deg C) Value: 42 vs. 22
  misc_feature: MA Experiment 20000171 PARAMETER Experiment Name: At_42deg_Heat_P Parameter: Timepoint (hr) Value: 1
  misc_feature: MA Experiment 20000171 PARAMETER Experiment Name: At_42deg_Heat_P Parameter: Tissue Value: Aerial
  misc_feature: MA Experiment ID: 20000173 Result: Up-regulated in Transcription
  misc_feature: MA Experiment 20000173 PARAMETER Experiment Name: At_42deg_Heat_P Parameter: Age (day) Value: 14
  misc_feature: MA Experiment 20000173 PARAMETER Experiment Name: At_42deg_Heat_P Parameter: Organism Value: A. thaliana
  misc_feature: MA Experiment 20000173 PARAMETER Experiment Name: At_42deg_Heat_P Parameter: Plant Line Value: WS
  misc_feature: MA Experiment 20000173 PARAMETER Experiment Name: At_42deg_Heat_P Parameter: Temperature (deg C) Value: 42 vs. 22
  misc_feature: MA Experiment 20000173 PARAMETER Experiment Name: At_42deg_Heat_P Parameter: Timepoint (hr) Value: 6
  misc_feature: MA Experiment 20000173 PARAMETER Experiment Name: At_42deg_Heat_P Parameter: Tissue Value: Aerial
  misc_feature: MA Experiment ID: 20000224 Result: Up-regulated in Transcription
  misc_feature: MA Experiment ID: 20000437 Result: Down-regulated in Transcription
  misc_feature: MA Experiment 20000437 PARAMETER Experiment Name: At_Drought_P Parameter: Age (day) Value: 8
  misc_feature: MA Experiment 20000437 PARAMETER Experiment Name: At_Drought_P Parameter: Organism Value: A. thaliana
  misc_feature: MA Experiment 20000437 PARAMETER Experiment Name: At_Drought_P Parameter: Plant Line Value: WS
  misc_feature: MA Experiment 20000437 PARAMETER Experiment Name: At_Drought_P Parameter: Timepoint (hr) Value: 24
  misc_feature: MA Experiment 20000437 PARAMETER Experiment Name: At_Drought_P Parameter: Tissue Value: Whole Plant
  misc_feature: MA Experiment 20000437 PARAMETER Experiment Name: At_Drought_P Parameter: Treatment Value: Drought vs. No Drought
  misc_feature: MA Experiment ID: 20000527 Result: Up-regulated in Transcription
  misc_feature: MA Experiment 20000527 PARAMETER Experiment Name: At_10percent_PEG_P Parameter: Age (day) Value: 20
  misc_feature: MA Experiment 20000527 PARAMETER Experiment Name: At_10percent_PEG_P Parameter: Organism Value: A. thaliana
  misc_feature: MA Experiment 20000527 PARAMETER Experiment Name: At_10percent_PEG_P Parameter: Plant Line Value: WS
  misc_feature: MA Experiment 20000527 PARAMETER Experiment Name: At_10percent_PEG_P Parameter: Timepoint (day) Value: 20
  misc_feature: MA Experiment 20000527 PARAMETER Experiment Name: At_10percent_PEG_P Parameter: Tissue Value: Whole Plant
  misc_feature: MA Experiment 20000527 PARAMETER Experiment Name: At_10percent_PEG_P Parameter: Treatment Value: 10percent PEG vs. No Treatment
  misc_feature: MA Experiment ID: 20001247 Result: Down-regulated in Transcription
  misc_feature: MA Experiment 20001247 PARAMETER Experiment Name: At_Far-red-induction_P Parameter: Age (day) Value: 7
  misc_feature: MA Experiment 20001247 PARAMETER Experiment Name: At_Far-red-induction_P Parameter: Light Value: Far-red vs. White
  misc_feature: MA Experiment 20001247 PARAMETER Experiment Name: At_Far-red-induction_P Parameter: Organism Value: A. thaliana
  misc_feature: MA Experiment 20001247 PARAMETER Experiment Name: At_Far-red-induction_P Parameter: Plant Line Value: Columbia
  misc_feature: MA Experiment 20001247 PARAMETER Experiment Name: At_Far-red-induction_P Parameter: Timepoint (hr) Value: 1
  misc_feature: MA Experiment 20001247 PARAMETER Experiment Name: At_Far-red-induction_P Parameter: Tissue Value: Whole Plant
  misc_feature: MA Experiment ID: 20001248 Result: Down-regulated in Transcription
  misc_feature: MA Experiment 20001248 PARAMETER Experiment Name: At_Far-red-induction_P Parameter: Age (day) Value: 7
  misc_feature: MA Experiment 20001248 PARAMETER Experiment Name: At_Far-red-induction_P Parameter: Light Value: Far-red vs. White
  misc_feature: MA Experiment 20001248 PARAMETER Experiment Name: At_Far-red-induction_P Parameter: Organism Value: A. thaliana
  misc_feature: MA Experiment 20001248 PARAMETER Experiment Name: At_Far-red-induction_P Parameter: Plant Line Value: Columbia
  misc_feature: MA Experiment 20001248 PARAMETER Experiment Name: At_Far-red-induction_P Parameter: Timepoint (hr) Value: 4
  misc_feature: MA Experiment 20001248 PARAMETER Experiment Name: At_Far-red-induction_P Parameter: Tissue Value: Whole Plant
  misc_feature: MA Experiment ID: 20001450 Result: Down-regulated in Transcription
  misc_feature: MA Experiment 20001450 PARAMETER Experiment Name: At_Far-red-induction_P Parameter: Age (day) Value: 7
  misc_feature: MA Experiment 20001450 PARAMETER Experiment Name: At_Far-red-induction_P Parameter: Light Value: Far-red vs. White
  misc_feature: MA Experiment 20001450 PARAMETER Experiment Name: At_Far-red-induction_P Parameter: Organism Value: A. thaliana
  misc_feature: MA Experiment 20001450 PARAMETER Experiment Name: At_Far-red-induction_P Parameter: Plant Line Value: Columbia
  misc_feature: MA Experiment 20001450 PARAMETER Experiment Name: At_Far-red-induction_P Parameter: Timepoint (hr) Value: 8
  misc_feature: MA Experiment 20001450 PARAMETER Experiment Name: At_Far-red-induction_P Parameter: Tissue Value: Whole Plant
  misc_feature: MA Experiment ID: 20001451 Result: Down-regulated in Transcription
  misc_feature: MA Experiment 20001451 PARAMETER Experiment Name: At_Far-red-induction_P Parameter: Age (day) Value: 7
  misc_feature: MA Experiment 20001451 PARAMETER Experiment Name: At_Far-red-induction_P Parameter: Light Value: Far-red vs. White
  misc_feature: MA Experiment 20001451 PARAMETER Experiment Name: At_Far-red-induction_P Parameter: Organism Value: A. thaliana
  misc_feature: MA Experiment 20001451 PARAMETER Experiment Name: At_Far-red-induction_P Parameter: Plant Line Value: Columbia
  misc_feature: MA Experiment 20001451 PARAMETER Experiment Name: At_Far-red-induction_P Parameter: Timepoint (hr) Value: 24
  misc_feature: MA Experiment 20001451 PARAMETER Experiment Name: At_Far-red-induction_P Parameter: Tissue Value: Whole Plant
  misc_feature: MA Experiment ID: 20001458 Result: Up-regulated in Transcription
  misc_feature: MA Experiment 20001458 PARAMETER Experiment Name: At_50mM_NH4NO3_L-to-H_P Parameter: Age (day) Value: Undefined
  misc_feature: MA Experiment 20001458 PARAMETER Experiment Name: At_50mM_NH4NO3_L-to-H_P Parameter: Organism Value: Undefined
  misc_feature: MA Experiment 20001458 PARAMETER Experiment Name: At_50mM_NH4NO3_L-to-H_P Parameter: Plant Line Value: Undefined
  misc_feature: MA Experiment 20001458 PARAMETER Experiment Name: At_50mM_NH4NO3_L-to-H_P Parameter: Timepoint (hr) Value: 2
  misc_feature: MA Experiment 20001458 PARAMETER Experiment Name: At_50mM_NH4NO3_L-to-H_P Parameter: Tissue Value: Siliques
  misc_feature: MA Experiment 20001458 PARAMETER Experiment Name: At_50mM_NH4NO3_L-to-H_P Parameter: Treatment Value: 50mM NH4NO3 vs. 100mM Manitol
  misc_feature: MA Experiment ID: 20001555 Result: Up-regulated in Transcription
  misc_feature: MA Experiment 20001555 PARAMETER Experiment Name: At_Drought_Soil_Dry_P Parameter: Age (day) Value: 24
  misc_feature: MA Experiment 20001555 PARAMETER Experiment Name: At_Drought_Soil_Dry_P Parameter: Organism Value: A. thaliana
  misc_feature: MA Experiment 20001555 PARAMETER Experiment Name: At_Drought_Soil_Dry_P Parameter: Plant Line Value: WS
  misc_feature: MA Experiment 20001555 PARAMETER Experiment Name: At_Drought_Soil_Dry_P Parameter: Post Timepoint (hr) Value: None
  misc_feature: MA Experiment 20001555 PARAMETER Experiment Name: At_Drought_Soil_Dry_P Parameter: Post-Treatment Value: None
  misc_feature: MA Experiment 20001555 PARAMETER Experiment Name: At_Drought_Soil_Dry_P Parameter: Timepoint (day) Value: 10
  misc_feature: MA Experiment 20001555 PARAMETER Experiment Name: At_Drought_Soil_Dry_P Parameter: Treatment Value: Drought vs. No Drought
  misc_feature: MA Experiment ID: 20001556 Result: Up-regulated in Transcription
  misc_feature: MA Experiment 20001556 PARAMETER Experiment Name: At_Drought_Soil_Dry_P Parameter: Age (day) Value: 26
  misc_feature: MA Experiment 20001556 PARAMETER Experiment Name: At_Drought_Soil_Dry_P Parameter: Organism Value: A. thaliana
  misc_feature: MA Experiment 20001556 PARAMETER Experiment Name: At_Drought_Soil_Dry_P Parameter: Plant Line Value: WS
  misc_feature: MA Experiment 20001556 PARAMETER Experiment Name: At_Drought_Soil_Dry_P Parameter: Post Timepoint (hr) Value: None
  misc_feature: MA Experiment 20001556 PARAMETER Experiment Name: At_Drought_Soil_Dry_P Parameter: Post-Treatment Value: None
  misc_feature: MA Experiment 20001556 PARAMETER Experiment Name: At_Drought_Soil_Dry_P Parameter: Timepoint (day) Value: 12
  misc_feature: MA Experiment 20001556 PARAMETER Experiment Name: At_Drought_Soil_Dry_P Parameter: Treatment Value: Drought vs. No Drought
  misc_feature: MA Experiment ID: 20001558 Result: Up-regulated in Transcription
  misc_feature: MA Experiment 20001558 PARAMETER Experiment Name: At_Drought_Soil_Dry_P Parameter: Age (day) Value: 27
  misc_feature: MA Experiment 20001558 PARAMETER Experiment Name: At_Drought_Soil_Dry_P Parameter: Organism Value: A. thaliana
  misc_feature: MA Experiment 20001558 PARAMETER Experiment Name: At_Drought_Soil_Dry_P Parameter: Plant Line Value: WS
  misc_feature: MA Experiment 20001558 PARAMETER Experiment Name: At_Drought_Soil_Dry_P Parameter: Post Timepoint (hr) Value: 6
  misc_feature: MA Experiment 20001558 PARAMETER Experiment Name: At_Drought_Soil_Dry_P Parameter: Post-Treatment Value: Re-Water vs. No Drought
  misc_feature: MA Experiment 20001558 PARAMETER Experiment Name: At_Drought_Soil_Dry_P Parameter: Timepoint (day) Value: 13
  misc_feature: MA Experiment 20001558 PARAMETER Experiment Name: At_Drought_Soil_Dry_P Parameter: Treatment Value: Drought vs. No Drought
  misc_feature: MA Experiment ID: 20001559 Result: Up-regulated in Transcription
  misc_feature: MA Experiment 20001559 PARAMETER Experiment Name: At_Drought_Soil_Dry_P Parameter: Age (day) Value: 28
  misc_feature: MA Experiment 20001559 PARAMETER Experiment Name: At_Drought_Soil_Dry_P Parameter: Organism Value: A. thaliana
  misc_feature: MA Experiment 20001559 PARAMETER Experiment Name: At_Drought_Soil_Dry_P Parameter: Plant Line Value: WS
  misc_feature: MA Experiment 20001559 PARAMETER Experiment Name: At_Drought_Soil_Dry_P Parameter: Post Timepoint (hr) Value: 29
  misc_feature: MA Experiment 20001559 PARAMETER Experiment Name: At_Drought_Soil_Dry_P Parameter: Post-Treatment Value: Re-Water vs. No Drought
  misc_feature: MA Experiment 20001559 PARAMETER Experiment Name: At_Drought_Soil_Dry_P Parameter: Timepoint (day) Value: 14
  misc_feature: MA Experiment 20001559 PARAMETER Experiment Name: At_Drought_Soil_Dry_P Parameter: Treatment Value: Drought vs. No Drought
  misc_feature: MA Experiment ID: 20001560 Result: Up-regulated in Transcription
  misc_feature: MA Experiment 20001560 PARAMETER Experiment Name: At_Drought_Soil_Dry_P Parameter: Age (day) Value: 28
  misc_feature: MA Experiment 20001560 PARAMETER Experiment Name: At_Drought_Soil_Dry_P Parameter: Organism Value: A. thaliana
  misc_feature: MA Experiment 20001560 PARAMETER Experiment Name: At_Drought_Soil_Dry_P Parameter: Plant Line Value: WS
  misc_feature: MA Experiment 20001560 PARAMETER Experiment Name: At_Drought_Soil_Dry_P Parameter: Post Timepoint (hr) Value: None
  misc_feature: MA Experiment 20001560 PARAMETER Experiment Name: At_Drought_Soil_Dry_P Parameter: Post-Treatment Value: None
  misc_feature: MA Experiment 20001560 PARAMETER Experiment Name: At_Drought_Soil_Dry_P Parameter: Timepoint (day) Value: 14
  misc_feature: MA Experiment 20001560 PARAMETER Experiment Name: At_Drought_Soil_Dry_P Parameter: Treatment Value: Drought vs. No Drought
acctctcttacctcactctccttaaacctttaatagggtttttaggttactctttgttcaactactacaaactcttttctctttagagattgagagattgtaaaaaaatctcaaatcttttccttcacaactttcaaatctaatggctcctgctttgagtagaagtctctacacatctcctttgacttcagttccaatcactcctgtctcttctcgtctctctcatctgagaagctcgtttctcccacacggcggcgctttaagaaccggcgtttcgtgtagctggaatctcgaaaagagatgtaaccgattcgccgtgaagtgtgacgccgccgtggcggagaaagagaccactgaagaagggtcaggtgagaagtttgagtaccaagctgaggttagtagattgttggatttgattgttcatagcttatacagtcacaaggaggtgtttctcagggagcttgtaagtaatgcaagtgatgctttggataagctgaggttcttgagtgtaacagagccttctttgcttggagatggtggagatcttgagattaggattaagcctgatcctgataacggcaccatcaccataactgatactggtattggaatgacaaaggaagaacttattgattgccttggaactattgctcaaagtggtacttcgaaattcttgaaggctctaaaggaaaacaaggaccttggtgctgacaacggtttgatcggacagtttggtgttgggttttactctgctttcttagttgctgagaaggttgttgtgtccaccaaaagccccaaatctgacaagcaatatgtttgggaatcggttgccgatagtagctcgtatctgatcagagaagaaacagaccctgataacattctacgtcgtggaacacaaatcaccttgtatctgagggaggatgataaatacgaatttgcggagtctacaaggatcaagaacctcgtgaagaattactctcagttcgttgggtttcctatctatacatggcaggagaaatcaaggactatagaggtcgaagaggacgaaccagttaaggaaggagaagagggtgagccaaagaaaaagaagaccactaaaactgagaagtattgggattgggaactagccaacgagaccaaaccgctatggatgcgcaattcgaaggaagtggaaaaaggagagtacaatgagttctacaaaaaggctttcaatgagttcttggatccacttgctcacacacacttcacaactgagggtgaggttgagttcaggagcattttgtacatccctgggatgggtcctcttaacaatgaagatgttacaaacccgaaaacaaagaacattcgtctctacgtgaagcgtgtgtttatctctgacgattttgatggagagcttttcccgagatatctgagctttgtgaagggagttgtggactctgatgatcttcctcttaatgtttctcgtgaaattctccaagaaagcagaattgtaagaatcatgagaaagaggctcattagaaaaacctttgacatgatacaagaaatctctgagagtgaaaacaaagaggattacaagaaattctgggagaactttggtagattccttaaattgggttgtattgaagacaccggtaaccacaagcgtatcacaccgctacttagattcttcagttccaagaatgaagaggaattgacaagcttggatgattatatcgagaacatgggagagaaccaaaaggcgatctactacctcgcaactgatagtcttaaaagtgccaagtctgcccctttcttggagaaactaatccaaaaagatatcgaggttctatatttggttgaaccaatcgatgaagttgctattcagaatttgcaaacctacaaagaaaagaaattcgttgatatcagtaaagaagatttggaactcggagatgaagatgaagtaaaggacagggaagcgaaacaagagtttaaccttctctgtgactggataaaacagcagctcggtgacaaagttgcaaaagtccaagtctcaaaccgtttgagctcttctccttgtgtgcttgtctctggcaaattcgggtggtcagctaatatggaaaggctaatgaaggcacaggctcttggagacacttcaagcctggagttcatgagaggtaggagaatactagagatcaatccagatcatcccatcatcaaagacttgaacgctgcttgtaagaatgcaccagagagcactgaagcaacaagagtggtcgatctcttgtatgacactgctataatatcaagtggattcactcctgatagcccggccgagctcgggaacaagatatatgagatgatggcaatggcggttggaggaagatggggcagagttgaagaagaagaagaaagctcgactgtgaatgaaggagatgacaaaagcggagaaacagaggtagttgaaccatctgaagtgagggcagagagtgatccttggcaagattgatccttttttaccttcttttgtttgcagtgatttttttttgacagaacgctttatctttccattagcagtatcatgggcctaatgaaagcccataattaaatcacgcgtgaacgagatttatccaatacagtatttgtagtttttttttgataattaaaataattttagagaatttaca

SEQ ID NO: 35305 - protein, 780 aa, Arabidopsis thaliana
  peptide (1)..(780): Ceres Seq. ID no. 13591836
  misc_feature (264)..(772): Pfam Name: Hsp90 protein Pfam Description: Hsp90 protein
  misc_feature (472)..(777): Homolog of NCBI NO: 6863054 NR Description: heat shock protein 90 [Oryza sativa]
  misc_feature (71)..(477): Homolog of NCBI NO: 6863054 NR Description: heat shock protein 90 [Oryza sativa]
  misc_feature (67)..(319): Homolog of NCBI NO: 1170383 NR Description: HEAT SHOCK PROTEIN HSP 90-ALPHA (HSP 86)
  misc_feature (291)..(767): Homolog of NCBI NO: 1170383 NR Description: HEAT SHOCK PROTEIN HSP 90-ALPHA (HSP 86)
  misc_feature (58)..(780): Homolog of NCBI NO: 63509 NR Description: hsp 108 [Gallus gallus]
  misc_feature (472)..(777): Homolog of NCBI NO: 18855040 NR Description: heat shock protein 90 [Oryza sativa]
  misc_feature (71)..(477): Homolog of NCBI NO: 18855040 NR Description: heat shock protein 90 [Oryza sativa]
  misc_feature (67)..(361): Homolog of NCBI NO: 6016267 NR Description: Heat shock protein HSP 90-alpha (HSP 86)
  misc_feature (290)..(767): Homolog of NCBI NO: 6016267 NR Description: Heat shock protein HSP 90-alpha (HSP 86)
  misc_feature (1)..(771): Homolog of NCBI NO: 15231505 NR Description: heat shock protein -related [Arabidopsis
MAPALSRSLYTSPLTSVPITPVSSRLSHLRSSFLPHGGALRTGVSCSWNLEKRCNRFAVKCDAAVAEKETTEEGSGEKFEYQAEVSRLLDLIVHSLYSHKEVFLRELVSNASDALDKLRFLSVTEPSLLGDGGDLEIRIKPDPDNGTITITDTGIGMTKEELIDCLGTIAQSGTSKFLKALKENKDLGADNGLIGQFGVGFYSAFLVAEKVVVSTKSPKSDKQYVWESVADSSSYLIREETDPDNILRRGTQITLYLREDDKYEFAESTRIKNLVKNYSQFVGFPIYTWQEKSRTIEVEEDEPVKEGEEGEPKKKKTTKTEKYWDWELANETKPLWMRNSKEVEKGEYNEFYKKAFNEFLDPLAHTHFTTEGEVEFRSILYIPGMGPLNNEDVTNPKTKNIRLYVKRVFISDDFDGELFPRYLSFVKGVVDSDDLPLNVSREILQESRIVRIMRKRLIRKTFDMIQEISESENKEDYKKFWENFGRFLKLGCIEDTGNHKRITPLLRFFSSKNEEELTSLDDYIENMGENQKAIYYLATDSLKSAKSAPFLEKLIQKDIEVLYLVEPIDEVAIQNLQTYKEKKFVDISKEDLELGDEDEVKDREAKQEFNLLCDWIKQQLGDKVAKVQVSNRLSSSPCVLVSGKFGWSANMERLMKAQALGDTSSLEFMRGRRILEINPDHPIIKDLNAACKNAPESTEATRVVDLLYDTAIISSGFTPDSPAELGNKIYEMMAMAVGGRWGRVEEEEESSTVNEGDDKSGETEVVEPSEVRAESDPWQD

SEQ ID NO: 35306 - protein, 624 aa, Arabidopsis thaliana
  peptide (1)..(624): Ceres Seq. ID no. 13591837
  misc_feature (108)..(616): Pfam Name: Hsp90 protein Pfam Description: Hsp90 protein
  misc_feature (316)..(621): Homolog of NCBI NO: 6863054 NR Description: heat shock protein 90 [Oryza sativa]
  misc_feature (1)..(321): Homolog of NCBI NO: 6863054 NR Description: heat shock protein 90 [Oryza sativa]
  misc_feature (1)..(163): Homolog of NCBI NO: 1170383 NR Description: HEAT SHOCK PROTEIN HSP 90-ALPHA (HSP 86)
  misc_feature (135)..(611): Homolog of NCBI NO: 1170383 NR Description: HEAT SHOCK PROTEIN HSP 90-ALPHA (HSP 86)
  misc_feature (1)..(624): Homolog of NCBI NO: 63509 NR Description: hsp 108 [Gallus gallus]
  misc_feature (316)..(621): Homolog of NCBI NO: 18855040 NR Description: heat shock protein 90 [Oryza sativa]
  misc_feature (1)..(321): Homolog of NCBI NO: 18855040 NR Description: heat shock protein 90 [Oryza sativa]
  misc_feature (1)..(205): Homolog of NCBI NO: 6016267 NR Description: Heat shock protein HSP 90-alpha (HSP 86)
  misc_feature (134)..(611): Homolog of NCBI NO: 6016267 NR Description: Heat shock protein HSP 90-alpha (HSP 86)
  misc_feature (1)..(615): Homolog of NCBI NO: 15231505 NR Description: heat shock protein -related [Arabidopsis
MTKEELIDCLGTIAQSGTSKFLKALKENKDLGADNGLIGQFGVGFYSAFLVAEKVVVSTKSPKSDKQYVWESVADSSSYLIREETDPDNILRRGTQITLYLREDDKYEFAESTRIKNLVKNYSQFVGFPIYTWQEKSRTIEVEEDEPVKEGEEGEPKKKKTTKTEKYWDWELANETKPLWMRNSKEVEKGEYNEFYKKAFNEFLDPLAHTHFTTEGEVEFRSILYIPGMGPLNNEDVTNPKTKNIRLYVKRVFISDDFDGELFPRYLSFVKGVVDSDDLPLNVSREILQESRIVRIMRKRLIRKTFDMIQEISESENKEDYKKFWENFGRFLKLGCIEDTGNHKRITPLLRFFSSKNEEELTSLDDYIENMGENQKAIYYLATDSLKSAKSAPFLEKLIQKDIEVLYLVEPIDEVAIQNLQTYKEKKFVDISKEDLELGDEDEVKDREAKQEFNLLCDWIKQQLGDKVAKVQVSNRLSSSPCVLVSGKFGWSANMERLMKAQALGDTSSLEFMRGRRILEINPDHPIIKDLNAACKNAPESTEATRVVDLLYDTAIISSGFTPDSPAELGNKIYEMMAMAVGGRWGRVEEEEESSTVNEGDDKSGETEVVEPSEVRAESDPWQD

SEQ ID NO: 35307 - protein, 444 aa, Arabidopsis thaliana
  peptide (1)..(444): Ceres Seq. ID no. 13591838
  misc_feature (1)..(436): Pfam Name: Hsp90 protein Pfam Description: Hsp90 protein
  misc_feature (1)..(139): Homolog of NCBI NO: 19570870 NR Description: SHEPHERD [Arabidopsis thaliana]
  misc_feature (136)..(441): Homolog of NCBI NO: 6863054 NR Description: heat shock protein 90 [Oryza sativa]
  misc_feature (1)..(141): Homolog of NCBI NO: 6863054 NR Description: heat shock protein 90 [Oryza sativa]
  misc_feature (1)..(431): Homolog of NCBI NO: 1170383 NR Description: HEAT SHOCK PROTEIN HSP 90-ALPHA (HSP 86)
  misc_feature (1)..(444): Homolog of NCBI NO: 63509 NR Description: hsp 108 [Gallus gallus]
  misc_feature (136)..(441): Homolog of NCBI NO: 18855040 NR Description: heat shock protein 90 [Oryza sativa]
  misc_feature (1)..(141): Homolog of NCBI NO: 18855040 NR Description: heat shock protein 90 [Oryza sativa]
  misc_feature (1)..(25): Homolog of NCBI NO: 6016267 NR Description: Heat shock protein HSP 90-alpha (HSP 86)
  misc_feature (1)..(431): Homolog of NCBI NO: 6016267 NR Description: Heat shock protein HSP 90-alpha (HSP 86)
  misc_feature (1)..(435): Homolog of NCBI NO: 15231505 NR Description: heat shock protein -related [Arabidopsis
MRNSKEVEKGEYNEFYKKAFNEFLDPLAHTHFTTEGEVEFRSILYIPGMGPLNNEDVTNPKTKNIRLYVKRVFISDDFDGELFPRYLSFVKGVVDSDDLPLNVSREILQESRIVRIMRKRLIRKTFDMIQEISESENKEDYKKFWENFGRFLKLGCIEDTGNHKRITPLLRFFSSKNEEELTSLDDYIENMGENQKAIYYLATDSLKSAKSAPFLEKLIQKDIEVLYLVEPIDEVAIQNLQTYKEKKFVDISKEDLELGDEDEVKDREAKQEFNLLCDWIKQQLGDKVAKVQVSNRLSSSPCVLVSGKFGWSANMERLMKAQALGDTSSLEFMRGRRILEINPDHPIIKDLNAACKNAPESTEATRVVDLLYDTAIISSGFTPDSPAELGNKIYEMMAMAVGGRWGRVEEEEESSTVNEGDDKSGETEVVEPSEVRAESDPWQD

SEQ ID NO: 35308 - DNA, 549 bp, Arabidopsis thaliana
  misc_feature (1)..(549): Ceres Seq. ID no. 12397083
  misc_feature: MA Experiment ID: 20000069 Result: Up-regulated in Transcription
  misc_feature: MA Experiment 20000069 PARAMETER Experiment Name: At_100uM_ABA_Mutants_cDNA_P Parameter: Plant Line Value: CS23
  misc_feature: MA Experiment 20000069 PARAMETER Experiment Name: At_100uM_ABA_Mutants_cDNA_P Parameter: Timepoint (hr) Value: 6
  misc_feature: MA Experiment 20000069 PARAMETER Experiment Name: At_100uM_ABA_Mutants_cDNA_P Parameter: Tissue Value: Aerial
  misc_feature: MA Experiment 20000069 PARAMETER Experiment Name: At_100uM_ABA_Mutants_cDNA_P Parameter: Treatment Value: 100uM ABA vs. No Treatment
  misc_feature: MA Experiment ID: 20000071 Result: Up-regulated in Transcription
  misc_feature: MA Experiment 20000071 PARAMETER Experiment Name: At_100uM_ABA_Mutants_cDNA_P Parameter: Plant Line Value: CS8104
  misc_feature: MA Experiment 20000071 PARAMETER Experiment Name: At_100uM_ABA_Mutants_cDNA_P Parameter: Timepoint (hr) Value: 6
  misc_feature: MA Experiment 20000071 PARAMETER Experiment Name: At_100uM_ABA_Mutants_cDNA_P Parameter: Tissue Value: Aerial
  misc_feature: MA Experiment 20000071 PARAMETER Experiment Name: At_100uM_ABA_Mutants_cDNA_P Parameter: Treatment Value: 100uM ABA vs. No Treatment
  misc_feature: MA Experiment ID: 20000117 Result: Up-regulated in Transcription
  misc_feature: MA Experiment 20000117 PARAMETER Experiment Name: At_100uM_ABA_Mutants_cDNA_P Parameter: Plant Line Value: Columbia
  misc_feature: MA Experiment 20000117 PARAMETER Experiment Name: At_100uM_ABA_Mutants_cDNA_P Parameter: Timepoint (hr) Value: 6
  misc_feature: MA Experiment 20000117 PARAMETER Experiment Name: At_100uM_ABA_Mutants_cDNA_P Parameter: Tissue Value: Aerial
  misc_feature: MA Experiment 20000117 PARAMETER Experiment Name: At_100uM_ABA_Mutants_cDNA_P Parameter: Treatment Value: 100uM ABA vs. No Treatment
  misc_feature: MA Experiment ID: 20000235 Result: Down-regulated in Transcription
  misc_feature: MA Experiment 20000235 PARAMETER Experiment Name: At_Siliques_P Parameter: Age (day) Value: 21
  misc_feature: MA Experiment 20000235 PARAMETER Experiment Name: At_Siliques_P Parameter: Organism Value: A. thaliana
  misc_feature: MA Experiment 20000235 PARAMETER Experiment Name: At_Siliques_P Parameter: Plant Line Value: WS
  misc_feature: MA Experiment 20000235 PARAMETER Experiment Name: At_Siliques_P Parameter: Tissue Value: 5-10mm Siliques vs. Whole Plant
  misc_feature: MA Experiment ID: 20000438 Result: Down-regulated in Transcription
  misc_feature: MA Experiment 20000438 PARAMETER Experiment Name: At_Shoots__P Parameter: Age (day) Value: 14
  misc_feature: MA Experiment 20000438 PARAMETER Experiment Name: At_Shoots__P Parameter: Tissue Value: Shoots vs. Whole Plant
  misc_feature: MA Experiment ID: 20001557 Result: Down-regulated in Transcription
  misc_feature: MA Experiment 20001557 PARAMETER Experiment Name: At_Drought_Soil_Dry_P Parameter: Age (day) Value: 27
  misc_feature: MA Experiment 20001557 PARAMETER Experiment Name: At_Drought_Soil_Dry_P Parameter: Organism Value: A. thaliana
  misc_feature: MA Experiment 20001557 PARAMETER Experiment Name: At_Drought_Soil_Dry_P Parameter: Plant Line Value: WS
  misc_feature: MA Experiment 20001557 PARAMETER Experiment Name: At_Drought_Soil_Dry_P Parameter: Post Timepoint (hr) Value: 3
  misc_feature: MA Experiment 20001557 PARAMETER Experiment Name: At_Drought_Soil_Dry_P Parameter: Post-Treatment Value: Re-Water vs. No Drought
  misc_feature: MA Experiment 20001557 PARAMETER Experiment Name: At_Drought_Soil_Dry_P Parameter: Timepoint (day) Value: 13
  misc_feature: MA Experiment 20001557 PARAMETER Experiment Name: At_Drought_Soil_Dry_P Parameter: Treatment Value: Drought vs. No Drought
  misc_feature: MA Experiment ID: 20001905 Result: Down-regulated in Transcription
  misc_feature: MA Experiment 20001905 PARAMETER Experiment Name: At_Drought_Reproduction_P Parameter: Age (day) Value: 40
  misc_feature: MA Experiment 20001905 PARAMETER Experiment Name: At_Drought_Reproduction_P Parameter: Organism Value: A. thaliana
  misc_feature: MA Experiment 20001905 PARAMETER Experiment Name: At_Drought_Reproduction_P Parameter: Plant Line Value: WS
  misc_feature: MA Experiment 20001905 PARAMETER Experiment Name: At_Drought_Reproduction_P Parameter: Timepoint (day) Value: 10
  misc_feature: MA Experiment 20001905 PARAMETER Experiment Name: At_Drought_Reproduction_P Parameter: Tissue Value: Rosettes
  misc_feature: MA Experiment 20001905 PARAMETER Experiment Name: At_Drought_Reproduction_P Parameter: Treatment Value: Drought vs. No Drought
atatcctgatttccccactcgacgctgatttcttctctgcttctgtaatttctccaattcattgatcagatcagccatggaagacgagattgaattgaaaactgctcctgctgatttccggtttcctacaacaaatcaaactaggcactgcttcactcggtacatcgagtttcacaggtgtacaactgcaaagggagaggagtctaatgactgtgaaaggtttgccaagtattaccgtgccctctgtcctggagaatgggttgacaagtggaacgagcagagggagagtggaacttttccaggtcctctttgaaccaagccttcaatcttgatgaagaggcaatcaagtccgtaataatacatggtttcaaagttaatttcttgcttgcgtgtgtatgttttggccttattatttcctctctagtgtaagtgttttattgggatgtctaagaaaggccaatcaaattataatatgaaaacattccgcttattttggttggaacttataataccaaatgcataactagactaatggtggatggaatttcc

SEQ ID NO: 35309 - protein, 78 aa, Arabidopsis thaliana
  peptide (1)..(78): Ceres Seq. ID no. 12397084
  misc_feature (3)..(77): Pfam Name: Cytochrome oxidase c subunit VIb Pfam Description: Cytochrome oxidase c subunit VIb
  misc_feature (3)..(77): Pfam Name: Cytochrome oxidase c subunit VIb Pfam Description: Cytochrome oxidase c subunit VIb
  misc_feature (6)..(76): Homolog of NCBI NO: 38048151 NR Description: similar to Drosophila melanogaster CG14235
  misc_feature (4)..(78): Homolog of NCBI NO: 22204116 NR Description: putative cytochrome c oxidase subunit [Triticum
  misc_feature (4)..(78): Homolog of NCBI NO: 34906824 NR Description: putative cytochrome c oxidase subunit 6b-1
  misc_feature (3)..(78): Homolog of NCBI NO: 21554378 NR Description: cytochrome c oxidase subunit, putative
  misc_feature (3)..(78): Homolog of NCBI NO: 15219886 NR Description: cytochrome c oxidase subunit, putative
  misc_feature (6)..(76): Homolog of NCBI NO: 38048151 NR Description: similar to Drosophila melanogaster CG14235
  misc_feature (4)..(78): Homolog of NCBI NO: 34906824 NR Description: putative cytochrome c oxidase subunit 6b-1
  misc_feature (3)..(78): Homolog of NCBI NO: 15219886 NR Description: cytochrome c oxidase subunit, putative
  misc_feature (1)..(78): Homolog of NCBI NO: 18424030 NR Description: Expressed protein
  misc_feature (1)..(78): Homolog of NCBI NO: 21592329 NR Description: cytochrome c oxidase subunit 6b [Arabidopsis
  misc_feature (1)..(78): Homolog of NCBI NO: 15234375 NR Description: putative protein; protein id: At4g28060.1
  misc_feature (4)..(78): Homolog of NCBI NO: 9967162 NR Description: cytochrome c oxidase subunit 6b
  misc_feature (4)..(78): Homolog of NCBI NO: 4586449 NR Description: cytochrome c oxidase subunit 6b-1
  misc_feature (3)..(78): Homolog of NCBI NO: 21554378 NR Description: cytochrome c oxidase subunit, putative
  misc_feature (4)..(78): Homolog of NCBI NO: 22204116 NR Description: putative cytochrome c oxidase subunit [Triticum
  misc_feature (4)..(78): Homolog of NCBI NO: 4586449 NR Description: cytochrome c oxidase subunit 6b-1
  misc_feature (4)..(78): Homolog of NCBI NO: 9967162 NR Description: cytochrome c oxidase subunit 6b
  misc_feature (1)..(78): Homolog of NCBI NO: 15234375 NR Description: putative protein; protein id: At4g28060.1
  misc_feature (1)..(78): Homolog of NCBI NO: 21592329 NR Description: cytochrome c oxidase subunit 6b [Arabidopsis
  misc_feature (1)..(78): Homolog of NCBI NO: 18424030 NR Description: Expressed protein
MEDEIELKTAPADFRFPTTNQTRHCFTRYIEFHRCTTAKGEESNDCERFAKYYRALCPGEWVDKWNEQRESGTFPGPL

SEQ ID NO: 35310 - protein, 41 aa, Arabidopsis thaliana
  peptide (1)..(41): Ceres Seq. ID no. 12397085
MTVKGLPSITVPSVLENGLTSGTSRGRVELFQVLFEPSLQS

SEQ ID NO: 35311 - DNA, 1708 bp, Arabidopsis thaliana
  misc_feature (1)..(1708): Ceres Seq. ID no. 13580438
  misc_feature: MA Experiment ID: 108605 Result: Down-regulated in Transcription
  misc_feature: MA Experiment 108605 PARAMETER Experiment Name: At_100uM_ABA_cDNA_P Parameter: Timepoint (hr) Value: 6
  misc_feature: MA Experiment 108605 PARAMETER Experiment Name: At_100uM_ABA_cDNA_P Parameter: Tissue Value: Aerial
  misc_feature: MA Experiment 108605 PARAMETER Experiment Name: At_100uM_ABA_cDNA_P Parameter: Treatment Value: 100uM ABA vs. No Treatment
  misc_feature: MA Experiment ID: 20000173 Result: Down-regulated in Transcription
  misc_feature: MA Experiment 20000173 PARAMETER Experiment Name: At_42deg_Heat_P Parameter: Age (day) Value: 14
  misc_feature: MA Experiment 20000173 PARAMETER Experiment Name: At_42deg_Heat_P Parameter: Organism Value: A. thaliana
  misc_feature: MA Experiment 20000173 PARAMETER Experiment Name: At_42deg_Heat_P Parameter: Plant Line Value: WS
  misc_feature: MA Experiment 20000173 PARAMETER Experiment Name: At_42deg_Heat_P Parameter: Temperature (deg C) Value: 42 vs. 22
  misc_feature: MA Experiment 20000173 PARAMETER Experiment Name: At_42deg_Heat_P Parameter: Timepoint (hr) Value: 6
  misc_feature: MA Experiment 20000173 PARAMETER Experiment Name: At_42deg_Heat_P Parameter: Tissue Value: Aerial
  misc_feature: MA Experiment ID: 20000185 Result: Up-regulated in Transcription
  misc_feature: MA Experiment 20000185 PARAMETER Experiment Name: At_Roots__P Parameter: Age (day) Value: 7 vs. 21
  misc_feature: MA Experiment 20000185 PARAMETER Experiment Name: At_Roots__P Parameter: Organism Value: A. thaliana
  misc_feature: MA Experiment 20000185 PARAMETER Experiment Name: At_Roots__P Parameter: Tissue Value: Roots vs. Whole Plant
  misc_feature: MA Experiment ID: 20000227 Result: Up-regulated in Transcription
  misc_feature: MA Experiment 20000227 PARAMETER Experiment Name: At_Root-Tips-vs-Tops_P Parameter: Tissue Value: Root Tips vs. Root Tops
  misc_feature: MA Experiment ID: 20000234 Result: Up-regulated in Transcription
  misc_feature: MA Experiment 20000234 PARAMETER Experiment Name: At_Siliques_P Parameter: Age (day) Value: 21
  misc_feature: MA Experiment 20000234 PARAMETER Experiment Name: At_Siliques_P Parameter: Organism Value: A. thaliana
  misc_feature: MA Experiment 20000234 PARAMETER Experiment Name: At_Siliques_P Parameter: Plant Line Value: WS
  misc_feature: MA Experiment 20000234 PARAMETER Experiment Name: At_Siliques_P Parameter: Tissue Value: Less Than 5mm Siliques vs. Whole Plant
  misc_feature: MA Experiment ID: 20000265 Result: Up-regulated in Transcription
  misc_feature: MA Experiment 20000265 PARAMETER Experiment Name: At_Open_Flower_P Parameter: Age (day) Value: 21
  misc_feature: MA Experiment 20000265 PARAMETER Experiment Name: At_Open_Flower_P Parameter: Plant Line Value: WS
  misc_feature: MA Experiment 20000265 PARAMETER Experiment Name: At_Open_Flower_P Parameter: Tissue Value: Closed Flower vs. Whole Plant
  misc_feature: MA Experiment ID: 20000286 Result: Up-regulated in Transcription
  misc_feature: MA Experiment 20000286 PARAMETER Experiment Name: At_Open_Flower_P Parameter: Age (day) Value: 21
  misc_feature: MA Experiment 20000286 PARAMETER Experiment Name: At_Open_Flower_P Parameter: Plant Line Value: WS
  misc_feature: MA Experiment 20000286 PARAMETER Experiment Name: At_Open_Flower_P Parameter: Tissue Value: Half Open vs. Whole Plant
  misc_feature: MA Experiment ID: 20000439 Result: Up-regulated in Transcription
  misc_feature: MA Experiment 20000439 PARAMETER Experiment Name: At_Roots__P Parameter: Age (day) Value: 14 vs. 21
  misc_feature: MA Experiment 20000439 PARAMETER Experiment Name: At_Roots__P Parameter: Organism Value: A. thaliana
  misc_feature: MA Experiment 20000439 PARAMETER Experiment Name: At_Roots__P Parameter: Tissue Value: Roots vs. Whole Plant
  misc_feature: MA Experiment ID: 20001451 Result: Down-regulated in Transcription
  misc_feature: MA Experiment 20001451 PARAMETER Experiment Name: At_Far-red-induction_P Parameter: Age (day) Value: 7
  misc_feature: MA Experiment 20001451 PARAMETER Experiment Name: At_Far-red-induction_P Parameter: Light Value: Far-red vs. White
  misc_feature: MA Experiment 20001451 PARAMETER Experiment Name: At_Far-red-induction_P Parameter: Organism Value: A. thaliana
  misc_feature: MA Experiment 20001451 PARAMETER Experiment Name: At_Far-red-induction_P Parameter: Plant Line Value: Columbia
  misc_feature: MA Experiment 20001451 PARAMETER Experiment Name: At_Far-red-induction_P Parameter: Timepoint (hr) Value: 24
  misc_feature: MA Experiment 20001451 PARAMETER Experiment Name: At_Far-red-induction_P Parameter: Tissue Value: Whole Plant
  misc_feature: MA Experiment ID: 20001905 Result: Up-regulated in Transcription
  misc_feature: MA Experiment 20001905 PARAMETER Experiment Name: At_Drought_Reproduction_P Parameter: Age (day) Value: 40
  misc_feature: MA Experiment 20001905 PARAMETER Experiment Name: At_Drought_Reproduction_P Parameter: Organism Value: A. thaliana
  misc_feature: MA Experiment 20001905 PARAMETER Experiment Name: At_Drought_Reproduction_P Parameter: Plant Line Value: WS
  misc_feature: MA Experiment 20001905 PARAMETER Experiment Name: At_Drought_Reproduction_P Parameter: Timepoint (day) Value: 10
  misc_feature: MA Experiment 20001905 PARAMETER Experiment Name: At_Drought_Reproduction_P Parameter: Tissue Value: Rosettes
  misc_feature: MA Experiment 20001905 PARAMETER Experiment Name: At_Drought_Reproduction_P Parameter: Treatment Value: Drought vs. No Drought
  misc_feature: MA Experiment ID: 20001911 Result: Down-regulated in Transcription
  misc_feature: MA Experiment 20001911 PARAMETER Experiment Name: At_Drought_Reproduction_P Parameter: Age (day) Value: 40
  misc_feature: MA Experiment 20001911 PARAMETER Experiment Name: At_Drought_Reproduction_P Parameter: Organism Value: A. thaliana
  misc_feature: MA Experiment 20001911 PARAMETER Experiment Name: At_Drought_Reproduction_P Parameter: Plant Line Value: WS
  misc_feature: MA Experiment 20001911 PARAMETER Experiment Name: At_Drought_Reproduction_P Parameter: Timepoint (day) Value: 10
  misc_feature: MA Experiment 20001911 PARAMETER Experiment Name: At_Drought_Reproduction_P Parameter: Tissue Value: Flowers
  misc_feature: MA Experiment 20001911 PARAMETER Experiment Name: At_Drought_Reproduction_P Parameter: Treatment Value: Drought vs. No Drought
aaccgattcatatctttcttcttcttcctctacagcttcttcataaatctctctctcttctcctctcttctcaaagatcgaacctttcgatttcagtctcttcagagttctttcgttttcatcgaaacaatggcgaagaacgttgggatttaggctatgaatatctatttccctcccacctgtgttcaacaggaagctttggaagcacatgatggagcaagcaaagggaaatacactattggacttggccaagattgcttagctttttgcactgagcttgaagatgttatctctatgagtttcaatgcggtgacatcactttttgagaagtataagattgaccctaaccaaatcgggcgtcttgaagtaggaagtgagactgttattgacaaaagcaagtccatcaagaccttcttgatgcagctctttgagaaatgtggaaacactgatgtcgaaggtgttgactcgaccaatgcttgctatggtggaactgcagcttgttaaactgtgtcaattgggttgagagtaactcttgggatggacgttatggcctcgtcatttgtactgacagcgcggtttatgcagaaggacccgcaaggcccactggaggagctgcagcgattgctatgttgataggacctgatgctcctatcgttttcgaaagcaaattgagagcaagccacatggctcatgtctatgacttttacaagcccaatcttgctagcgagtacccggttgttgatggtaagctttcacagacttgctacctcatggctcttgactcctgctataaacatttatgcaacaagttcgagaagatcgagggcaaagagttctccataaatgatgctgattacattgttttccattctccatacaataaacttgtacagaaaagctttgccctctcttgtacaacgacttcttgagaaacgcaagctccattgacgaggctgccaaagaaaagttcaccccttattcatctttgacccttgacgagagttaccaaagccgtgatcttgaaaaggtgtcacaacaaatttcgaaaccgttttatgatgctaaagtgcaaccaacgactttaataccaaaggaagtcggtaacatgtacactgcttctctctacgctgcatttgcttccctcatccacaataaacacaatgatttggcgggaaagcgggtggttatgttctcttatggaagtggctccaccgcaacaatgttctcattacgcctcaacgacaataagcctcctttcagcatttcaaacattgcatctgtaatggatgttggcggtaaattgaaagctagacatgagtatgcacctgagaagtttgtggagacaatgaagctaatggaacataggtatggagcaaaggactttgtgacaaccaaggagggtattatagatcttttggcaccgggaacttattatctgaaagaggttgattccttgtaccggagattctatggcaagaaaggtgaagatggatctgtagccaatggacactgattcttgaaaaggaacaaatcataaaaagtcacctgaaaatgttatgttttacttgcaccattttaatcgttttataagtttgttattactttgatttagggacaaagaaggaatgtattctctgtttttatttactgtttgatttactctctcatgcaaatgataatttggaacttattggaatctctattttgc

SEQ ID NO: 35312 - protein, 135 aa, Arabidopsis thaliana
  peptide (1)..(135): Ceres Seq. ID no. 13580439
  misc_feature (1)..(125): Pfam Name: Hydroxymethylglutaryl-coenzyme A synthase Pfam Description: Hydroxymethylglutaryl-coenzyme A synthase
  misc_feature (1)..(135): Homolog of NCBI NO: 34902200 NR Description: Putative hydroxymethylglutaryl coenzyme A
  misc_feature (1)..(135): Homolog of NCBI NO: 14916100 NR Description: hydroxymethylglutaryl coenzyme A synthase [Hevea
  misc_feature (1)..(135): Homolog of NCBI NO: 16417956 NR Description: hydroxymethylglutaryl coenzyme A synthase [Hevea
  misc_feature (1)..(135): Homolog of NCBI NO: 30681902 NR Description: hydroxymethylglutaryl-CoA synthase [Arabidopsis
  misc_feature (1)..(134): Homolog of NCBI NO: 11192007 NR Description: HMG-CoA synthase [Brassica juncea]
  misc_feature (1)..(135): Homolog of NCBI NO: 11192003 NR Description: HMG-CoA synthase [Brassica juncea]
  misc_feature (1)..(135): Homolog of NCBI NO: 11192005 NR Description: HMG-CoA synthase [Brassica juncea]
  misc_feature (1)..(135): Homolog of NCBI NO: 7799986 NR Description: HMG-CoA synthase [Brassica juncea]
  misc_feature (1)..(135): Homolog of NCBI NO: 15234313 NR Description: hydroxymethylglutaryl-CoA synthase [Arabidopsis
  misc_feature (1)..(135): Homolog of NCBI NO: 1143390 NR Description: hydroxymethylglutaryl-CoA synthase [Arabidopsis
MYTASLYAAFASLIHNKHNDLAGKRVVMFSYGSGSTATMFSLRLNDNKPPFSISNIASVMDVGGKLKARHEYAPEKFVETMKLMEHRYGAKDFVTTKEGIIDLLAPGTYYLKEVDSLYRRFYGKKGEDGSVANGH

SEQ ID NO: 35313 - protein, 115 aa, Arabidopsis thaliana
  peptide (1)..(115): Ceres Seq. ID no. 13580440
  misc_feature (1)..(114): Pfam Name: Hydroxymethylglutaryl-coenzyme A synthase Pfam Description: Hydroxymethylglutaryl-coenzyme A synthase
  misc_feature (1)..(114): Homolog of NCBI NO: 34902200 NR Description: Putative hydroxymethylglutaryl coenzyme A
  misc_feature (1)..(114): Homolog of NCBI NO: 14916100 NR Description: hydroxymethylglutaryl coenzyme A synthase [Hevea
  misc_feature (1)..(114): Homolog of NCBI NO: 16417956 NR Description: hydroxymethylglutaryl coenzyme A synthase [Hevea
  misc_feature (47)..(114): Homolog of NCBI NO: 30681902 NR Description: hydroxymethylglutaryl-CoA synthase [Arabidopsis
  misc_feature (1)..(114): Homolog of NCBI NO: 11192007 NR Description: HMG-CoA synthase [Brassica juncea]
  misc_feature (1)..(114): Homolog of NCBI NO: 11192003 NR Description: HMG-CoA synthase [Brassica juncea]
  misc_feature (1)..(114): Homolog of NCBI NO: 11192005 NR Description: HMG-CoA synthase [Brassica juncea]
  misc_feature (1)..(114): Homolog of NCBI NO: 7799986 NR Description: HMG-CoA synthase [Brassica juncea]
  misc_feature (1)..(114): Homolog of NCBI NO: 15234313 NR Description: hydroxymethylglutaryl-CoA synthase [Arabidopsis
  misc_feature (1)..(114): Homolog of NCBI NO: 1143390 NR Description: hydroxymethylglutaryl-CoA synthase [Arabidopsis
MNIYFPPTCVQQEALEAHDGASKGKYTIGLGQDCLAFCTELEDVISMSFNAVTSLFEKYKIDPNQIGRLEVGSETVIDKSKSIKTFLMQLFEKCGNTDVEGVDSTNACYGGTAAC

SEQ ID NO: 35314 - protein, 108 aa, Arabidopsis thaliana
  peptide (1)..(108): Ceres Seq. ID no. 13580441
  misc_feature (1)..(98): Pfam Name: Hydroxymethylglutaryl-coenzyme A synthase Pfam Description: Hydroxymethylglutaryl-coenzyme A synthase
  misc_feature (1)..(108): Homolog of NCBI NO: 34902200 NR Description: Putative hydroxymethylglutaryl coenzyme A
  misc_feature (1)..(108): Homolog of NCBI NO: 14916100 NR Description: hydroxymethylglutaryl coenzyme A synthase [Hevea
  misc_feature (1)..(108): Homolog of NCBI NO: 16417956 NR Description: hydroxymethylglutaryl coenzyme A synthase [Hevea
  misc_feature (1)..(108): Homolog of NCBI NO: 30681902 NR Description: hydroxymethylglutaryl-CoA synthase [Arabidopsis
  misc_feature (1)..(107): Homolog of NCBI NO: 11192007 NR Description: HMG-CoA synthase [Brassica juncea]
  misc_feature (1)..(108): Homolog of NCBI NO: 11192003 NR Description: HMG-CoA synthase [Brassica juncea]
  misc_feature (1)..(108): Homolog of NCBI NO: 11192005 NR Description: HMG-CoA synthase [Brassica juncea]
  misc_feature (1)..(108): Homolog of NCBI NO: 7799986 NR Description: HMG-CoA synthase [Brassica juncea]
  misc_feature (1)..(108): Homolog of NCBI NO: 15234313 NR Description: hydroxymethylglutaryl-CoA synthase [Arabidopsis
  misc_feature (1)..(108): Homolog of NCBI NO: 1143390 NR Description: hydroxymethylglutaryl-CoA synthase [Arabidopsis
MFSYGSGSTATMFSLRLNDNKPPFSISNIASVMDVGGKLKARHEYAPEKFVETMKLMEHRYGAKDFVTTKEGIIDLLAPGTYYLKEVDSLYRRFYGKKGEDGSVANGH

SEQ ID NO: 35315 - DNA, 1184 bp, Arabidopsis thaliana
  misc_feature (1)..(1184): Ceres Seq. ID no. 13488582
  misc_feature: MA Experiment ID: 108434 Result: Down-regulated in Transcription
  misc_feature: MA Experiment 108434 PARAMETER Experiment Name: At_Root_Tips_cDNA_P Parameter: Tissue Value: Root Tips
  misc_feature: MA Experiment ID: 108577 Result: Down-regulated in Transcription
  misc_feature: MA Experiment 108577 PARAMETER Experiment Name: At_42deg_Heat_cDNA_P Parameter: Temperature (deg C) Value: 42 vs. 22
  misc_feature: MA Experiment 108577 PARAMETER Experiment Name: At_42deg_Heat_cDNA_P Parameter: Timepoint (hr) Value: 6
  misc_feature: MA Experiment 108577 PARAMETER Experiment Name: At_42deg_Heat_cDNA_P Parameter: Tissue Value: Aerial
  misc_feature: MA Experiment ID: 20000111 Result: Down-regulated in Transcription
  misc_feature: MA Experiment 20000111 PARAMETER Experiment Name: At_42deg_Heat_cDNA_P Parameter: Temperature (deg C) Value: 42 vs. 22
  misc_feature: MA Experiment 20000111 PARAMETER Experiment Name: At_42deg_Heat_cDNA_P Parameter: Timepoint (hr) Value: 6
  misc_feature: MA Experiment 20000111 PARAMETER Experiment Name: At_42deg_Heat_cDNA_P Parameter: Tissue Value: Aerial
  misc_feature: MA Experiment ID: 20000113 Result: Down-regulated in Transcription
  misc_feature: MA Experiment 20000113 PARAMETER Experiment Name: At_42deg_Heat_cDNA_P Parameter: Temperature (deg C) Value: 42 vs. 22
  misc_feature: MA Experiment 20000113 PARAMETER Experiment Name: At_42deg_Heat_cDNA_P Parameter: Timepoint (hr) Value: 8
  misc_feature: MA Experiment 20000113 PARAMETER Experiment Name: At_42deg_Heat_cDNA_P Parameter: Tissue Value: Aerial
  misc_feature: MA Experiment ID: 20000171 Result: Down-regulated in Transcription
  misc_feature: MA Experiment 20000171 PARAMETER Experiment Name: At_42deg_Heat_P Parameter: Age (day) Value: 14
  misc_feature: MA Experiment 20000171 PARAMETER Experiment Name: At_42deg_Heat_P Parameter: Organism Value: A. thaliana
  misc_feature: MA Experiment 20000171 PARAMETER Experiment Name: At_42deg_Heat_P Parameter: Plant Line Value: WS
  misc_feature: MA Experiment 20000171 PARAMETER Experiment Name: At_42deg_Heat_P Parameter: Temperature (deg C) Value: 42 vs. 22
  misc_feature: MA Experiment 20000171 PARAMETER Experiment Name: At_42deg_Heat_P Parameter: Timepoint (hr) Value: 1
  misc_feature: MA Experiment 20000171 PARAMETER Experiment Name: At_42deg_Heat_P Parameter: Tissue Value: Aerial
  misc_feature: MA Experiment ID: 20000173 Result: Down-regulated in Transcription
  misc_feature: MA Experiment 20000173 PARAMETER Experiment Name: At_42deg_Heat_P Parameter: Age (day) Value: 14
  misc_feature: MA Experiment 20000173 PARAMETER Experiment Name: At_42deg_Heat_P Parameter: Organism Value: A. thaliana
  misc_feature: MA Experiment 20000173 PARAMETER Experiment Name: At_42deg_Heat_P Parameter: Plant Line Value: WS
  misc_feature: MA Experiment 20000173 PARAMETER Experiment Name: At_42deg_Heat_P Parameter: Temperature (deg C) Value: 42 vs. 22
  misc_feature: MA Experiment 20000173 PARAMETER Experiment Name: At_42deg_Heat_P Parameter: Timepoint (hr) Value: 6
  misc_feature: MA Experiment 20000173 PARAMETER Experiment Name: At_42deg_Heat_P Parameter: Tissue Value: Aerial
  misc_feature: MA Experiment ID: 20000180 Result: Up-regulated in Transcription
  misc_feature: MA Experiment 20000180 PARAMETER Experiment Name: At_Germinating_Seeds_P Parameter: Age (hr) Value: 24 vs. 0
  misc_feature: MA Experiment 20000180 PARAMETER Experiment Name: At_Germinating_Seeds_P Parameter: Tissue Value: Germinating Seeds
  misc_feature: MA Experiment ID: 20000184 Result: Down-regulated in Transcription
  misc_feature: MA Experiment 20000184 PARAMETER Experiment Name: At_Shoots__P Parameter: Age (day) Value: 7
  misc_feature: MA Experiment 20000184 PARAMETER Experiment Name: At_Shoots__P Parameter: Tissue Value: Shoots vs. Whole Plant
  misc_feature: MA Experiment ID: 20000264 Result: Down-regulated in Transcription
  misc_feature: MA Experiment 20000264 PARAMETER Experiment Name: At_Open_Flower_P Parameter: Age (day) Value: 21
  misc_feature: MA Experiment 20000264 PARAMETER Experiment Name: At_Open_Flower_P Parameter: Plant Line Value: WS
  misc_feature: MA Experiment 20000264 PARAMETER Experiment Name: At_Open_Flower_P Parameter: Tissue Value: Open Flower vs. Whole Plant
  misc_feature: MA Experiment ID: 20000265 Result: Down-regulated in Transcription
  misc_feature: MA Experiment 20000265 PARAMETER Experiment Name: At_Open_Flower_P Parameter: Age (day) Value: 21
  misc_feature: MA Experiment 20000265 PARAMETER Experiment Name: At_Open_Flower_P Parameter: Plant Line Value: WS
  misc_feature: MA Experiment 20000265 PARAMETER Experiment Name: At_Open_Flower_P Parameter: Tissue Value: Closed Flower vs. Whole Plant
  misc_feature: MA Experiment ID: 20000451 Result: Up-regulated in Transcription
  misc_feature: MA Experiment 20000451 PARAMETER Experiment Name: At_CS6879_Shoots-Roots_P Parameter: Age (day) Value: 14
  misc_feature: MA Experiment 20000451 PARAMETER Experiment Name: At_CS6879_Shoots-Roots_P Parameter: Organism Value: A. thaliana
  misc_feature: MA Experiment 20000451 PARAMETER Experiment Name: At_CS6879_Shoots-Roots_P Parameter: Plant Line Value: CS6879 vs. WS
  misc_feature: MA Experiment 20000451 PARAMETER Experiment Name: At_CS6879_Shoots-Roots_P Parameter: Tissue Value: Roots
  misc_feature: MA Experiment ID: 20000452 Result: Up-regulated in Transcription
  misc_feature: MA Experiment 20000452 PARAMETER Experiment Name: At_CS6879_Shoots-Roots_P Parameter: Age (day) Value: 14
  misc_feature: MA Experiment 20000452 PARAMETER Experiment Name: At_CS6879_Shoots-Roots_P Parameter: Organism Value: A. thaliana
  misc_feature: MA Experiment 20000452 PARAMETER Experiment Name: At_CS6879_Shoots-Roots_P Parameter: Plant Line Value: CS6879 vs. WS
  misc_feature: MA Experiment 20000452 PARAMETER Experiment Name: At_CS6879_Shoots-Roots_P Parameter: Tissue Value: Shoots
  misc_feature: MA Experiment ID: 20001558 Result: Down-regulated in Transcription
  misc_feature: MA Experiment 20001558 PARAMETER Experiment Name: At_Drought_Soil_Dry_P Parameter: Age (day) Value: 27
  misc_feature: MA Experiment 20001558 PARAMETER Experiment Name: At_Drought_Soil_Dry_P Parameter: Organism Value: A. thaliana
  misc_feature: MA Experiment 20001558 PARAMETER Experiment Name: At_Drought_Soil_Dry_P Parameter: Plant Line Value: WS
  misc_feature: MA Experiment 20001558 PARAMETER Experiment Name: At_Drought_Soil_Dry_P Parameter: Post Timepoint (hr) Value: 6
  misc_feature: MA Experiment 20001558 PARAMETER Experiment Name: At_Drought_Soil_Dry_P Parameter: Post-Treatment Value: Re-Water vs. No Drought
  misc_feature: MA Experiment 20001558 PARAMETER Experiment Name: At_Drought_Soil_Dry_P Parameter: Timepoint (day) Value: 13
  misc_feature: MA Experiment 20001558 PARAMETER Experiment Name: At_Drought_Soil_Dry_P Parameter: Treatment Value: Drought vs. No Drought
acacactttaacgcatttctcaaaattacgttgccaaagtctggtcagagctacaaatcaaatttgacagactgcaatttccaatccaacgactgcgaatgaagtttaatggcgactagatcgccttataagagacaaacgaagcgatccatgattcagtctcttccagcttcttcttctgcatcatctcgccgccgattcatttctcggaagaggttcgcgatgatgattcctcttgctctcctctccggcgccgttttcctattctttatgccattcaatagctggggccaatcatctggttcttctctggatctctcccataggatcaatgaaattgaaagtagttgctgagtttcctcatgatccggacgcctttactcagggtcttctttatgcgggaaacgatacactgttcgaatccactggtctatacgggaagtcttcagtgaggaaagtggatctacgaacaggaaaggttgaaattcttgaaaaaatggacaatacatattttggagagggtttaacactccttggagaaaggctctttcaagtcgcatggttgacgaacacgggtttcacatatgaccttcgcaacttaagtaaagtaaaaccatttaaacatcatatgaaagatggatggggactggctaccgatggaaaagcgttatttggaagtgatggcacttctacattatatcggatggaccctcaaacaatgaaagttactgataagcatatagtcagatataatggccgtgaggtacgttaccttaatgagctcgagtacataaacaacgaagtttgggcaaatgtgtggcagtctgattgtattgctagaatttcacccaaggacggatctctgcttggatggatactgctttcaaaattaagtcggggattgctgaaatctggacataggggtattgatgttttgaatggcatagcatgggacagtgacaagcaacgcctctttgtaacggggaaactgtggccaaagctgtaccaaatcaagctaaaacaagcatcagcaaagagccgaaattatatcgagcaacaatgcttggtatgaaaatattgtgcatggtaatggttataatgtatactggctataatttaccataatttctgaacattagcatttagcaaacttcaatgattgaagatgagaatcaaaacctcgc

SEQ ID NO: 35316 - protein, 246 aa, Arabidopsis thaliana
  peptide (1)..(246): Ceres Seq. ID no. 13488583
  misc_feature (2)..(236): Pfam Name: Glutamine cyclotransferase Pfam Description: Glutamine cyclotransferase
  misc_feature (2)..(236): Pfam Name: Glutamine cyclotransferase Pfam Description: Glutamine cyclotransferase
  misc_feature (2)..(236): Pfam Name: Glutamine cyclotransferase Pfam Description: Glutamine cyclotransferase
  misc_feature (5)..(231): Homolog of NCBI NO: 21243055 NR Description: glutamine cyclotransferase
  misc_feature (4)..(229): Homolog of NCBI NO: 31790364 NR Description: putative glutamine cyclotransferase
  misc_feature (1)..(231): Homolog of NCBI NO: 22970826 NR Description: hypothetical protein [Chloroflexus aurantiacus]
  misc_feature (1)..(229): Homolog of NCBI NO: 21231655 NR Description: glutamine cyclotransferase
  misc_feature (1)..(233): Homolog of NCBI NO: 16126885 NR Description: glutamine cyclotransferase [Caulobacter
  misc_feature (5)..(231): Homolog of NCBI NO: 21243055 NR Description: glutamine cyclotransferase
  misc_feature (1)..(231): Homolog of NCBI NO: 22970826 NR Description: hypothetical protein [Chloroflexus aurantiacus]
  misc_feature (1)..(233): Homolog of NCBI NO: 16126885 NR Description: glutamine cyclotransferase [Caulobacter
  misc_feature (1)..(229): Homolog of NCBI NO: 21231655 NR Description: glutamine cyclotransferase
  misc_feature (1)..(231): Homolog of NCBI NO: 22970826 NR Description: hypothetical protein [Chloroflexus aurantiacus]
  misc_feature (4)..(229): Homolog of NCBI NO: 31790364 NR Description: putative glutamine cyclotransferase
  misc_feature (5)..(231): Homolog of NCBI NO: 21243055 NR Description: glutamine cyclotransferase
  misc_feature (2)..(246): Homolog of NCBI NO: 21536884 NR Description: glutamine cyclotransferase precursor-like protein
  misc_feature (2)..(246): Homolog of NCBI NO: 18416607 NR Description: glutamine cyclotransferase precursor - like
  misc_feature (2)..(246): Homolog of NCBI NO: 7484984 NR Description: glutaminyl-peptide cyclotransferase homolog
  misc_feature (3)..(245): Homolog of NCBI NO: 7484740 NR Description: glutaminyl-peptide cyclotransferase (EC 2.3.2.5)
  misc_feature (1)..(244): Homolog of NCBI NO: 24413973 NR Description: putative glutaminyl-peptide cyclotransferase
  misc_feature (2)..(246): Homolog of NCBI NO: 21536884 NR Description: glutamine cyclotransferase precursor-like protein
  misc_feature (2)..(246): Homolog of NCBI NO: 18416607 NR Description: glutamine cyclotransferase precursor - like
  misc_feature (2)..(246): Homolog of NCBI NO: 7484984 NR Description: glutaminyl-peptide cyclotransferase homolog
  misc_feature (3)..(245): Homolog of NCBI NO: 7484740 NR Description: glutaminyl-peptide cyclotransferase (EC 2.3.2.5)
  misc_feature (1)..(244): Homolog of NCBI NO: 24413973 NR Description: putative glutaminyl-peptide cyclotransferase
  misc_feature (1)..(233): Homolog of NCBI NO: 16126885 NR Description: glutamine cyclotransferase [Caulobacter
  misc_feature (1)..(229): Homolog of NCBI NO: 21231655 NR Description: glutamine cyclotransferase
  misc_feature (4)..(229): Homolog of NCBI NO: 31790364 NR Description: putative glutamine cyclotransferase
  misc_feature (1)..(244): Homolog of NCBI NO: 24413973 NR Description: putative glutaminyl-peptide cyclotransferase
  misc_feature (3)..(245): Homolog of NCBI NO: 7484740 NR Description: glutaminyl-peptide cyclotransferase (EC 2.3.2.5)
  misc_feature (2)..(246): Homolog of NCBI NO: 7484984 NR Description: glutaminyl-peptide cyclotransferase homolog
  misc_feature (2)..(246): Homolog of NCBI NO: 18416607 NR Description: glutamine cyclotransferase precursor - like
  misc_feature (2)..(246): Homolog of NCBI NO: 21536884 NR Description: glutamine cyclotransferase precursor-like protein
MKLKVVAEFPHDPDAFTQGLLYAGNDTLFESTGLYGKSSVRKVDLRTGKVEILEKMDNTYFGEGLTLLGERLFQVAWLTNTGFTYDLRNLSKVKPFKHHMKDGWGLATDGKALFGSDGTSTLYRMDPQTMKVTDKHIVRYNGREVRYLNELEYINNEVWANVWQSDCIARISPKDGSLLGWILLSKLSRGLLKSGHRGIDVLNGIAWDSDKQRLFVTGKLWPKLYQIKLKQASAKSRNYIEQQCLV

SEQ ID NO: 35317 - protein, 191 aa, Arabidopsis thaliana
  peptide (1)..(191): Ceres Seq. ID no. 13488584
  misc_feature (1)..(181): Pfam Name: Glutamine cyclotransferase Pfam Description: Glutamine cyclotransferase
  misc_feature (1)..(181): Pfam Name: Glutamine cyclotransferase Pfam Description: Glutamine cyclotransferase
  misc_feature (1)..(181): Pfam Name: Glutamine cyclotransferase Pfam Description: Glutamine cyclotransferase
  misc_feature (1)..(176): Homolog of NCBI NO: 21243055 NR Description: glutamine cyclotransferase
  misc_feature (1)..(174): Homolog of NCBI NO: 31790364 NR Description: putative glutamine cyclotransferase
  misc_feature (1)..(176): Homolog of NCBI NO: 22970826 NR Description: hypothetical protein [Chloroflexus aurantiacus]
  misc_feature (1)..(174): Homolog of NCBI NO: 21231655 NR Description: glutamine cyclotransferase
  misc_feature (1)..(178): Homolog of NCBI NO: 16126885 NR Description: glutamine cyclotransferase [Caulobacter
  misc_feature (1)..(176): Homolog of NCBI NO: 21243055 NR Description: glutamine cyclotransferase
  misc_feature (1)..(176): Homolog of NCBI NO: 22970826 NR Description: hypothetical protein [Chloroflexus aurantiacus]
  misc_feature (1)..(178): Homolog of NCBI NO: 16126885 NR Description: glutamine cyclotransferase [Caulobacter
  misc_feature (1)..(174): Homolog of NCBI NO: 21231655 NR Description: glutamine cyclotransferase
  misc_feature (1)..(176): Homolog of NCBI NO: 22970826 NR Description: hypothetical protein [Chloroflexus aurantiacus]
  misc_feature (1)..(174): Homolog of NCBI NO: 31790364 NR Description: putative glutamine cyclotransferase
  misc_feature (1)..(176): Homolog of NCBI NO: 21243055 NR Description: glutamine cyclotransferase
  misc_feature (1)..(191): Homolog of NCBI NO: 21536884 NR Description: glutamine cyclotransferase precursor-like protein
  misc_feature (1)..(191): Homolog of NCBI NO: 18416607 NR Description: glutamine cyclotransferase precursor - like
  misc_feature (1)..(191): Homolog of NCBI NO: 7484984 NR Description: glutaminyl-peptide cyclotransferase homolog
  misc_feature (1)..(190): Homolog of NCBI NO: 7484740 NR Description: glutaminyl-peptide cyclotransferase (EC 2.3.2.5)
  misc_feature (1)..(189): Homolog of NCBI NO: 24413973 NR Description: putative glutaminyl-peptide cyclotransferase
  misc_feature (1)..(191): Homolog of NCBI NO: 21536884 NR Description: glutamine cyclotransferase precursor-like protein
  misc_feature (1)..(191): Homolog of NCBI NO: 18416607 NR Description: glutamine cyclotransferase precursor - like
  misc_feature (1)..(191): Homolog of NCBI NO: 7484984 NR Description: glutaminyl-peptide cyclotransferase homolog
  misc_feature (1)..(190): Homolog of NCBI NO: 7484740 NR Description: glutaminyl-peptide cyclotransferase (EC 2.3.2.5)
  misc_feature (1)..(189): Homolog of NCBI NO: 24413973 NR Description: putative glutaminyl-peptide cyclotransferase
  misc_feature (1)..(178): Homolog of NCBI NO: 16126885 NR Description: glutamine cyclotransferase [Caulobacter
  misc_feature (1)..(174): Homolog of NCBI NO: 21231655 NR Description: glutamine cyclotransferase
  misc_feature (1)..(174): Homolog of NCBI NO: 31790364 NR Description: putative glutamine cyclotransferase
  misc_feature (1)..(189): Homolog of NCBI NO: 24413973 NR Description: putative glutaminyl-peptide cyclotransferase
  misc_feature (1)..(190): Homolog of NCBI NO: 7484740 NR Description: glutaminyl-peptide cyclotransferase (EC 2.3.2.5)
  misc_feature (1)..(191): Homolog of NCBI NO: 7484984 NR Description: glutaminyl-peptide cyclotransferase homolog
  misc_feature (1)..(191): Homolog of NCBI NO: 18416607 NR Description: glutamine cyclotransferase precursor - like
  misc_feature (1)..(191): Homolog of NCBI NO: 21536884 NR Description: glutamine cyclotransferase precursor-like protein
MDNTYFGEGLTLLGERLFQVAWLTNTGFTYDLRNLSKVKPFKHHMKDGWGLATDGKALFGSDGTSTLYRMDPQTMKVTDKHIVRYNGREVRYLNELEYINNEVWANVWQSDCIARISPKDGSLLGWILLSKLSRGLLKSGHRGIDVLNGIAWDSDKQRLFVTGKLWPKLYQIKLKQASAKSRNYIEQQCLV

SEQ ID NO: 35318 - protein, 147 aa, Arabidopsis thaliana
  peptide (1)..(147): Ceres Seq. ID no. 13488585
  misc_feature (1)..(137): Pfam Name: Glutamine cyclotransferase Pfam Description: Glutamine cyclotransferase
  misc_feature (1)..(137): Pfam Name: Glutamine cyclotransferase Pfam Description: Glutamine cyclotransferase
  misc_feature (1)..(137): Pfam Name: Glutamine cyclotransferase Pfam Description: Glutamine cyclotransferase
  misc_feature (1)..(132): Homolog of NCBI NO: 21243055 NR Description: glutamine cyclotransferase
  misc_feature (1)..(130): Homolog of NCBI NO: 31790364 NR Description: putative glutamine cyclotransferase
  misc_feature (1)..(132): Homolog of NCBI NO: 22970826 NR Description: hypothetical protein [Chloroflexus aurantiacus]
  misc_feature (1)..(130): Homolog of NCBI NO: 21231655 NR Description: glutamine cyclotransferase
  misc_feature (1)..(134): Homolog of NCBI NO: 16126885 NR Description: glutamine cyclotransferase [Caulobacter
  misc_feature (1)..(132): Homolog of NCBI NO: 21243055 NR Description: glutamine cyclotransferase
  misc_feature (1)..(132): Homolog of NCBI NO: 22970826 NR Description: hypothetical protein [Chloroflexus aurantiacus]
  misc_feature (1)..(134): Homolog of NCBI NO: 16126885 NR Description: glutamine cyclotransferase [Caulobacter
  misc_feature (1)..(130): Homolog of NCBI NO: 21231655 NR Description: glutamine cyclotransferase
  misc_feature (1)..(132): Homolog of NCBI NO: 22970826 NR Description: hypothetical protein [Chloroflexus aurantiacus]
  misc_feature (1)..(130): Homolog of NCBI NO: 31790364 NR Description: putative glutamine cyclotransferase
  misc_feature (1)..(132): Homolog of NCBI NO: 21243055 NR Description: glutamine cyclotransferase
  misc_feature (1)..(147): Homolog of NCBI NO: 21536884 NR Description: glutamine cyclotransferase precursor-like protein
  misc_feature (1)..(147): Homolog of NCBI NO: 18416607 NR Description: glutamine cyclotransferase precursor - like
  misc_feature (1)..(147): Homolog of NCBI NO: 7484984 NR Description: glutaminyl-peptide cyclotransferase homolog
  misc_feature (1)..(146): Homolog of NCBI NO: 7484740 NR Description: glutaminyl-peptide cyclotransferase (EC 2.3.2.5)
  misc_feature (1)..(145): Homolog of NCBI NO: 24413973 NR Description: putative glutaminyl-peptide cyclotransferase
  misc_feature (1)..(147): Homolog of NCBI NO: 21536884 NR Description: glutamine cyclotransferase precursor-like protein
  misc_feature (1)..(147): Homolog of NCBI NO: 18416607 NR Description: glutamine cyclotransferase precursor - like
  misc_feature (1)..(147): Homolog of NCBI NO: 7484984 NR Description: glutaminyl-peptide cyclotransferase homolog
  misc_feature (1)..(146): Homolog of NCBI NO: 7484740 NR Description: glutaminyl-peptide cyclotransferase (EC 2.3.2.5)
  misc_feature (1)..(145): Homolog of NCBI NO: 24413973 NR Description: putative glutaminyl-peptide cyclotransferase
  misc_feature (1)..(134): Homolog of NCBI NO: 16126885 NR Description: glutamine cyclotransferase [Caulobacter
  misc_feature (1)..(130): Homolog of NCBI NO: 21231655 NR Description: glutamine cyclotransferase
  misc_feature (1)..(130): Homolog of NCBI NO: 31790364 NR Description: putative glutamine cyclotransferase
  misc_feature (1)..(145): Homolog of NCBI NO: 24413973 NR Description: putative glutaminyl-peptide cyclotransferase
  misc_feature (1)..(146): Homolog of NCBI NO: 7484740 NR Description: glutaminyl-peptide cyclotransferase (EC 2.3.2.5)
  misc_feature (1)..(147): Homolog of NCBI NO: 7484984 NR Description: glutaminyl-peptide cyclotransferase homolog
  misc_feature (1)..(147): Homolog of NCBI NO: 18416607 NR Description: glutamine cyclotransferase precursor - like
  misc_feature (1)..(147): Homolog of NCBI NO: 21536884 NR Description: glutamine cyclotransferase precursor-like protein
MKDGWGLATDGKALFGSDGTSTLYRMDPQTMKVTDKHIVRYNGREVRYLNELEYINNEVWANVWQSDCIARISPKDGSLLGWILLSKLSRGLLKSGHRGIDVLNGIAWDSDKQRLFVTGKLWPKLYQIKLKQASAKSRNYIEQQCLV

SEQ ID NO: 35319 - DNA, 1334 bp, Arabidopsis thaliana
  misc_feature (1)..(1334): Ceres Seq. ID no. 13608536
  misc_feature: MA Experiment ID: 108434 Result: Up-regulated in Transcription
  misc_feature: MA Experiment 108434 PARAMETER Experiment Name: At_Root_Tips_cDNA_P Parameter: Tissue Value: Root Tips
  misc_feature: MA Experiment ID: 108461 Result: Up-regulated in Transcription
  misc_feature: MA Experiment 108461 PARAMETER Experiment Name: At_Germinating_Seeds_cDNA_P Parameter: Age (day) Value: 1 vs. 0
  misc_feature: MA Experiment 108461 PARAMETER Experiment Name: At_Germinating_Seeds_cDNA_P Parameter: Tissue Value: Germinating Seeds
  misc_feature: MA Experiment ID: 108462 Result: Up-regulated in Transcription
  misc_feature: MA Experiment 108462 PARAMETER Experiment Name: At_Germinating_Seeds_cDNA_P Parameter: Age (day) Value: 2 vs. 0
  misc_feature: MA Experiment 108462 PARAMETER Experiment Name: At_Germinating_Seeds_cDNA_P Parameter: Tissue Value: Germinating Seeds
  misc_feature: MA Experiment ID: 108463 Result: Up-regulated in Transcription
  misc_feature: MA Experiment 108463 PARAMETER Experiment Name: At_Germinating_Seeds_cDNA_P Parameter: Age (day) Value: 3 vs. 0
  misc_feature: MA Experiment 108463 PARAMETER Experiment Name: At_Germinating_Seeds_cDNA_P Parameter: Tissue Value: Germinating Seeds
  misc_feature: MA Experiment ID: 108464 Result: Up-regulated in Transcription
  misc_feature: MA Experiment 108464 PARAMETER Experiment Name: At_Germinating_Seeds_cDNA_P Parameter: Age (day) Value: 4 vs. 0
  misc_feature: MA Experiment 108464 PARAMETER Experiment Name: At_Germinating_Seeds_cDNA_P Parameter: Tissue Value: Germinating Seeds
  misc_feature: MA Experiment ID: 108561 Result: Down-regulated in Transcription
  misc_feature: MA Experiment 108561 PARAMETER Experiment Name: At_100uM_ABA_cDNA_P Parameter: Timepoint (hr) Value: 6
  misc_feature: MA Experiment 108561 PARAMETER Experiment Name: At_100uM_ABA_cDNA_P Parameter: Tissue Value: Aerial
  misc_feature: MA Experiment 108561 PARAMETER Experiment Name: At_100uM_ABA_cDNA_P Parameter: Treatment Value: 100uM ABA vs. No Treatment
  misc_feature: MA Experiment ID: 108573 Result: Down-regulated in Transcription
  misc_feature: MA Experiment 108573 PARAMETER Experiment Name: At_Drought_cDNA_P Parameter: Timepoint (hr) Value: 6
  misc_feature: MA Experiment 108573 PARAMETER Experiment Name: At_Drought_cDNA_P Parameter: Tissue Value: Aerial
  misc_feature: MA Experiment 108573 PARAMETER Experiment Name: At_Drought_cDNA_P Parameter: Treatment Value: Drought vs. No Drought
  misc_feature: MA Experiment ID: 108595 Result: Down-regulated in Transcription
  misc_feature: MA Experiment 108595 PARAMETER Experiment Name: At_Ler-pi_Ovule_cDNA_P Parameter: Plant Line Value: null
  misc_feature: MA Experiment ID: 20000111 Result: Down-regulated in Transcription
  misc_feature: MA Experiment 20000111 PARAMETER Experiment Name: At_42deg_Heat_cDNA_P Parameter: Temperature (deg C) Value: 42 vs. 22
  misc_feature: MA Experiment 20000111 PARAMETER Experiment Name: At_42deg_Heat_cDNA_P Parameter: Timepoint (hr) Value: 6
  misc_feature: MA Experiment 20000111 PARAMETER Experiment Name: At_42deg_Heat_cDNA_P Parameter: Tissue Value: Aerial
  misc_feature: MA Experiment ID: 20000113 Result: Down-regulated in Transcription
  misc_feature: MA Experiment 20000113 PARAMETER Experiment Name: At_42deg_Heat_cDNA_P Parameter: Temperature (deg C) Value: 42 vs. 22
  misc_feature: MA Experiment 20000113 PARAMETER Experiment Name: At_42deg_Heat_cDNA_P Parameter: Timepoint (hr) Value: 8
  misc_feature: MA Experiment 20000113 PARAMETER Experiment Name: At_42deg_Heat_cDNA_P Parameter: Tissue Value: Aerial
  misc_feature: MA Experiment ID: 20000173 Result: Down-regulated in Transcription
  misc_feature: MA Experiment 20000173 PARAMETER Experiment Name: At_42deg_Heat_P Parameter: Age (day) Value: 14
  misc_feature: MA Experiment 20000173 PARAMETER Experiment Name: At_42deg_Heat_P Parameter: Organism Value: A. thaliana
  misc_feature: MA Experiment 20000173 PARAMETER Experiment Name: At_42deg_Heat_P Parameter: Plant Line Value: WS
  misc_feature: MA Experiment 20000173 PARAMETER Experiment Name: At_42deg_Heat_P Parameter: Temperature (deg C) Value: 42 vs. 22
  misc_feature: MA Experiment 20000173 PARAMETER Experiment Name: At_42deg_Heat_P Parameter: Timepoint (hr) Value: 6
  misc_feature: MA Experiment 20000173 PARAMETER Experiment Name: At_42deg_Heat_P Parameter: Tissue Value: Aerial
  misc_feature: MA Experiment ID: 20000179 Result: Up-regulated in Transcription
  misc_feature: MA Experiment 20000179 PARAMETER Experiment Name: At_Germinating_Seeds_P Parameter: Age (hr) Value: 6 vs. 0
  misc_feature: MA Experiment 20000179 PARAMETER Experiment Name: At_Germinating_Seeds_P Parameter: Tissue Value: Germinating Seeds
  misc_feature: MA Experiment ID: 20000180 Result: Up-regulated in Transcription
  misc_feature: MA Experiment 20000180 PARAMETER Experiment Name: At_Germinating_Seeds_P Parameter: Age (hr) Value: 24 vs. 0
  misc_feature: MA Experiment 20000180 PARAMETER Experiment Name: At_Germinating_Seeds_P Parameter: Tissue Value: Germinating Seeds
  misc_feature: MA Experiment ID: 20000227 Result: Up-regulated in Transcription
  misc_feature: MA Experiment 20000227 PARAMETER Experiment Name: At_Root-Tips-vs-Tops_P Parameter: Tissue Value: Root Tips vs. Root Tops
  misc_feature: MA Experiment ID: 20000234 Result: Up-regulated in Transcription
  misc_feature: MA Experiment 20000234 PARAMETER Experiment Name: At_Siliques_P Parameter: Age (day) Value: 21
  misc_feature: MA Experiment 20000234 PARAMETER Experiment Name: At_Siliques_P Parameter: Organism Value: A. thaliana
  misc_feature: MA Experiment 20000234 PARAMETER Experiment Name: At_Siliques_P Parameter: Plant Line Value: WS
  misc_feature: MA Experiment 20000234 PARAMETER Experiment Name: At_Siliques_P Parameter: Tissue Value: Less Than 5mm Siliques vs. Whole Plant
  misc_feature: MA Experiment ID: 20000437 Result: Down-regulated in Transcription
  misc_feature: MA Experiment 20000437 PARAMETER Experiment Name: At_Drought_P Parameter: Age (day) Value: 8
  misc_feature: MA Experiment 20000437 PARAMETER Experiment Name: At_Drought_P Parameter: Organism Value: A. thaliana
  misc_feature: MA Experiment 20000437 PARAMETER Experiment Name: At_Drought_P Parameter: Plant Line Value: WS
  misc_feature: MA Experiment 20000437 PARAMETER Experiment Name: At_Drought_P Parameter: Timepoint (hr) Value: 24
  misc_feature: MA Experiment 20000437 PARAMETER Experiment Name: At_Drought_P Parameter: Tissue Value: Whole Plant
  misc_feature: MA Experiment 20000437 PARAMETER Experiment Name: At_Drought_P Parameter: Treatment Value: Drought vs. No Drought
  misc_feature: MA Experiment ID: 20001911 Result: Down-regulated in Transcription
  misc_feature: MA Experiment 20001911 PARAMETER Experiment Name: At_Drought_Reproduction_P Parameter: Age (day) Value: 40
  misc_feature: MA Experiment 20001911 PARAMETER Experiment Name: At_Drought_Reproduction_P Parameter: Organism Value: A. thaliana
  misc_feature: MA Experiment 20001911 PARAMETER Experiment Name: At_Drought_Reproduction_P Parameter: Plant Line Value: WS
  misc_feature: MA Experiment 20001911 PARAMETER Experiment Name: At_Drought_Reproduction_P Parameter: Timepoint (day) Value: 10
  misc_feature: MA Experiment 20001911 PARAMETER Experiment Name: At_Drought_Reproduction_P Parameter: Tissue Value: Flowers
  misc_feature: MA Experiment 20001911 PARAMETER Experiment Name: At_Drought_Reproduction_P Parameter: Treatment Value: Drought vs. No Drought
acaaaggaaaacgttaatggtggatctgagcactgtcaatgtcatcaccaccgaagtagagttgactccactcaacagaaactgaaactggaaagtttgagacttttaagatgtcagaaacagaatttaaagtgttgcttgagacattcacatttcctgctgattctgctcccttcaagagttgtcatgcctctaccatagttgaggttgttaaagatcatttcttggctgcgtatttcggaggcaccagggaaggagcacctgatgtcaaaatctggttgcagcatttcaaggatggtcaatgggattcaccggttattgttgatgaagagccaggagttccaatgtataaccctgtcttgttcaaacttccatctcatgagctcttattgttctacaaaatcggccaggaggttcaaaaatggagtggttgcatgaaacgatcatatgataaaggtataacttggactgaaagagaacagcttcctcctgggattctcggtcctatcaaaaacaagcccattttgcttgaagacggtactctcctttgcggatcatctgttgagagttggaattcttggggagcatggatggaggtcacttcagatgcgggtagaacatggagaaagaaagggccaatatacattcaaggcaagagtcttagcgtgatccaaccagttccataccaaaccgcagctgggaacttacggattttactcagatcctttactggcattgacagaatctgtatctcagagtctttggatggcggtgagaactggagttttgcagtaccaacggttctcccaaacccaaattcaggtattgatggagtcaagcttaaggatggtaggctagtgcttgcttacaacacagactcaagaggtgtgctcaaattaggagtttctttagacgacggtgattcatggaccgatattttaacgttggaggaatctccgggaatggagtattcgtacccggctgttatacaagccggagacggcaatgtccacgtcacctatacatataacaggacacaaattaagcatgtggtgctcaagactgcgacagatatcgattcgaagccataccgacatggtgaagcaggaggaggacacgtgaacttggatttgtacgaaccaaacattaattaattagctatttgtctcttgaaccatcgatgtggagtgtgacttccttcttacggaagaacaaagaatgttctctttcttgtcttgtaagttattgattgatcgattcttgagtttgtaaaagttgccactagttgatgaatattattgagattgtttataatatatttattgtaatcatac

SEQ ID NO: 35320 - protein, 347 aa, Arabidopsis thaliana
  peptide (1)..(347): Ceres Seq. ID no. 13608537
  misc_feature (15)..(319): Homolog of NCBI NO: 21232340 NR Description: conserved hypothetical protein
  misc_feature (15)..(316): Homolog of NCBI NO: 21243816 NR Description: conserved hypothetical protein
  misc_feature (5)..(316): Homolog of NCBI NO: 23617011 NR Description: hypothetial protein~similar to Arabidopsis
  misc_feature (4)..(317): Homolog of NCBI NO: 34393670 NR Description: alpha-rhamnosidase-like protein
  misc_feature (1)..(309): Homolog of NCBI NO: 26452755 NR Description: unknown protein [Arabidopsis thaliana]
  misc_feature (1)..(139): Homolog of NCBI NO: 9759267 NR Description: gene_id:MRI1.6~pir||D64592~similar to unknown
  misc_feature (137)..(347): Homolog of NCBI NO: 9759267 NR Description: gene_id:MRI1.6~pir||D64592~similar to unknown
  misc_feature (1)..(347): Homolog of NCBI NO: 21536870 NR Description: unknown [Arabidopsis thaliana]
  misc_feature (1)..(347): Homolog of NCBI NO: 30696919 NR Description: expressed protein [Arabidopsis thaliana]
  misc_feature (1)..(347): Homolog of NCBI NO: 30696915 NR Description: expressed protein [Arabidopsis thaliana]
MSETEFKVLLETFTFPADSAPFKSCHASTIVEVVKDHFLAAYFGGTREGAPDVKIWLQHFKDGQWDSPVIVDEEPGVPMYNPVLFKLPSHELLLFYKIGQEVQKWSGCMKRSYDKGITWTEREQLPPGILGPIKNKPILLEDGTLLCGSSVESWNSWGAWMEVTSDAGRTWRKKGPIYIQGKSLSVIQPVPYQTAAGNLRILLRSFTGIDRICISESLDGGENWSFAVPTVLPNPNSGIDGVKLKDGRLVLAYNTDSRGVLKLGVSLDDGDSWTDILTLEESPGMEYSYPAVIQAGDGNVHVTYTYNRTQIKHVVLKTATDIDSKPYRHGEAGGGHVNLDLYEPNIN

SEQ ID NO: 35321 - protein, 269 aa, Arabidopsis thaliana
  peptide (1)..(269): Ceres Seq. ID no. 13608538
  misc_feature (1)..(241): Homolog of NCBI NO: 21232340 NR Description: conserved hypothetical protein
  misc_feature (1)..(238): Homolog of NCBI NO: 21243816 NR Description: conserved hypothetical protein
  misc_feature (1)..(238): Homolog of NCBI NO: 23617011 NR Description: hypothetial protein~similar to Arabidopsis
  misc_feature (1)..(239): Homolog of NCBI NO: 34393670 NR Description: alpha-rhamnosidase-like protein
  misc_feature (1)..(231): Homolog of NCBI NO: 26452755 NR Description: unknown protein [Arabidopsis thaliana]
  misc_feature (1)..(61): Homolog of NCBI NO: 9759267 NR Description: gene_id:MRI1.6~pir||D64592~similar to unknown
  misc_feature (59)..(269): Homolog of NCBI NO: 9759267 NR Description: gene_id:MRI1.6~pir||D64592~similar to unknown
  misc_feature (1)..(269): Homolog of NCBI NO: 21536870 NR Description: unknown [Arabidopsis thaliana]
  misc_feature (1)..(269): Homolog of NCBI NO: 30696919 NR Description: expressed protein [Arabidopsis thaliana]
  misc_feature (1)..(269): Homolog of NCBI NO: 30696915 NR Description: expressed protein [Arabidopsis thaliana]
MYNPVLFKLPSHELLLFYKIGQEVQKWSGCMKRSYDKGITWTEREQLPPGILGPIKNKPILLEDGTLLCGSSVESWNSWGAWMEVTSDAGRTWRKKGPIYIQGKSLSVIQPVPYQTAAGNLRILLRSFTGIDRICISESLDGGENWSFAVPTVLPNPNSGIDGVKLKDGRLVLAYNTDSRGVLKLGVSLDDGDSWTDILTLEESPGMEYSYPAVIQAGDGNVHVTYTYNRTQIKHVVLKTATDIDSKPYRHGEAGGGHVNLDLYEPNIN

SEQ ID NO: 35322 - protein, 239 aa, Arabidopsis thaliana
  peptide (1)..(239): Ceres Seq. ID no. 13608539
  misc_feature (1)..(211): Homolog of NCBI NO: 21232340 NR Description: conserved hypothetical protein
  misc_feature (1)..(208): Homolog of NCBI NO: 21243816 NR Description: conserved hypothetical protein
  misc_feature (1)..(208): Homolog of NCBI NO: 23617011 NR Description: hypothetial protein~similar to Arabidopsis
  misc_feature (1)..(209): Homolog of NCBI NO: 34393670 NR Description: alpha-rhamnosidase-like protein
  misc_feature (1)..(201): Homolog of NCBI NO: 26452755 NR Description: unknown protein [Arabidopsis thaliana]
  misc_feature (1)..(31): Homolog of NCBI NO: 9759267 NR Description: gene_id:MRI1.6~pir||D64592~similar to unknown
  misc_feature (29)..(239): Homolog of NCBI NO: 9759267 NR Description: gene_id:MRI1.6~pir||D64592~similar to unknown
  misc_feature (1)..(239): Homolog of NCBI NO: 21536870 NR Description: unknown [Arabidopsis thaliana]
  misc_feature (1)..(239): Homolog of NCBI NO: 30696919 NR Description: expressed protein [Arabidopsis thaliana]
  misc_feature (1)..(239): Homolog of NCBI NO: 30696915 NR Description: expressed protein [Arabidopsis thaliana]
MKRSYDKGITWTEREQLPPGILGPIKNKPILLEDGTLLCGSSVESWNSWGAWMEVTSDAGRTWRKKGPIYIQGKSLSVIQPVPYQTAAGNLRILLRSFTGIDRICISESLDGGENWSFAVPTVLPNPNSGIDGVKLKDGRLVLAYNTDSRGVLKLGVSLDDGDSWTDILTLEESPGMEYSYPAVIQAGDGNVHVTYTYNRTQIKHVVLKTATDIDSKPYRHGEAGGGHVNLDLYEPNIN

SEQ ID NO: 35323 - DNA, 1343 bp, Arabidopsis thaliana
  misc_feature (1)..(1343): Ceres Seq. ID no. 12333607
  misc_feature: MA Experiment ID: 108434 Result: Down-regulated in Transcription
  misc_feature: MA Experiment 108434 PARAMETER Experiment Name: At_Root_Tips_cDNA_P Parameter: Tissue Value: Root Tips
  misc_feature: MA Experiment ID: 108463 Result: Up-regulated in Transcription
  misc_feature: MA Experiment 108463 PARAMETER Experiment Name: At_Germinating_Seeds_cDNA_P Parameter: Age (day) Value: 3 vs. 0
  misc_feature: MA Experiment 108463 PARAMETER Experiment Name: At_Germinating_Seeds_cDNA_P Parameter: Tissue Value: Germinating Seeds
  misc_feature: MA Experiment ID: 20000348 Result: Down-regulated in Transcription
  misc_feature: MA Experiment 20000348 PARAMETER Experiment Name: At_100uM_ABA_Sub_P Parameter: Age (day) Value: 14
  misc_feature: MA Experiment 20000348 PARAMETER Experiment Name: At_100uM_ABA_Sub_P Parameter: Organism Value: A. thaliana
  misc_feature: MA Experiment 20000348 PARAMETER Experiment Name: At_100uM_ABA_Sub_P Parameter: Plant Line Value: WS
  misc_feature: MA Experiment 20000348 PARAMETER Experiment Name: At_100uM_ABA_Sub_P Parameter: Timepoint (hr) Value: 1
  misc_feature: MA Experiment 20000348 PARAMETER Experiment Name: At_100uM_ABA_Sub_P Parameter: Tissue Value: Aerial
  misc_feature: MA Experiment 20000348 PARAMETER Experiment Name: At_100uM_ABA_Sub_P Parameter: Treatment Value: 100uM ABA vs. No Treatment
  misc_feature: MA Experiment ID: 20000355 Result: Down-regulated in Transcription
  misc_feature: MA Experiment 20000355 PARAMETER Experiment Name: At_Siliques_Sub_P Parameter: Age (day) Value: 21
  misc_feature: MA Experiment 20000355 PARAMETER Experiment Name: At_Siliques_Sub_P Parameter: Organism Value: A. thaliana
  misc_feature: MA Experiment 20000355 PARAMETER Experiment Name: At_Siliques_Sub_P Parameter: Plant Line Value: WS
  misc_feature: MA Experiment 20000355 PARAMETER Experiment Name: At_Siliques_Sub_P Parameter: Tissue Value: Less Than 5mm Siliques vs. Whole Plant
  misc_feature: MA Experiment ID: 20000440 Result: Down-regulated in Transcription
  misc_feature: MA Experiment 20000440 PARAMETER Experiment Name: At_Closed-Flower__Sub_P Parameter: Tissue Value: Closed Flower vs. Whole Plant
atcttcaccatcttcaatccatccgcccttgcagaccagagtcaaatccgcagcacaacaagccaatggctccatttctcggaggacctcagccaatcaactattgaagtctccatccccaccataatcgccgcctttctctcgttcttcgccgcctctatctccagcgccggaggaatcggcggcggtggactcttcctctcgataatgacaatcatcgccggtctcgaaatgaaaacagcttcaagcttctcagcgttcatggtaaccggcgtctctttcgctaacgtgggatgcaatcttttcctgagaaaccctaaatcaagagacaaaaccctaatcgacttcgatttagctcttactattcagccatgtctacttctcggagtaagtattggtgtgatctgtaaccgtatgttcccaaattggcttgtgttgtttctcttcgctgtgttcctcgcctggtcaacgatgaagacttgtaaaaagggagtttcttactggaatttggagtcggaaagagcgaagattaagagtccaagagacgttgatggcatcgaggtagcgagatcgccgcttctgagtgaagaaagagaagatgtgagacagagagggatgattaggtttccatggatgaagcttggagttttagtgatcatttggttattgttcttctctattaatcttttccgcggaaacaaatacggtcagggaatcatatcgatcaagccatgtggagctctctactggttcctctcctcgcttcaaatacctctcactatcttctttactctctgcatttacttcagtgacaatgttcaaagcaaccacacatcgcatagtaaccaaaactctgaacaggagactggagttggaggaagacaaaacaagttgatgctccctgtaatggctctcttggctggagttttgggtggcctctttggtattggtggtggaatgctcattagtcctcttcttctccaaatcggtattgctccagaggtaactgcagctacatgttcgttcatggttttgttttcttcatcaatgtctgcaatccagtacctactactaggcatggaacatgctggaaccgctgcgatatttgctctggtctgtttcgtggcatcactggttggactaatggtggttaagaaggttatagccaagtatgggagggcttcgatcattgtgtttgcagttggtatcgtcatggcacttagcactgtactgatgacaacccatggagcttttaatgtttggaatgattttgtctctggtcgctacatgggtttcaaattaccctgttaagaaccaaaattaaataaatccagttcttgttt

SEQ ID NO: 35324 - protein, 436 aa, Arabidopsis thaliana
  peptide (1)..(436): Ceres Seq. ID no. 12333608
  misc_feature (68)..(190): Homolog of NCBI NO: 15233581 NR Description: hypothetical protein; protein id: At4g21260.1
  misc_feature (307)..(436): Homolog of NCBI NO: 15233581 NR Description: hypothetical protein; protein id: At4g21260.1
  misc_feature (32)..(417): Homolog of NCBI NO: 34908752 NR Description: P0415A04.9 [Oryza sativa (japonica
  misc_feature (11)..(436): Homolog of NCBI NO: 34908754 NR Description: P0415A04.10 [Oryza sativa (japonica
  misc_feature (386)..(436): Homolog of NCBI NO: 15233579 NR Description: hypothetical protein; protein id: At4g21250.1
  misc_feature (22)..(366): Homolog of NCBI NO: 15233579 NR Description: hypothetical protein; protein id: At4g21250.1
  misc_feature (52)..(436): Homolog of NCBI NO: 11358507 NR Description: membrane protein [imported] - Arabidopsis
  misc_feature (7)..(436): Homolog of NCBI NO: 15220600 NR Description: unknown protein
  misc_feature (12)..(436): Homolog of NCBI NO: 6554197 NR Description: T23J18.20 [Arabidopsis thaliana]
  misc_feature (1)..(436): Homolog of NCBI NO: 15220419 NR Description: hypothetical protein; protein id: At1g11540.1
IFTIFNPSALADQSQIRSTTSQWLHFSEDLSQSTIEVSIPTIIAAFLSFFAASISSAGGIGGGGLFLSIMTIIAGLEMKTASSFSAFMVTGVSFANVGCNLFLRNPKSRDKTLIDFDLALTIQPCLLLGVSIGVICNRMFPNWLVLFLFAVFLAWSTMKTCKKGVSYWNLESERAKIKSPRDVDGIEVARSPLLSEEREDVRQRGMIRFPWMKLGVLVIIWLLFFSINLFRGNKYGQGIISIKPCGALYWFLSSLQIPLTIFFTLCIYFSDNVQSNHTSHSNQNSEQETGVGGRQNKLMLPVMALLAGVLGGLFGIGGGMLISPLLLQIGIAPEVTAATCSFMVLFSSSMSAIQYLLLGMEHAGTAAIFALVCFVASLVGLMVVKKVIAKYGRASIIVFAVGIVMALSTVLMTTHGAFNVWNDFVSGRYMGFKLPC

SEQ ID NO: 35325 - protein, 367 aa, Arabidopsis thaliana
  peptide (1)..(367): Ceres Seq. ID no. 12333609
  misc_feature (1)..(121): Homolog of NCBI NO: 15233581 NR Description: hypothetical protein; protein id: At4g21260.1
  misc_feature (238)..(367): Homolog of NCBI NO: 15233581 NR Description: hypothetical protein; protein id: At4g21260.1
  misc_feature (1)..(348): Homolog of NCBI NO: 34908752 NR Description: P0415A04.9 [Oryza sativa (japonica
  misc_feature (1)..(367): Homolog of NCBI NO: 34908754 NR Description: P0415A04.10 [Oryza sativa (japonica
  misc_feature (317)..(367): Homolog of NCBI NO: 15233579 NR Description: hypothetical protein; protein id: At4g21250.1
  misc_feature (1)..(297): Homolog of NCBI NO: 15233579 NR Description: hypothetical protein; protein id: At4g21250.1
  misc_feature (1)..(367): Homolog of NCBI NO: 11358507 NR Description: membrane protein [imported] - Arabidopsis
  misc_feature (1)..(367): Homolog of NCBI NO: 15220600 NR Description: unknown protein
  misc_feature (1)..(367): Homolog of NCBI NO: 6554197 NR Description: T23J18.20 [Arabidopsis thaliana]
  misc_feature (1)..(367): Homolog of NCBI NO: 15220419 NR Description: hypothetical protein; protein id: At1g11540.1
MTIIAGLEMKTASSFSAFMVTGVSFANVGCNLFLRNPKSRDKTLIDFDLALTIQPCLLLGVSIGVICNRMFPNWLVLFLFAVFLAWSTMKTCKKGVSYWNLESERAKIKSPRDVDGIEVARSPLLSEEREDVRQRGMIRFPWMKLGVLVIIWLLFFSINLFRGNKYGQGIISIKPCGALYWFLSSLQIPLTIFFTLCIYFSDNVQSNHTSHSNQNSEQETGVGGRQNKLMLPVMALLAGVLGGLFGIGGGMLISPLLLQIGIAPEVTAATCSFMVLFSSSMSAIQYLLLGMEHAGTAAIFALVCFVASLVGLMVVKKVIAKYGRASIIVFAVGIVMALSTVLMTTHGAFNVWNDFVSGRYMGFKLPC

SEQ ID NO: 35326 - protein, 359 aa, Arabidopsis thaliana
  peptide (1)..(359): Ceres Seq. ID no. 12333610
  misc_feature (1)..(113): Homolog of NCBI NO: 15233581 NR Description: hypothetical protein; protein id: At4g21260.1
  misc_feature (230)..(359): Homolog of NCBI NO: 15233581 NR Description: hypothetical protein; protein id: At4g21260.1
  misc_feature (1)..(340): Homolog of NCBI NO: 34908752 NR Description: P0415A04.9 [Oryza sativa (japonica
  misc_feature (1)..(359): Homolog of NCBI NO: 34908754 NR Description: P0415A04.10 [Oryza sativa (japonica
  misc_feature (309)..(359): Homolog of NCBI NO: 15233579 NR Description: hypothetical protein; protein id: At4g21250.1
  misc_feature (1)..(289): Homolog of NCBI NO: 15233579 NR Description: hypothetical protein; protein id: At4g21250.1
  misc_feature (1)..(359): Homolog of NCBI NO: 11358507 NR Description: membrane protein [imported] - Arabidopsis
  misc_feature (1)..(359): Homolog of NCBI NO: 15220600 NR Description: unknown protein
  misc_feature (1)..(359): Homolog of NCBI NO: 6554197 NR Description: T23J18.20 [Arabidopsis thaliana]
  misc_feature (1)..(359): Homolog of NCBI NO: 15220419 NR Description: hypothetical protein; protein id: At1g11540.1
MKTASSFSAFMVTGVSFANVGCNLFLRNPKSRDKTLIDFDLALTIQPCLLLGVSIGVICNRMFPNWLVLFLFAVFLAWSTMKTCKKGVSYWNLESERAKIKSPRDVDGIEVARSPLLSEEREDVRQRGMIRFPWMKLGVLVIIWLLFFSINLFRGNKYGQGIISIKPCGALYWFLSSLQIPLTIFFTLCIYFSDNVQSNHTSHSNQNSEQETGVGGRQNKLMLPVMALLAGVLGGLFGIGGGMLISPLLLQIGIAPEVTAATCSFMVLFSSSMSAIQYLLLGMEHAGTAAIFALVCFVASLVGLMVVKKVIAKYGRASIIVFAVGIVMALSTVLMTTHGAFNVWNDFVSGRYMGFKLPC

SEQ ID NO: 35327 - DNA, 1624 bp, Arabidopsis thaliana
  misc_feature (1)..(1624): Ceres Seq. ID no. 12738384
  misc_feature: MA Experiment ID: 108434 Result: Up-regulated in Transcription
  misc_feature: MA Experiment 108434 PARAMETER Experiment Name: At_Root_Tips_cDNA_P Parameter: Tissue Value: Root Tips
  misc_feature: MA Experiment ID: 108462 Result: Down-regulated in Transcription
  misc_feature: MA Experiment 108462 PARAMETER Experiment Name: At_Germinating_Seeds_cDNA_P Parameter: Age (day) Value: 2 vs. 0
  misc_feature: MA Experiment 108462 PARAMETER Experiment Name: At_Germinating_Seeds_cDNA_P Parameter: Tissue Value: Germinating Seeds
  misc_feature: MA Experiment ID: 108463 Result: Down-regulated in Transcription
  misc_feature: MA Experiment 108463 PARAMETER Experiment Name: At_Germinating_Seeds_cDNA_P Parameter: Age (day) Value: 3 vs. 0
  misc_feature: MA Experiment 108463 PARAMETER Experiment Name: At_Germinating_Seeds_cDNA_P Parameter: Tissue Value: Germinating Seeds
  misc_feature: MA Experiment ID: 108464 Result: Down-regulated in Transcription
  misc_feature: MA Experiment 108464 PARAMETER Experiment Name: At_Germinating_Seeds_cDNA_P Parameter: Age (day) Value: 4 vs. 0
  misc_feature: MA Experiment 108464 PARAMETER Experiment Name: At_Germinating_Seeds_cDNA_P Parameter: Tissue Value: Germinating Seeds
  misc_feature: MA Experiment ID: 20000224 Result: Up-regulated in Transcription
  misc_feature: MA Experiment ID: 20000227 Result: Up-regulated in Transcription
  misc_feature: MA Experiment 20000227 PARAMETER Experiment Name: At_Root-Tips-vs-Tops_P Parameter: Tissue Value: Root Tips vs. Root Tops
  misc_feature: MA Experiment ID: 20000451 Result: Down-regulated in Transcription
  misc_feature: MA Experiment 20000451 PARAMETER Experiment Name: At_CS6879_Shoots-Roots_P Parameter: Age (day) Value: 14
  misc_feature: MA Experiment 20000451 PARAMETER Experiment Name: At_CS6879_Shoots-Roots_P Parameter: Organism Value: A. thaliana
  misc_feature: MA Experiment 20000451 PARAMETER Experiment Name: At_CS6879_Shoots-Roots_P Parameter: Plant Line Value: CS6879 vs. WS
  misc_feature: MA Experiment 20000451 PARAMETER Experiment Name: At_CS6879_Shoots-Roots_P Parameter: Tissue Value: Roots
  misc_feature: MA Experiment ID: 20000452 Result: Down-regulated in Transcription
  misc_feature: MA Experiment 20000452 PARAMETER Experiment Name: At_CS6879_Shoots-Roots_P Parameter: Age (day) Value: 14
  misc_feature: MA Experiment 20000452 PARAMETER Experiment Name: At_CS6879_Shoots-Roots_P Parameter: Organism Value: A. thaliana
  misc_feature: MA Experiment 20000452 PARAMETER Experiment Name: At_CS6879_Shoots-Roots_P Parameter: Plant Line Value: CS6879 vs. WS
  misc_feature: MA Experiment 20000452 PARAMETER Experiment Name: At_CS6879_Shoots-Roots_P Parameter: Tissue Value: Shoots
  misc_feature: MA Experiment ID: 20000573 Result: Down-regulated in Transcription
  misc_feature: MA Experiment 20000573 PARAMETER Experiment Name: At_100uM_ABA_Mutants__P Parameter: Organism Value: A. thaliana
  misc_feature: MA Experiment 20000573 PARAMETER Experiment Name: At_100uM_ABA_Mutants__P Parameter: Plant Line Value: CS22 vs. Ler wt
  misc_feature: MA Experiment 20000573 PARAMETER Experiment Name: At_100uM_ABA_Mutants__P Parameter: Timepoint (hr) Value: N/A
  misc_feature: MA Experiment 20000573 PARAMETER Experiment Name: At_100uM_ABA_Mutants__P Parameter: Tissue Value: Whole Plant
  misc_feature: MA Experiment 20000573 PARAMETER Experiment Name: At_100uM_ABA_Mutants__P Parameter: Treatment Value: None
  misc_feature: MA Experiment ID: 20000574 Result: Down-regulated in Transcription
  misc_feature: MA Experiment 20000574 PARAMETER Experiment Name: At_100uM_ABA_Mutants__P Parameter: Organism Value: A. thaliana
  misc_feature: MA Experiment 20000574 PARAMETER Experiment Name: At_100uM_ABA_Mutants__P Parameter: Plant Line Value: CS23 vs. Ler wt
  misc_feature: MA Experiment 20000574 PARAMETER Experiment Name: At_100uM_ABA_Mutants__P Parameter: Timepoint (hr) Value: N/A
  misc_feature: MA Experiment 20000574 PARAMETER Experiment Name: At_100uM_ABA_Mutants__P Parameter: Tissue Value: Whole Plant
  misc_feature: MA Experiment 20000574 PARAMETER Experiment Name: At_100uM_ABA_Mutants__P Parameter: Treatment Value: None
  misc_feature: MA Experiment ID: 20001557 Result: Up-regulated in Transcription
  misc_feature: MA Experiment 20001557 PARAMETER Experiment Name: At_Drought_Soil_Dry_P Parameter: Age (day) Value: 27
  misc_feature: MA Experiment 20001557 PARAMETER Experiment Name: At_Drought_Soil_Dry_P Parameter: Organism Value: A. thaliana
  misc_feature: MA Experiment 20001557 PARAMETER Experiment Name: At_Drought_Soil_Dry_P Parameter: Plant Line Value: WS
  misc_feature: MA Experiment 20001557 PARAMETER Experiment Name: At_Drought_Soil_Dry_P Parameter: Post Timepoint (hr) Value: 3
  misc_feature: MA Experiment 20001557 PARAMETER Experiment Name: At_Drought_Soil_Dry_P Parameter: Post-Treatment Value: Re-Water vs. No Drought
  misc_feature: MA Experiment 20001557 PARAMETER Experiment Name: At_Drought_Soil_Dry_P Parameter: Timepoint (day) Value: 13
  misc_feature: MA Experiment 20001557 PARAMETER Experiment Name: At_Drought_Soil_Dry_P Parameter: Treatment Value: Drought vs. No Drought
  misc_feature: MA Experiment ID: 20001558 Result: Up-regulated in Transcription
  misc_feature: MA Experiment 20001558 PARAMETER Experiment Name: At_Drought_Soil_Dry_P Parameter: Age (day) Value: 27
  misc_feature: MA Experiment 20001558 PARAMETER Experiment Name: At_Drought_Soil_Dry_P Parameter: Organism Value: A. thaliana
  misc_feature: MA Experiment 20001558 PARAMETER Experiment Name: At_Drought_Soil_Dry_P Parameter: Plant Line Value: WS
  misc_feature: MA Experiment 20001558 PARAMETER Experiment Name: At_Drought_Soil_Dry_P Parameter: Post Timepoint (hr) Value: 6
  misc_feature: MA Experiment 20001558 PARAMETER Experiment Name: At_Drought_Soil_Dry_P Parameter: Post-Treatment Value: Re-Water vs. No Drought
  misc_feature: MA Experiment 20001558 PARAMETER Experiment Name: At_Drought_Soil_Dry_P Parameter: Timepoint (day) Value: 13
  misc_feature: MA Experiment 20001558 PARAMETER Experiment Name: At_Drought_Soil_Dry_P Parameter: Treatment Value: Drought vs. No Drought
gtcgatttagccctaacctatacggctgctacatccagatttcctcatcctctattagggaagaagaaccaaaaccctaatcctatcttctcctcttataaatcgcttcaacaacagtttctttctcttctgatttgatccatgatttctcatctggaaccctagtttatacatccatcgggtgttactgttctttatctgggcaatcagtggttagtcaaaagtataggattttcatttaaagatttgattttgcgttgaaatcgaacgaacccagatttcatattttgtctctgttttggcttttttatctttttaggtgtttttgttccttttgtatatctgtcgagacttctaggtgtgaaatcaaagcttgtttggtttatatcgatcttggttttagctgaatcgttgttaagatggctggaggtggaaacaggagagatgaaggatcgatcacgatccagagcactaatttgtttgcagcattggacactcgtaagaagaagaagaagtctgacaaggcagggaagagcaaagggtcttctaagtcacgagagccagagaaggagcctgagcctcaggtctattgggctcctacgcctttgaaagttaagtcttgggctgatattgatgatgaagacgacgatgatgactattatgcaaccactgctcctcctcagtctggttggagtacttctctgccttcccatactgattccaaagacgttcatgttgaggaaagtgaaagtgaggaagatattcttgatgaaggtgatgatgatgtggaggaagagcaggaacaggaaacagaggtacaggttcatccagagcctgaggtgaagaaagctcctgaagttcctgcacctcctaaagaggcagagaggcaactttccaagaaagagaggaaaaagaaggaacttgctgagcttgaagctttgttggctgattttggagttgcccccaaggagaacaatggcctagaggaatctcaagaggctggacaagaaaagaaagaagatgtcaatggagagggagagaagaaggagaatgcagcaggtggggagtcaaaggcatcaaaaaagaagaaaaagaaggataagcagaaggaggtaaaagaatctcaagagcaacaagcaaacaacaatgccgatgctgtagatgaagctgctgggtctgaaccaactgaggaagaatctccaattgacgtcaaggaaaggataaagaagcttgcatccatgaagaagaagaagtcaggcaaagaggtggatgctgcagctaaagctgctgcggaggaggcagctgcaagacgtaagaagctggccgcggcaaagaagaaggagaagaatcactataaccaacagcctgtgcggtaaaatcctgaatcaccaccattttgatcttgatggaaatgcaaatatgaacatgtatttcgccgtatattgttcatatgagtctctgtcctaataaatcttttgaagggtctggttcttagagttaaagacattgaatcctttttctagtcttattacaatgaacaggctaaagacaaaactactctctggagattttcatttctttttgaacacctttgttttcttaatatcagaccttttttaggttc

SEQ ID NO: 35328 - protein, 318 aa, Arabidopsis thaliana; identical to SEQ ID NO: 28893
  peptide (1)..(318): Ceres Seq. ID no. 12738385
  misc_feature (95)..(315): Pfam Name: Caldesmon Pfam Description: Caldesmon
  misc_feature (25)..(308): Homolog of NCBI NO: 23001116 NR Description: hypothetical protein [Magnetococcus sp. MC-1]
  misc_feature (25)..(301): Homolog of NCBI NO: 8096269 NR Description: KED [Nicotiana tabacum]
  misc_feature (107)..(318): Homolog of NCBI NO: 7522210 NR Description: hypothetical protein pAFD103 - apple tree
  misc_feature (1)..(130): Homolog of NCBI NO: 34906156 NR Description: P0509B06.15 [Oryza sativa (japonica
  misc_feature (108)..(318): Homolog of NCBI NO: 34906156 NR Description: P0509B06.15 [Oryza sativa (japonica
  misc_feature (1)..(318): Homolog of NCBI NO: 33620414 NR Description: M355 [Lilium longiflorum]
  misc_feature (1)..(318): Homolog of NCBI NO: 15233865 NR Description: putative protein; protein id: At4g32610.1
  misc_feature (1)..(318): Homolog of NCBI NO: 17529066 NR Description: unknown protein [Arabidopsis thaliana]
  misc_feature (1)..(318): Homolog of NCBI NO: 21537167 NR Description: unknown [Arabidopsis thaliana]
  misc_feature (1)..(318): Homolog of NCBI NO: 18400901 NR Description: expressed protein

SEQ ID NO: 35329 - DNA, 919 bp, Arabidopsis thaliana
  misc_feature (1)..(919): Ceres Seq. ID no. 13497757
  misc_feature: MA Experiment ID: 108434 Result: Up-regulated in Transcription
  misc_feature: MA Experiment 108434 PARAMETER Experiment Name: At_Root_Tips_cDNA_P Parameter: Tissue Value: Root Tips
  misc_feature: MA Experiment ID: 108461 Result: Down-regulated in Transcription
  misc_feature: MA Experiment 108461 PARAMETER Experiment Name: At_Germinating_Seeds_cDNA_P Parameter: Age (day) Value: 1 vs. 0
  misc_feature: MA Experiment 108461 PARAMETER Experiment Name: At_Germinating_Seeds_cDNA_P Parameter: Tissue Value: Germinating Seeds
  misc_feature: MA Experiment ID: 108462 Result: Down-regulated in Transcription
  misc_feature: MA Experiment 108462 PARAMETER Experiment Name: At_Germinating_Seeds_cDNA_P Parameter: Age (day) Value: 2 vs. 0
  misc_feature: MA Experiment 108462 PARAMETER Experiment Name: At_Germinating_Seeds_cDNA_P Parameter: Tissue Value: Germinating Seeds
  misc_feature: MA Experiment ID: 108463 Result: Down-regulated in Transcription
  misc_feature: MA Experiment 108463 PARAMETER Experiment Name: At_Germinating_Seeds_cDNA_P Parameter: Age (day) Value: 3 vs. 0
  misc_feature: MA Experiment 108463 PARAMETER Experiment Name: At_Germinating_Seeds_cDNA_P Parameter: Tissue Value: Germinating Seeds
  misc_feature: MA Experiment ID: 108464 Result: Down-regulated in Transcription
  misc_feature: MA Experiment 108464 PARAMETER Experiment Name: At_Germinating_Seeds_cDNA_P Parameter: Age (day) Value: 4 vs. 0
  misc_feature: MA Experiment 108464 PARAMETER Experiment Name: At_Germinating_Seeds_cDNA_P Parameter: Tissue Value: Germinating Seeds
  misc_feature: MA Experiment ID: 20000180 Result: Down-regulated in Transcription
  misc_feature: MA Experiment 20000180 PARAMETER Experiment Name: At_Germinating_Seeds_P Parameter: Age (hr) Value: 24 vs. 0
  misc_feature: MA Experiment 20000180 PARAMETER Experiment Name: At_Germinating_Seeds_P Parameter: Tissue Value: Germinating Seeds
aacattcatttggaggaggagacctgaatctttgcaatctcgcaacagaaacggcgatgggaagatcagctctgattcacttgcttcgctcccaatcccgacgtctctcttcctccaccttcacttcaggatatcatcaccggtcaatagcaggatcatggtcatcatcagtgaacccgaaggtcagattccaggttccatcccttagccagagaagctgggcatcatttggagcaaagactagagaggacgatgatgagcacaagatcagcatcggaccccaagagaagaaagaagagaaggatggaggtgtggtttactatggaccaatctcatcaaccataaagaaagtgaaactcctctcactctccacttgctgtctatcagtctctcttggcccggtcatcactttcatgacttccccgggactgaatgtgatcatgaaaggtgctgttgcctctactgtgatcttccttagcgcatccacaaccgctgctctccactggtttgttagtccctacgtgcacaagctgaggtggcagcctggttcagacacttttgaggtcgagatgatgacttggctcggcacatttagcgcaaagacactgaaattctcagacatacgttatccagacacgcaaagaccgtatgtgagcttcaaggctgatgggaatttctactttgtggatgcagatcattgccctaacaaggcattgttggctaggctcactcctccaaaggatgctcatgactctgctttcaagaacttgtaatccaaattcgtttcttttgttatactctttttttgggtgtggatttttgttgggtttgtaagctctttaagatacttggatacctcctccccttctcatcactaatacccaaaaaaaatgcaaataagaaaagaccggtttgatcc

SEQ ID NO: 35330 - protein, 256 aa, Arabidopsis thaliana
  peptide (1)..(256): Ceres Seq. ID no. 13497758
  misc_feature (69)..(256): Homolog of NCBI NO: 29126334 NR Description: unknown protein [Oryza sativa (japonica
  misc_feature (19)..(256): Homolog of NCBI NO: 18403955 NR Description: expressed protein [Arabidopsis thaliana]
HSFGGGDLNLCNLATETAMGRSALIHLLRSQSRRLSSSTFTSGYHHRSIAGSWSSSVNPKVRFQVPSLSQRSWASFGAKTREDDDEHKISIGPQEKKEEKDGGVVYYGPISSTIKKVKLLSLSTCCLSVSLGPVITFMTSPGLNVIMKGAVASTVIFLSASTTAALHWFVSPYVHKLRWQPGSDTFEVEMMTWLGTFSAKTLKFSDIRYPDTQRPYVSFKADGNFYFVDADHCPNKALLARLTPPKDAHDSAFKNL

SEQ ID NO: 35331 - protein, 238 aa, Arabidopsis thaliana
  peptide (1)..(238): Ceres Seq. ID no. 13497759
  misc_feature (51)..(238): Homolog of NCBI NO: 29126334 NR Description: unknown protein [Oryza sativa (japonica
  misc_feature (1)..(238): Homolog of NCBI NO: 18403955 NR Description: expressed protein [Arabidopsis thaliana]
MGRSALIHLLRSQSRRLSSSTFTSGYHHRSIAGSWSSSVNPKVRFQVPSLSQRSWASFGAKTREDDDEHKISIGPQEKKEEKDGGVVYYGPISSTIKKVKLLSLSTCCLSVSLGPVITFMTSPGLNVIMKGAVASTVIFLSASTTAALHWFVSPYVHKLRWQPGSDTFEVEMMTWLGTFSAKTLKFSDIRYPDTQRPYVSFKADGNFYFVDADHCPNKALLARLTPPKDAHDSAFKNL

SEQ ID NO: 35332 - DNA, 893 bp, Arabidopsis thaliana
  misc_feature (1)..(893): Ceres Seq. ID no. 13491749
  misc_feature: MA Experiment ID: 108433 Result: Down-regulated in Transcription
  misc_feature: MA Experiment 108433 PARAMETER Experiment Name: At_rhl_Mutant2_cDNA_P Parameter: Age (day) Value: 7
  misc_feature: MA Experiment 108433 PARAMETER Experiment Name: At_rhl_Mutant2_cDNA_P Parameter: Organism Value: A. thaliana
  misc_feature: MA Experiment 108433 PARAMETER Experiment Name: At_rhl_Mutant2_cDNA_P Parameter: Plant Line Value: rhl Mutant vs. wt landsburg
  misc_feature: MA Experiment 108433 PARAMETER Experiment Name: At_rhl_Mutant2_cDNA_P Parameter: Tissue Value: Roots
  misc_feature: MA Experiment ID: 108461 Result: Up-regulated in Transcription
  misc_feature: MA Experiment 108461 PARAMETER Experiment Name: At_Germinating_Seeds_cDNA_P Parameter: Age (day) Value: 1 vs. 0
  misc_feature: MA Experiment 108461 PARAMETER Experiment Name: At_Germinating_Seeds_cDNA_P Parameter: Tissue Value: Germinating Seeds
  misc_feature: MA Experiment ID: 108462 Result: Up-regulated in Transcription
  misc_feature: MA Experiment 108462 PARAMETER Experiment Name: At_Germinating_Seeds_cDNA_P Parameter: Age (day) Value: 2 vs. 0
  misc_feature: MA Experiment 108462 PARAMETER Experiment Name: At_Germinating_Seeds_cDNA_P Parameter: Tissue Value: Germinating Seeds
  misc_feature: MA Experiment ID: 108463 Result: Up-regulated in Transcription
  misc_feature: MA Experiment 108463 PARAMETER Experiment Name: At_Germinating_Seeds_cDNA_P Parameter: Age (day) Value: 3 vs. 0
  misc_feature: MA Experiment 108463 PARAMETER Experiment Name: At_Germinating_Seeds_cDNA_P Parameter: Tissue Value: Germinating Seeds
  misc_feature: MA Experiment ID: 108464 Result: Up-regulated in Transcription
  misc_feature: MA Experiment 108464 PARAMETER Experiment Name: At_Germinating_Seeds_cDNA_P Parameter: Age (day) Value: 4 vs. 0
  misc_feature: MA Experiment 108464 PARAMETER Experiment Name: At_Germinating_Seeds_cDNA_P Parameter: Tissue Value: Germinating Seeds
  misc_feature: MA Experiment ID: 20000071 Result: Down-regulated in Transcription
  misc_feature: MA Experiment 20000071 PARAMETER Experiment Name: At_100uM_ABA_Mutants_cDNA_P Parameter: Plant Line Value: CS8104
  misc_feature: MA Experiment 20000071 PARAMETER Experiment Name: At_100uM_ABA_Mutants_cDNA_P Parameter: Timepoint (hr) Value: 6
  misc_feature: MA Experiment 20000071 PARAMETER Experiment Name: At_100uM_ABA_Mutants_cDNA_P Parameter: Tissue Value: Aerial
  misc_feature: MA Experiment 20000071 PARAMETER Experiment Name: At_100uM_ABA_Mutants_cDNA_P Parameter: Treatment Value: 100uM ABA vs. No Treatment
  misc_feature: MA Experiment ID: 20000117 Result: Down-regulated in Transcription
  misc_feature: MA Experiment 20000117 PARAMETER Experiment Name: At_100uM_ABA_Mutants_cDNA_P Parameter: Plant Line Value: Columbia
  misc_feature: MA Experiment 20000117 PARAMETER Experiment Name: At_100uM_ABA_Mutants_cDNA_P Parameter: Timepoint (hr) Value: 6
  misc_feature: MA Experiment 20000117 PARAMETER Experiment Name: At_100uM_ABA_Mutants_cDNA_P Parameter: Tissue Value: Aerial
  misc_feature: MA Experiment 20000117 PARAMETER Experiment Name: At_100uM_ABA_Mutants_cDNA_P Parameter: Treatment Value: 100uM ABA vs. No Treatment
  misc_feature: MA Experiment ID: 20000173 Result: Down-regulated in Transcription
  misc_feature: MA Experiment 20000173 PARAMETER Experiment Name: At_42deg_Heat_P Parameter: Age (day) Value: 14
  misc_feature: MA Experiment 20000173 PARAMETER Experiment Name: At_42deg_Heat_P Parameter: Organism Value: A. thaliana
  misc_feature: MA Experiment 20000173 PARAMETER Experiment Name: At_42deg_Heat_P Parameter: Plant Line Value: WS
  misc_feature: MA Experiment 20000173 PARAMETER Experiment Name: At_42deg_Heat_P Parameter: Temperature (deg C) Value: 42 vs. 22
  misc_feature: MA Experiment 20000173 PARAMETER Experiment Name: At_42deg_Heat_P Parameter: Timepoint (hr) Value: 6
  misc_feature: MA Experiment 20000173 PARAMETER Experiment Name: At_42deg_Heat_P Parameter: Tissue Value: Aerial
  misc_feature: MA Experiment ID: 20000180 Result: Up-regulated in Transcription
  misc_feature: MA Experiment 20000180 PARAMETER Experiment Name: At_Germinating_Seeds_P Parameter: Age (hr) Value: 24 vs. 0
  misc_feature: MA Experiment 20000180 PARAMETER Experiment Name: At_Germinating_Seeds_P Parameter: Tissue Value: Germinating Seeds
  misc_feature: MA Experiment ID: 20000184 Result: Up-regulated in Transcription
  misc_feature: MA Experiment 20000184 PARAMETER Experiment Name: At_Shoots__P Parameter: Age (day) Value: 7
  misc_feature: MA Experiment 20000184 PARAMETER Experiment Name: At_Shoots__P Parameter: Tissue Value: Shoots vs. Whole Plant
  misc_feature: MA Experiment ID: 20000185 Result: Up-regulated in Transcription
  misc_feature: MA Experiment 20000185 PARAMETER Experiment Name: At_Roots__P Parameter: Age (day) Value: 7 vs. 21
  misc_feature: MA Experiment 20000185 PARAMETER Experiment Name: At_Roots__P Parameter: Organism Value: A. thaliana
  misc_feature: MA Experiment 20000185 PARAMETER Experiment Name: At_Roots__P Parameter: Tissue Value: Roots vs. Whole Plant
  misc_feature: MA Experiment ID: 20000439 Result: Up-regulated in Transcription
  misc_feature: MA Experiment 20000439 PARAMETER Experiment Name: At_Roots__P Parameter: Age (day) Value: 14 vs. 21
  misc_feature: MA Experiment 20000439 PARAMETER Experiment Name: At_Roots__P Parameter: Organism Value: A. thaliana
  misc_feature: MA Experiment 20000439 PARAMETER Experiment Name: At_Roots__P Parameter: Tissue Value: Roots vs. Whole Plant
  misc_feature: MA Experiment ID: 20001247 Result: Up-regulated in Transcription
  misc_feature: MA Experiment 20001247 PARAMETER Experiment Name: At_Far-red-induction_P Parameter: Age (day) Value: 7
  misc_feature: MA Experiment 20001247 PARAMETER Experiment Name: At_Far-red-induction_P Parameter: Light Value: Far-red vs. White
  misc_feature: MA Experiment 20001247 PARAMETER Experiment Name: At_Far-red-induction_P Parameter: Organism Value: A. thaliana
  misc_feature: MA Experiment 20001247 PARAMETER Experiment Name: At_Far-red-induction_P Parameter: Plant Line Value: Columbia
  misc_feature: MA Experiment 20001247 PARAMETER Experiment Name: At_Far-red-induction_P Parameter: Timepoint (hr) Value: 1
  misc_feature: MA Experiment 20001247 PARAMETER Experiment Name: At_Far-red-induction_P Parameter: Tissue Value: Whole Plant
  misc_feature: MA Experiment ID: 20001555 Result: Down-regulated in Transcription
  misc_feature: MA Experiment 20001555 PARAMETER Experiment Name: At_Drought_Soil_Dry_P Parameter: Age (day) Value: 24
  misc_feature: MA Experiment 20001555 PARAMETER Experiment Name: At_Drought_Soil_Dry_P Parameter: Organism Value: A. thaliana
  misc_feature: MA Experiment 20001555 PARAMETER Experiment Name: At_Drought_Soil_Dry_P Parameter: Plant Line Value: WS
  misc_feature: MA Experiment 20001555 PARAMETER Experiment Name: At_Drought_Soil_Dry_P Parameter: Post Timepoint (hr) Value: None
  misc_feature: MA Experiment 20001555 PARAMETER Experiment Name: At_Drought_Soil_Dry_P Parameter: Post-Treatment Value: None
  misc_feature: MA Experiment 20001555 PARAMETER Experiment Name: At_Drought_Soil_Dry_P Parameter: Timepoint (day) Value: 10
  misc_feature: MA Experiment 20001555 PARAMETER Experiment Name: At_Drought_Soil_Dry_P Parameter: Treatment Value: Drought vs. No Drought
  misc_feature: MA Experiment ID: 20001905 Result: Up-regulated in Transcription
  misc_feature: MA Experiment 20001905 PARAMETER Experiment Name: At_Drought_Reproduction_P Parameter: Age (day) Value: 40
  misc_feature: MA Experiment 20001905 PARAMETER Experiment Name: At_Drought_Reproduction_P Parameter: Organism Value: A. thaliana
  misc_feature: MA Experiment 20001905 PARAMETER Experiment Name: At_Drought_Reproduction_P Parameter: Plant Line Value: WS
  misc_feature: MA Experiment 20001905 PARAMETER Experiment Name: At_Drought_Reproduction_P Parameter: Timepoint (day) Value: 10
  misc_feature: MA Experiment 20001905 PARAMETER Experiment Name: At_Drought_Reproduction_P Parameter: Tissue Value: Rosettes
  misc_feature: MA Experiment 20001905 PARAMETER Experiment Name: At_Drought_Reproduction_P Parameter: Treatment Value: Drought vs. No Drought
  misc_feature: MA Experiment ID: 20001911 Result: Down-regulated in Transcription
  misc_feature: MA Experiment 20001911 PARAMETER Experiment Name: At_Drought_Reproduction_P Parameter: Age (day) Value: 40
  misc_feature: MA Experiment 20001911 PARAMETER Experiment Name: At_Drought_Reproduction_P Parameter: Organism Value: A. thaliana
  misc_feature: MA Experiment 20001911 PARAMETER Experiment Name: At_Drought_Reproduction_P Parameter: Plant Line Value: WS
  misc_feature: MA Experiment 20001911 PARAMETER Experiment Name: At_Drought_Reproduction_P Parameter: Timepoint (day) Value: 10
  misc_feature: MA Experiment 20001911 PARAMETER Experiment Name: At_Drought_Reproduction_P Parameter: Tissue Value: Flowers
  misc_feature: MA Experiment 20001911 PARAMETER Experiment Name: At_Drought_Reproduction_P Parameter: Treatment Value: Drought vs. No Drought
tggccgacagtttgaagtaaagccagcaaatcgtgaaagccatttacttttagatctctctctgcactctctgactttgtccgcaaagtagatctgctgcaatggcttctcctcttctcccaacttcgactactcctgatcaacttcccggcggcgatccacagttgctgagctctctacgcgtcctcttgtcccgcgttctagccaccgtccgtcacgcttctgcagatgccagaccctgggcagagctcgttgaccggtcagcgttttcccggccaccatcgctctcggaggcaacgtcacgagtaaggaagaacttttcctatttccgagccaattacataaccttagtggcaatcttactcgccgcgtctctgctcacgcaccctttcgctctcttcctcctcgcatcgctggccgcttcttggcttttcctctactttttccgtccggcggatcagccgttggtcattggaggacgcacgttctccgatcttgagacgctagggatactctgcctgtccactgtggtggtgatgttcatgaccagcgttggatcgctcttgatgtccactctagcagttgggatcatgggcgtggccatccacggagcgtttcgtgctcccgaagacctgtttcttgaagaacaagaagccattggatctggacttttcgcattcttcaacaacaatgcctctaatgcagctgccgctgccatagccacctcagcaatgtcacgcgttcgagtctgagattgttgaagagactacattcctacaccgcatttccaaagtgtgatatttattcatattgaattgttgtaacttgtaaccattcttttgtcatttctgttttgtttactttgttgctggaattttgaaacacaattcatc

SEQ ID NO: 35333 - protein, 216 aa, Arabidopsis thaliana
  peptide (1)..(216): Ceres Seq. ID no. 13491750
  misc_feature (29)..(197): Homolog of NCBI NO: 18390939 NR Description: expressed protein [Arabidopsis thaliana]
  misc_feature (1)..(192): Homolog of NCBI NO: 40539036 NR Description: putative prenylated rab acceptor protein
  misc_feature (1)..(204): Homolog of NCBI NO: 15450978 NR Description: putative protein [Arabidopsis thaliana]
  misc_feature (1)..(204): Homolog of NCBI NO: 15228824 NR Description: expressed protein [Arabidopsis thaliana]
  misc_feature (4)..(214): Homolog of NCBI NO: 15241022 NR Description: expressed protein [Arabidopsis thaliana]
  misc_feature (1)..(207): Homolog of NCBI NO: 15224494 NR Description: expressed protein [Arabidopsis thaliana]
  misc_feature (2)..(206): Homolog of NCBI NO: 15226664 NR Description: expressed protein [Arabidopsis thaliana]
  misc_feature (1)..(214): Homolog of NCBI NO: 18072825 NR Description: prenylated Rab receptor 2 [Arabidopsis thaliana]
  misc_feature (1)..(214): Homolog of NCBI NO: 15239101 NR Description: expressed protein [Arabidopsis thaliana]
  misc_feature (1)..(216): Homolog of NCBI NO: 15240698 NR Description: expressed protein [Arabidopsis thaliana]
MASPLLPTSTTPDQLPGGDPQLLSSLRVLLSRVLATVRHASADARPWAELVDRSAFSRPPSLSEATSRVRKNFSYFRANYITLVAILLAASLLTHPFALFLLASLAASWLFLYFFRPADQPLVIGGRTFSDLETLGILCLSTVVVMFMTSVGSLLMSTLAVGIMGVAIHGAFRAPEDLFLEEQEAIGSGLFAFFNNNASNAAAAAIATSAMSRVRV

SEQ ID NO: 35334 - DNA, 1980 bp, Arabidopsis thaliana
  misc_feature (1)..(1980): Ceres Seq. ID no. 13489005
  misc_feature: MA Experiment ID: 108461 Result: Up-regulated in Transcription
  misc_feature: MA Experiment 108461 PARAMETER Experiment Name: At_Germinating_Seeds_cDNA_P Parameter: Age (day) Value: 1 vs. 0
  misc_feature: MA Experiment 108461 PARAMETER Experiment Name: At_Germinating_Seeds_cDNA_P Parameter: Tissue Value: Germinating Seeds
  misc_feature: MA Experiment ID: 108462 Result: Up-regulated in Transcription
  misc_feature: MA Experiment 108462 PARAMETER Experiment Name: At_Germinating_Seeds_cDNA_P Parameter: Age (day) Value: 2 vs. 0
  misc_feature: MA Experiment 108462 PARAMETER Experiment Name: At_Germinating_Seeds_cDNA_P Parameter: Tissue Value: Germinating Seeds
  misc_feature: MA Experiment ID: 108463 Result: Up-regulated in Transcription
  misc_feature: MA Experiment 108463 PARAMETER Experiment Name: At_Germinating_Seeds_cDNA_P Parameter: Age (day) Value: 3 vs. 0
  misc_feature: MA Experiment 108463 PARAMETER Experiment Name: At_Germinating_Seeds_cDNA_P Parameter: Tissue Value: Germinating Seeds
  misc_feature: MA Experiment ID: 108464 Result: Up-regulated in Transcription
  misc_feature: MA Experiment 108464 PARAMETER Experiment Name: At_Germinating_Seeds_cDNA_P Parameter: Age (day) Value: 4 vs. 0
  misc_feature: MA Experiment 108464 PARAMETER Experiment Name: At_Germinating_Seeds_cDNA_P Parameter: Tissue Value: Germinating Seeds
  misc_feature: MA Experiment ID: 108577 Result: Down-regulated in Transcription
  misc_feature: MA Experiment 108577 PARAMETER Experiment Name: At_42deg_Heat_cDNA_P Parameter: Temperature (deg C) Value: 42 vs. 22
  misc_feature: MA Experiment 108577 PARAMETER Experiment Name: At_42deg_Heat_cDNA_P Parameter: Timepoint (hr) Value: 6
  misc_feature: MA Experiment 108577 PARAMETER Experiment Name: At_42deg_Heat_cDNA_P Parameter: Tissue Value: Aerial
  misc_feature: MA Experiment ID: 108585 Result: Down-regulated in Transcription
  misc_feature: MA Experiment 108585 PARAMETER Experiment Name: At_5mM_NaNP_cDNA_P Parameter: Timepoint (hr) Value: 6
  misc_feature: MA Experiment 108585 PARAMETER Experiment Name: At_5mM_NaNP_cDNA_P Parameter: Tissue Value: Aerial
  misc_feature: MA Experiment 108585 PARAMETER Experiment Name: At_5mM_NaNP_cDNA_P Parameter: Treatment Value: null
  misc_feature: MA Experiment ID: 108595 Result: Down-regulated in Transcription
  misc_feature: MA Experiment 108595 PARAMETER Experiment Name: At_Ler-pi_Ovule_cDNA_P Parameter: Plant Line Value: null
  misc_feature: MA Experiment ID: 108668 Result: Down-regulated in Transcription
  misc_feature: MA Experiment 108668 PARAMETER Experiment Name: At_2mM_SA_cDNA_P Parameter: Plant Line Value: WS
  misc_feature: MA Experiment 108668 PARAMETER Experiment Name: At_2mM_SA_cDNA_P Parameter: Timepoint (hr) Value: 6
  misc_feature: MA Experiment 108668 PARAMETER Experiment Name: At_2mM_SA_cDNA_P Parameter: Treatment Value: 2mM SA vs. No Treatment
  misc_feature: MA Experiment ID: 20000070 Result: Down-regulated in Transcription
  misc_feature: MA Experiment 20000070 PARAMETER Experiment Name: At_100uM_ABA_Mutants_cDNA_P Parameter: Plant Line Value: CS24
  misc_feature: MA Experiment 20000070 PARAMETER Experiment Name: At_100uM_ABA_Mutants_cDNA_P Parameter: Timepoint (hr) Value: 6
  misc_feature: MA Experiment 20000070 PARAMETER Experiment Name: At_100uM_ABA_Mutants_cDNA_P Parameter: Tissue Value: Aerial
  misc_feature: MA Experiment 20000070 PARAMETER Experiment Name: At_100uM_ABA_Mutants_cDNA_P Parameter: Treatment Value: 100uM ABA vs. No Treatment
  misc_feature: MA Experiment ID: 20000087 Result: Down-regulated in Transcription
  misc_feature: MA Experiment 20000087 PARAMETER Experiment Name: At_100uM_ABA_Mutants_cDNA_P Parameter: Plant Line Value: WS
  misc_feature: MA Experiment 20000087 PARAMETER Experiment Name: At_100uM_ABA_Mutants_cDNA_P Parameter: Timepoint (hr) Value: 6
  misc_feature: MA Experiment 20000087 PARAMETER Experiment Name: At_100uM_ABA_Mutants_cDNA_P Parameter: Tissue Value: Aerial
  misc_feature: MA Experiment 20000087 PARAMETER Experiment Name: At_100uM_ABA_Mutants_cDNA_P Parameter: Treatment Value: 100uM ABA vs. No Treatment
  misc_feature: MA Experiment ID: 20000111 Result: Down-regulated in Transcription
  misc_feature: MA Experiment 20000111 PARAMETER Experiment Name: At_42deg_Heat_cDNA_P Parameter: Temperature (deg C) Value: 42 vs. 22
  misc_feature: MA Experiment 20000111 PARAMETER Experiment Name: At_42deg_Heat_cDNA_P Parameter: Timepoint (hr) Value: 6
  misc_feature: MA Experiment 20000111 PARAMETER Experiment Name: At_42deg_Heat_cDNA_P Parameter: Tissue Value: Aerial
  misc_feature: MA Experiment ID: 20000113 Result: Down-regulated in Transcription
  misc_feature: MA Experiment 20000113 PARAMETER Experiment Name: At_42deg_Heat_cDNA_P Parameter: Temperature (deg C) Value: 42 vs. 22
  misc_feature: MA Experiment 20000113 PARAMETER Experiment Name: At_42deg_Heat_cDNA_P Parameter: Timepoint (hr) Value: 8
  misc_feature: MA Experiment 20000113 PARAMETER Experiment Name: At_42deg_Heat_cDNA_P Parameter: Tissue Value: Aerial
  misc_feature: MA Experiment ID: 20000117 Result: Down-regulated in Transcription
  misc_feature: MA Experiment 20000117 PARAMETER Experiment Name: At_100uM_ABA_Mutants_cDNA_P Parameter: Plant Line Value: Columbia
  misc_feature: MA Experiment 20000117 PARAMETER Experiment Name: At_100uM_ABA_Mutants_cDNA_P Parameter: Timepoint (hr) Value: 6
  misc_feature: MA Experiment 20000117 PARAMETER Experiment Name: At_100uM_ABA_Mutants_cDNA_P Parameter: Tissue Value: Aerial
  misc_feature: MA Experiment 20000117 PARAMETER Experiment Name: At_100uM_ABA_Mutants_cDNA_P Parameter: Treatment Value: 100uM ABA vs. No Treatment
  misc_feature: MA Experiment ID: 20000173 Result: Down-regulated in Transcription
  misc_feature: MA Experiment 20000173 PARAMETER Experiment Name: At_42deg_Heat_P Parameter: Age (day) Value: 14
  misc_feature: MA Experiment 20000173 PARAMETER Experiment Name: At_42deg_Heat_P Parameter: Organism Value: A. thaliana
  misc_feature: MA Experiment 20000173 PARAMETER Experiment Name: At_42deg_Heat_P Parameter: Plant Line Value: WS
  misc_feature: MA Experiment 20000173 PARAMETER Experiment Name: At_42deg_Heat_P Parameter: Temperature (deg C) Value: 42 vs. 22
  misc_feature: MA Experiment 20000173 PARAMETER Experiment Name: At_42deg_Heat_P Parameter: Timepoint (hr) Value: 6
  misc_feature: MA Experiment 20000173 PARAMETER Experiment Name: At_42deg_Heat_P Parameter: Tissue Value: Aerial
  misc_feature: MA Experiment ID: 20000180 Result: Up-regulated in Transcription
  misc_feature: MA Experiment 20000180 PARAMETER Experiment Name: At_Germinating_Seeds_P Parameter: Age (hr) Value: 24 vs. 0
  misc_feature: MA Experiment 20000180 PARAMETER Experiment Name: At_Germinating_Seeds_P Parameter: Tissue Value: Germinating Seeds
  misc_feature: MA Experiment ID: 20000185 Result: Down-regulated in Transcription
  misc_feature: MA Experiment 20000185 PARAMETER Experiment Name: At_Roots__P Parameter: Age (day) Value: 7 vs. 21
  misc_feature: MA Experiment 20000185 PARAMETER Experiment Name: At_Roots__P Parameter: Organism Value: A. thaliana
  misc_feature: MA Experiment 20000185 PARAMETER Experiment Name: At_Roots__P Parameter: Tissue Value: Roots vs. Whole Plant
  misc_feature: MA Experiment ID: 20000439 Result: Down-regulated in Transcription
  misc_feature: MA Experiment 20000439 PARAMETER Experiment Name: At_Roots__P Parameter: Age (day) Value: 14 vs. 21
  misc_feature: MA Experiment 20000439 PARAMETER Experiment Name: At_Roots__P Parameter: Organism Value: A. thaliana
  misc_feature: MA Experiment 20000439 PARAMETER Experiment Name: At_Roots__P Parameter: Tissue Value: Roots vs. Whole Plant
  misc_feature: MA Experiment ID: 20000496 Result: Up-regulated in Transcription
  misc_feature: MA Experiment 20000496 PARAMETER Experiment Name: At_Guard_Cells_P Parameter: Harvest Date Value: 7/19/2002
  misc_feature: MA Experiment 20000496 PARAMETER Experiment Name: At_Guard_Cells_P Parameter: Organism Value: Canola
  misc_feature: MA Experiment 20000496 PARAMETER Experiment Name: At_Guard_Cells_P Parameter: Tissue Value: Guard Cells vs. Leaves
  misc_feature: MA Experiment ID: 20001557 Result: Down-regulated in Transcription
  misc_feature: MA Experiment 20001557 PARAMETER Experiment Name: At_Drought_Soil_Dry_P Parameter: Age (day) Value: 27
  misc_feature: MA Experiment 20001557 PARAMETER Experiment Name: At_Drought_Soil_Dry_P Parameter: Organism Value: A. thaliana
  misc_feature: MA Experiment 20001557 PARAMETER Experiment Name: At_Drought_Soil_Dry_P Parameter: Plant Line Value: WS
  misc_feature: MA Experiment 20001557 PARAMETER Experiment Name: At_Drought_Soil_Dry_P Parameter: Post Timepoint (hr) Value: 3
  misc_feature: MA Experiment 20001557 PARAMETER Experiment Name: At_Drought_Soil_Dry_P Parameter: Post-Treatment Value: Re-Water vs. No Drought
  misc_feature: MA Experiment 20001557 PARAMETER Experiment Name: At_Drought_Soil_Dry_P Parameter: Timepoint (day) Value: 13
  misc_feature: MA Experiment 20001557 PARAMETER Experiment Name: At_Drought_Soil_Dry_P Parameter: Treatment Value: Drought vs. No Drought
  misc_feature: MA Experiment ID: 20001905 Result: Down-regulated in Transcription
  misc_feature: MA Experiment 20001905 PARAMETER Experiment Name: At_Drought_Reproduction_P Parameter: Age (day) Value: 40
  misc_feature: MA Experiment 20001905 PARAMETER Experiment Name: At_Drought_Reproduction_P Parameter: Organism Value: A. thaliana
  misc_feature: MA Experiment 20001905 PARAMETER Experiment Name: At_Drought_Reproduction_P Parameter: Plant Line Value: WS
  misc_feature: MA Experiment 20001905 PARAMETER Experiment Name: At_Drought_Reproduction_P Parameter: Timepoint (day) Value: 10
  misc_feature: MA Experiment 20001905 PARAMETER Experiment Name: At_Drought_Reproduction_P Parameter: Tissue Value: Rosettes
  misc_feature: MA Experiment 20001905 PARAMETER Experiment Name: At_Drought_Reproduction_P Parameter: Treatment Value: Drought vs. No Drought
ctacgtcagggaaaaaacaatggcatcatcatcatcatcacatttgttttgacgctccaagaaaatttgcatggcgacacattctatgatcattccttctccttcttcttcttcctcgtctctcgctactgctgcgtctccgtttaaagagactctaccactctttagtagatctctcacattcccgagaaaatccttgttttctcaggttcgcttgagattcttcgccgagaaacattctcagcttgatacttcaaatgggtgtgccactaatttcgcttctttacaagattctggagatcaacttacagaggaacatgttacaaaaggagagtctactcttagtattacagttgttggagcgtcaggggacttagccaagaagaagatatttcctgcattgtttgctctcttttatgagggttgtcttcctcaggacttttctgtttttggttatgctcggactaaactcactcatgaagagcttcgtgacatgattagtagtactttaacttgccggattgatcagagggaaaaatgtggggataagatggagcagttcttgaaaagatgcttttaccattcgggtcagtataactcggaagaggattttgcggaactaaacaagaagctcaaagagaaagaggcaggaaagatatcaaacaggctgtactatttgtcgatacccccaaacatattcgttgatgtggttaggtgtgcaagtcttagagcctcctcagagaatggctggacaagggtcattgtggaaaagccatttggtcgtgactctgaatcatccggagagttaactagatgtctgaaacagtatcttacagaggagcaaatcttcaggattgatcactatttgggaaaggagcttgttgagaacctttcagtgctccgattctcaaatcttgttttcgagcctctgtggtcaagaaattacatacgcaacgttcagctgattttttctgaggatttcggaacagaagggcgtggaggttactttgatcaatatggaatcatacgagacatcatgcaaaaccatctcttgcaaatacttgcactttttgcaatggagacgccagtgagcttagatgctgaggacataagaagtgaaaaggtgaaagttttgagatcaatgaaaccgttgcggcttgaagatgtggttgttggtcaatacaaaggccataacaagggaggaaaaacttatccaggttatacagacgatccaacggttccaaatcacagtctcactcctacatttgctgcagcagccatgttcatcaacaatgcgagatgggacggtgttccttttcttatgaaagctggaaaagctctccataccagaggagcagagatcagagttcagttcagacatgtcccaggaaacttgtacaagaaaagttttgctactaatttagacaatgcaacaaatgaactagtgattagagttcagcctgatgaagggatatacctgaggatcaacaacaaagttcctggtcttggaatgagactagatcgcagcgaccttaaccttctatatcgatccaggtatccaagagagataccagatgcatatgaaagactgcttctcgatgcaatcgaaggagagaggaggttgtttatcagaagtgatgagctagatgcagcatgggatctattcacaccggctttgaaggaactagaggagaagaaaatcattcctgagctctatccatatggaagcagaggtcctgttggtgcacattaccttgcatctaagtacaatgtgagatggggagatcttggagaagcttaagctttcgacagaaacaatatgatttggtgttaatatgagtaaactaacttgtcgatattatcaatgcgtagataaatccttgttaccaaaacttgctttttctctgacattttttgattgtttttggttctaaatcgagcatttcggaggaatgtaccaaaactcttgcaggaatagac

SEQ ID NO: 35335 - protein, 576 aa, Arabidopsis thaliana
  peptide (1)..(576): Ceres Seq. ID no. 13489006
  misc_feature (86)..(273): Pfam Name: Glucose-6-phosphate dehydrogenase, NAD binding domain Pfam Description: Glucose-6-phosphate dehydrogenase, NAD binding
  misc_feature (13)..(573): Homolog of NCBI NO: 5734502 NR Description: glucose-6-phosphate 1-dehydrogenase [Solanum
  misc_feature (86)..(573): Homolog of NCBI NO: 9392607 NR Description: plastidic glucose 6-phosphate dehydrogenase
  misc_feature (13)..(573): Homolog of NCBI NO: 24745908 NR Description: glucose 6-phosphate dehydrogenase [Solanum
  misc_feature (53)..(573): Homolog of NCBI NO: 33304517 NR Description: putative plastidic glucose-6-phosphate
  misc_feature (36)..(575): Homolog of NCBI NO: 3334193 NR Description: Glucose-6-phosphate 1-dehydrogenase, chloroplast
  misc_feature (10)..(573): Homolog of NCBI NO: 7431274 NR Description: glucose-6-phosphate 1-dehydrogenase (EC 1.1.1.49)
  misc_feature (14)..(573): Homolog of NCBI NO: 3023818 NR Description: Glucose-6-phosphate 1-dehydrogenase, chloroplast
  misc_feature (64)..(576): Homolog of NCBI NO: 1174336 NR Description: glucose-6-phosphate 1-dehydrogenase [Arabidopsis
  misc_feature (1)..(576): Homolog of NCBI NO: 3021305 NR Description: plastidic glucose-6-phosphate dehydrogenase
  misc_feature (1)..(576): Homolog of NCBI NO: 15238612 NR Description: glucose-6-phosphate dehydrogenase [Arabidopsis
MATHSMIIPSPSSSSSSLATAASPFKETLPLFSRSLTFPRKSLFSQVRLRFFAEKHSQLDTSNGCATNFASLQDSGDQLTEEHVTKGESTLSITVVGASGDLAKKKIFPALFALFYEGCLPQDFSVFGYARTKLTHEELRDMISSTLTCRIDQREKCGDKMEQFLKRCFYHSGQYNSEEDFAELNKKLKEKEAGKISNRLYYLSIPPNIFVDVVRCASLRASSENGWTRVIVEKPFGRDSESSGELTRCLKQYLTEEQIFRIDHYLGKELVENLSVLRFSNLVFEPLWSRNYIRNVQLIFSEDFGTEGRGGYFDQYGIIRDIMQNHLLQILALFAMETPVSLDAEDIRSEKVKVLRSMKPLRLEDVVVGQYKGHNKGGKTYPGYTDDPTVPNHSLTPTFAAAAMFINNARWDGVPFLMKAGKALHTRGAEIRVQFRHVPGNLYKKSFATNLDNATNELVIRVQPDEGIYLRINNKVPGLGMRLDRSDLNLLYRSRYPREIPDAYERLLLDAIEGERRLFIRSDELDAAWDLFTPALKELEEKKIIPELYPYGSRGPVGAHYLASKYNVRWGDLGEA

SEQ ID NO: 35336 - protein, 571 aa, Arabidopsis thaliana
  peptide (1)..(571): Ceres Seq. ID no. 13489007
  misc_feature (81)..(268): Pfam Name: Glucose-6-phosphate dehydrogenase, NAD binding domain Pfam Description: Glucose-6-phosphate dehydrogenase, NAD binding
  misc_feature (8)..(568): Homolog of NCBI NO: 5734502 NR Description: glucose-6-phosphate 1-dehydrogenase [Solanum
  misc_feature (81)..(568): Homolog of NCBI NO: 9392607 NR Description: plastidic glucose 6-phosphate dehydrogenase
  misc_feature (8)..(568): Homolog of NCBI NO: 24745908 NR Description: glucose 6-phosphate dehydrogenase [Solanum
  misc_feature (48)..(568): Homolog of NCBI NO: 33304517 NR Description: putative plastidic glucose-6-phosphate
  misc_feature (31)..(570): Homolog of NCBI NO: 3334193 NR Description: Glucose-6-phosphate 1-dehydrogenase, chloroplast
  misc_feature (5)..(568): Homolog of NCBI NO: 7431274 NR Description: glucose-6-phosphate 1-dehydrogenase (EC 1.1.1.49)
  misc_feature (9)..(568): Homolog of NCBI NO: 3023818 NR Description: Glucose-6-phosphate 1-dehydrogenase, chloroplast
  misc_feature (59)..(571): Homolog of NCBI NO: 1174336 NR Description: glucose-6-phosphate 1-dehydrogenase [Arabidopsis
  misc_feature (1)..(571): Homolog of NCBI NO: 3021305 NR Description: plastidic glucose-6-phosphate dehydrogenase
  misc_feature (1)..(571): Homolog of NCBI NO: 15238612 NR Description: glucose-6-phosphate dehydrogenase [Arabidopsis
MIIPSPSSSSSSLATAASPFKETLPLFSRSLTFPRKSLFSQVRLRFFAEKHSQLDTSNGCATNFASLQDSGDQLTEEHVTKGESTLSITVVGASGDLAKKKIFPALFALFYEGCLPQDFSVFGYARTKLTHEELRDMISSTLTCRIDQREKCGDKMEQFLKRCFYHSGQYNSEEDFAELNKKLKEKEAGKISNRLYYLSIPPNIFVDVVRCASLRASSENGWTRVIVEKPFGRDSESSGELTRCLKQYLTEEQIFRIDHYLGKELVENLSVLRFSNLVFEPLWSRNYIRNVQLIFSEDFGTEGRGGYFDQYGIIRDIMQNHLLQILALFAMETPVSLDAEDIRSEKVKVLRSMKPLRLEDVVVGQYKGHNKGGKTYPGYTDDPTVPNHSLTPTFAAAAMFINNARWDGVPFLMKAGKALHTRGAEIRVQFRHVPGNLYKKSFATNLDNATNELVIRVQPDEGIYLRINNKVPGLGMRLDRSDLNLLYRSRYPREIPDAYERLLLDAIEGERRLFIRSDELDAAWDLFTPALKELEEKKIIPELYPYGSRGPVGAHYLASKYNVRWGDLGEA

SEQ ID NO: 35337 - protein, 435 aa, Arabidopsis thaliana
  peptide (1)..(435): Ceres Seq. ID no. 13489008
  misc_feature (1)..(132): Pfam Name: Glucose-6-phosphate dehydrogenase, NAD binding domain Pfam Description: Glucose-6-phosphate dehydrogenase, NAD binding
  misc_feature (1)..(432): Homolog of NCBI NO: 5734502 NR Description: glucose-6-phosphate 1-dehydrogenase [Solanum
  misc_feature (1)..(432): Homolog of NCBI NO: 9392607 NR Description: plastidic glucose 6-phosphate dehydrogenase
  misc_feature (1)..(432): Homolog of NCBI NO: 24745908 NR Description: glucose 6-phosphate dehydrogenase [Solanum
  misc_feature (1)..(432): Homolog of NCBI NO: 33304517 NR Description: putative plastidic glucose-6-phosphate
  misc_feature (1)..(434): Homolog of NCBI NO: 3334193 NR Description: Glucose-6-phosphate 1-dehydrogenase, chloroplast
  misc_feature (1)..(432): Homolog of NCBI NO: 7431274 NR Description: glucose-6-phosphate 1-dehydrogenase (EC 1.1.1.49)
  misc_feature (1)..(432): Homolog of NCBI NO: 3023818 NR Description: Glucose-6-phosphate 1-dehydrogenase, chloroplast
  misc_feature (1)..(435): Homolog of NCBI NO: 1174336 NR Description: glucose-6-phosphate 1-dehydrogenase [Arabidopsis
  misc_feature (1)..(435): Homolog of NCBI NO: 3021305 NR Description: plastidic glucose-6-phosphate dehydrogenase
  misc_feature (1)..(435): Homolog of NCBI NO: 15238612 NR Description: glucose-6-phosphate dehydrogenase [Arabidopsis
MISSTLTCRIDQREKCGDKMEQFLKRCFYHSGQYNSEEDFAELNKKLKEKEAGKISNRLYYLSIPPNIFVDVVRCASLRASSENGWTRVIVEKPFGRDSESSGELTRCLKQYLTEEQIFRIDHYLGKELVENLSVLRFSNLVFEPLWSRNYIRNVQLIFSEDFGTEGRGGYFDQYGIIRDIMQNHLLQILALFAMETPVSLDAEDIRSEKVKVLRSMKPLRLEDVVVGQYKGHNKGGKTYPGYTDDPTVPNHSLTPTFAAAAMFINNARWDGVPFLMKAGKALHTRGAEIRVQFRHVPGNLYKKSFATNLDNATNELVIRVQPDEGIYLRINNKVPGLGMRLDRSDLNLLYRSRYPREIPDAYERLLLDAIEGERRLFIRSDELDAAWDLFTPALKELEEKKIIPELYPYGSRGPVGAHYLASKYNVRWGDLGEA

SEQ ID NO: 35338 - DNA, 637 bp, Arabidopsis thaliana
  misc_feature (1)..(637): Ceres Seq. ID no. 12322668
  misc_feature: MA Experiment ID: 108434 Result: Up-regulated in Transcription
  misc_feature: MA Experiment 108434 PARAMETER Experiment Name: At_Root_Tips_cDNA_P Parameter: Tissue Value: Root Tips
  misc_feature: MA Experiment ID: 108461 Result: Down-regulated in Transcription
  misc_feature: MA Experiment 108461 PARAMETER Experiment Name: At_Germinating_Seeds_cDNA_P Parameter: Age (day) Value: 1 vs. 0
  misc_feature: MA Experiment 108461 PARAMETER Experiment Name: At_Germinating_Seeds_cDNA_P Parameter: Tissue Value: Germinating Seeds
  misc_feature: MA Experiment ID: 108462 Result: Down-regulated in Transcription
  misc_feature: MA Experiment 108462 PARAMETER Experiment Name: At_Germinating_Seeds_cDNA_P Parameter: Age (day) Value: 2 vs. 0
  misc_feature: MA Experiment 108462 PARAMETER Experiment Name: At_Germinating_Seeds_cDNA_P Parameter: Tissue Value: Germinating Seeds
  misc_feature: MA Experiment ID: 108463 Result: Down-regulated in Transcription
  misc_feature: MA Experiment 108463 PARAMETER Experiment Name: At_Germinating_Seeds_cDNA_P Parameter: Age (day) Value: 3 vs. 0
  misc_feature: MA Experiment 108463 PARAMETER Experiment Name: At_Germinating_Seeds_cDNA_P Parameter: Tissue Value: Germinating Seeds
  misc_feature: MA Experiment ID: 108573 Result: Down-regulated in Transcription
  misc_feature: MA Experiment 108573 PARAMETER Experiment Name: At_Drought_cDNA_P Parameter: Timepoint (hr) Value: 6
  misc_feature: MA Experiment 108573 PARAMETER Experiment Name: At_Drought_cDNA_P Parameter: Tissue Value: Aerial
  misc_feature: MA Experiment 108573 PARAMETER Experiment Name: At_Drought_cDNA_P Parameter: Treatment Value: Drought vs. No Drought
  misc_feature: MA Experiment ID: 20000180 Result: Down-regulated in Transcription
  misc_feature: MA Experiment 20000180 PARAMETER Experiment Name: At_Germinating_Seeds_P Parameter: Age (hr) Value: 24 vs. 0
  misc_feature: MA Experiment 20000180 PARAMETER Experiment Name: At_Germinating_Seeds_P Parameter: Tissue Value: Germinating Seeds
  misc_feature: MA Experiment ID: 20000224 Result: Down-regulated in Transcription
attattgttgagtgttgagtttttttcgctccgcctctctgaaactcgccgctagtaagcttcttcttcacttgtgctcttcttcgacgagatgaaccgtattggattgataaggggatcatcatccaaggatgtagtccggagaacgtttgcagcagcagctagtaaagccaagaaaggtggcaaaggaggtggagccagcgatgctcctaaaggttccagcttgaccaaagagatcaaatccaccactgttgttggtgccaatactctcaaagacggatctgatcccaagatcttgcctgattctgattaccctgattggctctggcatctcctcgataagcgaccagctctcagtgagcttaggaggaagaacgtcgagactcttccctacgatgatctcaaacgttttgtcaagctcgacacacggggtaaaatcaaggagaacaactccatcaaggccaaaaactgagagatgtaagatgttttcaactctctcactgttgctgttttctttgtatgtgggaactatgcttgctaataagtagattcttccagttagattacatttccaaggcgttattatgctcttgtatgttctcagacactcttagtatatccaagaaattgctgcttc

SEQ ID NO: 35339 - protein, 126 aa, Arabidopsis thaliana
  peptide (1)..(126): Ceres Seq. ID no. 12322669
  misc_feature (15)..(126): Homolog of NCBI NO: 15241366 NR Description: putative protein; protein id: At5g14290.1
  misc_feature (1)..(126): Homolog of NCBI NO: 18395929 NR Description: expressed protein
MNRIGLIRGSSSKDVVRRTFAAAASKAKKGGKGGGASDAPKGSSLTKEIKSTTVVGANTLKDGSDPKILPDSDYPDWLWHLLDKRPALSELRRKNVETLPYDDLKRFVKLDTRGKIKENNSIKAKN

SEQ ID NO: 35340 - DNA, 788 bp, Arabidopsis thaliana
  misc_feature (1)..(788): Ceres Seq. ID no. 12738636
  misc_feature: MA Experiment ID: 108434 Result: Down-regulated in Transcription
  misc_feature: MA Experiment 108434 PARAMETER Experiment Name: At_Root_Tips_cDNA_P Parameter: Tissue Value: Root Tips
  misc_feature: MA Experiment ID: 108464 Result: Up-regulated in Transcription
  misc_feature: MA Experiment 108464 PARAMETER Experiment Name: At_Germinating_Seeds_cDNA_P Parameter: Age (day) Value: 4 vs. 0
  misc_feature: MA Experiment 108464 PARAMETER Experiment Name: At_Germinating_Seeds_cDNA_P Parameter: Tissue Value: Germinating Seeds
  misc_feature: MA Experiment ID: 108488 Result: Down-regulated in Transcription
  misc_feature: MA Experiment ID: 108573 Result: Up-regulated in Transcription
  misc_feature: MA Experiment 108573 PARAMETER Experiment Name: At_Drought_cDNA_P Parameter: Timepoint (hr) Value: 6
  misc_feature: MA Experiment 108573 PARAMETER Experiment Name: At_Drought_cDNA_P Parameter: Tissue Value: Aerial
  misc_feature: MA Experiment 108573 PARAMETER Experiment Name: At_Drought_cDNA_P Parameter: Treatment Value: Drought vs. No Drought
  misc_feature: MA Experiment ID: 108579 Result: Up-regulated in Transcription
  misc_feature: MA Experiment 108579 PARAMETER Experiment Name: At_4deg_Cold_cDNA_P Parameter: Temperature (deg C) Value: 4 vs. 22
  misc_feature: MA Experiment 108579 PARAMETER Experiment Name: At_4deg_Cold_cDNA_P Parameter: Timepoint (hr) Value: 6
  misc_feature: MA Experiment 108579 PARAMETER Experiment Name: At_4deg_Cold_cDNA_P Parameter: Tissue Value: Aerial
  misc_feature: MA Experiment ID: 108585 Result: Up-regulated in Transcription
  misc_feature: MA Experiment 108585 PARAMETER Experiment Name: At_5mM_NaNP_cDNA_P Parameter: Timepoint (hr) Value: 6
  misc_feature: MA Experiment 108585 PARAMETER Experiment Name: At_5mM_NaNP_cDNA_P Parameter: Tissue Value: Aerial
  misc_feature: MA Experiment 108585 PARAMETER Experiment Name: At_5mM_NaNP_cDNA_P Parameter: Treatment Value: null
  misc_feature: MA Experiment ID: 108594 Result: Up-regulated in Transcription
  misc_feature: MA Experiment 108594 PARAMETER Experiment Name: At_Ler-rhl_Root_cDNA_P Parameter: Plant Line Value: null
  misc_feature: MA Experiment ID: 108595 Result: Up-regulated in Transcription
  misc_feature: MA Experiment 108595 PARAMETER Experiment Name: At_Ler-pi_Ovule_cDNA_P Parameter: Plant Line Value: null
  misc_feature: MA Experiment ID: 20000068 Result: Up-regulated in Transcription
  misc_feature: MA Experiment ID: 20000111 Result: Up-regulated in Transcription
  misc_feature: MA Experiment 20000111 PARAMETER Experiment Name: At_42deg_Heat_cDNA_P Parameter: Temperature (deg C) Value: 42 vs. 22
  misc_feature: MA Experiment 20000111 PARAMETER Experiment Name: At_42deg_Heat_cDNA_P Parameter: Timepoint (hr) Value: 6
  misc_feature: MA Experiment 20000111 PARAMETER Experiment Name: At_42deg_Heat_cDNA_P Parameter: Tissue Value: Aerial
  misc_feature: MA Experiment ID: 20000113 Result: Up-regulated in Transcription
  misc_feature: MA Experiment 20000113 PARAMETER Experiment Name: At_42deg_Heat_cDNA_P Parameter: Temperature (deg C) Value: 42 vs. 22
  misc_feature: MA Experiment 20000113 PARAMETER Experiment Name: At_42deg_Heat_cDNA_P Parameter: Timepoint (hr) Value: 8
  misc_feature: MA Experiment 20000113 PARAMETER Experiment Name: At_42deg_Heat_cDNA_P Parameter: Tissue Value: Aerial
  misc_feature: MA Experiment ID: 20000173 Result: Up-regulated in Transcription
  misc_feature: MA Experiment 20000173 PARAMETER Experiment Name: At_42deg_Heat_P Parameter: Age (day) Value: 14
  misc_feature: MA Experiment 20000173 PARAMETER Experiment Name: At_42deg_Heat_P Parameter: Organism Value: A. thaliana
  misc_feature: MA Experiment 20000173 PARAMETER Experiment Name: At_42deg_Heat_P Parameter: Plant Line Value: WS
  misc_feature: MA Experiment 20000173 PARAMETER Experiment Name: At_42deg_Heat_P Parameter: Temperature (deg C) Value: 42 vs. 22
  misc_feature: MA Experiment 20000173 PARAMETER Experiment Name: At_42deg_Heat_P Parameter: Timepoint (hr) Value: 6
  misc_feature: MA Experiment 20000173 PARAMETER Experiment Name: At_42deg_Heat_P Parameter: Tissue Value: Aerial
  misc_feature: MA Experiment ID: 20000185 Result: Down-regulated in Transcription
  misc_feature: MA Experiment 20000185 PARAMETER Experiment Name: At_Roots__P Parameter: Age (day) Value: 7 vs. 21
  misc_feature: MA Experiment 20000185 PARAMETER Experiment Name: At_Roots__P Parameter: Organism Value: A. thaliana
  misc_feature: MA Experiment 20000185 PARAMETER Experiment Name: At_Roots__P Parameter: Tissue Value: Roots vs. Whole Plant
  misc_feature: MA Experiment ID: 20000439 Result: Down-regulated in Transcription
  misc_feature: MA Experiment 20000439 PARAMETER Experiment Name: At_Roots__P Parameter: Age (day) Value: 14 vs. 21
  misc_feature: MA Experiment 20000439 PARAMETER Experiment Name: At_Roots__P Parameter: Organism Value: A. thaliana
  misc_feature: MA Experiment 20000439 PARAMETER Experiment Name: At_Roots__P Parameter: Tissue Value: Roots vs. Whole Plant
  misc_feature: MA Experiment ID: 20000496 Result: Up-regulated in Transcription
  misc_feature: MA Experiment 20000496 PARAMETER Experiment Name: At_Guard_Cells_P Parameter: Harvest Date Value: 7/19/2002
  misc_feature: MA Experiment 20000496 PARAMETER Experiment Name: At_Guard_Cells_P Parameter: Organism Value: Canola
  misc_feature: MA Experiment 20000496 PARAMETER Experiment Name: At_Guard_Cells_P Parameter: Tissue Value: Guard Cells vs. Leaves
  misc_feature: MA Experiment ID: 20000794 Result: Up-regulated in Transcription
  misc_feature: MA Experiment 20000794 PARAMETER Experiment Name: At_Petals_P Parameter: Age (day) Value: 23-25 days
  misc_feature: MA Experiment 20000794 PARAMETER Experiment Name: At_Petals_P Parameter: Plant Line Value: WS
  misc_feature: MA Experiment 20000794 PARAMETER Experiment Name: At_Petals_P Parameter: Tissue Value: Petals vs. Whole plant
ctcttccaatttcgtttcgacatatttcgcgattcgtctaaggttttgttactgattgagaaaacatgggaggtgacaatgataatgacaaagacaaagggtttcatgggtatcctcccgctggatacccaccccctggggcttatccacccgctggatacccacaacaaggttaccctccaccacccggtgcttacccgcctgcaggttatcctccgggtgcctacccacctgcacctggtggttatcctccagcccctggttatggtggttatcctccagctcctggttatggaggttatcctcctgcacctggtcatggtggttaccctcctgctggctatcctgctcatcactcaggacacgcaggaggaattgggggtatgattgcaggtggctgcagctgcctatggagctcaccacgtagctcatagctctcacggtccttacggacatgctgcatatggtcacggttttggccatggtcatggctatggctatggtcatggtcatggtaagttcaagcatgggaagcacgggaagttcaagcatgggaagcatggaatgtttggaggaggcaagttcaagaagtggaagtgatctagttaataccttttgtgaatctgtctggactgaccaatgtttcaaataagccctaaacattatataagttgactttcgtcggttagattgctggttcgagttggaataattgaaacttaattagtatcaaatcttattgtatactttaaagctatcgttggctttataatgatagattctggttt

SEQ ID NO: 35341 - protein, 128 aa, Arabidopsis thaliana
  peptide (1)..(128): Ceres Seq. ID no. 12738637
LFQFRFDIFRDSSKVLLLIEKTWEVTMIMTKTKGFMGILPLDTHPLGLIHPLDTHNKVTLHHPVLTRLQVILRVPTHLHLVVILQPLVMVVILQLLVMEVILLHLVMVVTLLLAILLITQDTQEELGV

SEQ ID NO: 35342 - protein, 122 aa, Arabidopsis thaliana
  peptide (1)..(122): Ceres Seq. ID no. 12738638
  misc_feature (47)..(105): Pfam Name: Collagen triple helix repeat (20 copies) Pfam Description: Collagen triple helix repeat (20 copies)
  misc_feature (31)..(106): Homolog of NCBI NO: 13543234 NR Description: Unknown (protein for MGC:12025) [Mus musculus]
  misc_feature (1)..(105): Homolog of NCBI NO: 21553447 NR Description: putative glycine and proline-rich protein
  misc_feature (1)..(105): Homolog of NCBI NO: 18398103 NR Description: expressed protein
  misc_feature (1)..(111): Homolog of NCBI NO: 15238005 NR Description: glycine/proline-rich protein; protein id:
  misc_feature (1)..(110): Homolog of NCBI NO: 7487135 NR Description: hypothetical protein T18B16.170 - Arabidopsis
  misc_feature (12)..(113): Homolog of NCBI NO: 13543234 NR Description: Unknown (protein for MGC:12025) [Mus musculus]
  misc_feature (1)..(113): Homolog of NCBI NO: 6478148 NR Description: putative glycine and proline-rich protein
  misc_feature (12)..(113): Homolog of NCBI NO: 33668156 NR Description: GPRP [Oryza sativa (indica cultivar-group)]
  misc_feature (1)..(110): Homolog of NCBI NO: 15234178 NR Description: putative protein
  misc_feature (1)..(113): Homolog of NCBI NO: 18422542 NR Description: expressed protein
MGGDNDNDKDKGFHGYPPAGYPPPGAYPPAGYPQQGYPPPPGAYPPAGYPPGAYPPAPGGYPPAPGYGGYPPAPGYGGYPPAPGHGGYPPAGYPAHHSGHAGGIGGMIAGGCSCLWSSPRSS

SEQ ID NO: 35343 - protein, 102 aa, Arabidopsis thaliana
  peptide (1)..(102): Ceres Seq. ID no. 12738639
MIMTKTKGFMGILPLDTHPLGLIHPLDTHNKVTLHHPVLTRLQVILRVPTHLHLVVILQPLVMVVILQLLVMEVILLHLVMVVTLLLAILLITQDTQEELGV

SEQ ID NO: 35344 - DNA, 756 bp, Arabidopsis thaliana
  misc_feature (1)..(756): Ceres Seq. ID no. 12332182
  misc_feature: MA Experiment ID: 108462 Result: Down-regulated in Transcription
  misc_feature: MA Experiment 108462 PARAMETER Experiment Name: At_Germinating_Seeds_cDNA_P Parameter: Age (day) Value: 2 vs. 0
  misc_feature: MA Experiment 108462 PARAMETER Experiment Name: At_Germinating_Seeds_cDNA_P Parameter: Tissue Value: Germinating Seeds
  misc_feature: MA Experiment ID: 108463 Result: Down-regulated in Transcription
  misc_feature: MA Experiment 108463 PARAMETER Experiment Name: At_Germinating_Seeds_cDNA_P Parameter: Age (day) Value: 3 vs. 0
  misc_feature: MA Experiment 108463 PARAMETER Experiment Name: At_Germinating_Seeds_cDNA_P Parameter: Tissue Value: Germinating Seeds
  misc_feature: MA Experiment ID: 108464 Result: Down-regulated in Transcription
  misc_feature: MA Experiment 108464 PARAMETER Experiment Name: At_Germinating_Seeds_cDNA_P Parameter: Age (day) Value: 4 vs. 0
  misc_feature: MA Experiment 108464 PARAMETER Experiment Name: At_Germinating_Seeds_cDNA_P Parameter: Tissue Value: Germinating Seeds
aaaaaatttctcaaaatcgcaaaatctttgcctctttcttctctaatcgaactaaatcttaaaactttgctgattgattgattttcgattccgggagaagaaaaatggtatctgggttgattaatgagaaccctatcatttacccaaagaaagagaggcgtcttcgtactgatacaagcattactgatgagcttacaccagaaccaattgatcaacttgagatttttgatcatataagagatatcaaagatccagagcatcctaatactctggaagatctcagagtagttacagaagactcagttgaagtggatgatgagaacagttatgttagggttacgttcactccaactgtcgaacattgtagcatggcaaccgttatcggtctttgtgtccgtgtgaaacttctacgaagccttccttctcgatacaagattgatataagggtagcacctggttctcatgcaacagaagatgcattgaataaacaactaaacgataaagaacgtgtggcggctgcactagagaatccaaacctcgtggagatggttgatgaatgcctgccatcagaagagtgaattgcttttattttcttgtgagcaagtaatttacacaagcctggtggtctcagtttacactatcaatacatgtctctgttttatttgcaaagattttgatccatcacatcgactaggacttgcattgtaatacttactctgatttcaagttttttctcaatcatttcaataaagtccc

SEQ ID NO: 35345 - protein, 157 aa, Arabidopsis thaliana
  peptide (1)..(157): Ceres Seq. ID no. 12332183
  misc_feature (36)..(115): Pfam Name: Domain of unknown function DUF59 Pfam Description: Domain of unknown function DUF59
  misc_feature (4)..(153): Homolog of NCBI NO: 21312046 NR Description: RIKEN cDNA 1110019N10 [Mus musculus]
  misc_feature (1)..(156): Homolog of NCBI NO: 24662341 NR Description: CG7949-PA [Drosophila melanogaster]
  misc_feature (4)..(153): Homolog of NCBI NO: 7706343 NR Description: CGI-128 protein [Homo sapiens]
  misc_feature (1)..(153): Homolog of NCBI NO: 20455368 NR Description: Hypothetical protein At3g09380
  misc_feature (1)..(157): Homolog of NCBI NO: 34896898 NR Description: hypothetical protein [Oryza sativa (japonica
  misc_feature (40)..(153): Homolog of NCBI NO: 38567963 NR Description: OSJNBa0093F12.4 [Oryza sativa (japonica
  misc_feature (1)..(153): Homolog of NCBI NO: 15232658 NR Description: hypothetical protein; protein id: At3g09380.1
  misc_feature (1)..(153): Homolog of NCBI NO: 38347077 NR Description: OSJNBa0006A01.18 [Oryza sativa (japonica
  misc_feature (1)..(157): Homolog of NCBI NO: 15221347 NR Description: unknown protein; protein id: At1g68310.1
  misc_feature (1)..(157): Homolog of NCBI NO: 28973748 NR Description: unknown protein [Arabidopsis thaliana]
MVSGLINENPIIYPKKERRLRTDTSITDELTPEPIDQLEIFDHIRDIKDPEHPNTLEDLRVVTEDSVEVDDENSYVRVTFTPTVEHCSMATVIGLCVRVKLLRSLPSRYKIDIRVAPGSHATEDALNKQLNDKERVAAALENPNLVEMVDECLPSEE

SEQ ID NO: 35346 - DNA, 1265 bp, Arabidopsis thaliana
  misc_feature (1)..(1265): Ceres Seq. ID no. 13494325
  misc_feature: MA Experiment ID: 108434 Result: Up-regulated in Transcription
  misc_feature: MA Experiment 108434 PARAMETER Experiment Name: At_Root_Tips_cDNA_P Parameter: Tissue Value: Root Tips
  misc_feature: MA Experiment ID: 108435 Result: Up-regulated in Transcription
  misc_feature: MA Experiment 108435 PARAMETER Experiment Name: At_stm_Mutants_cDNA_P Parameter: Plant Line Value: wt Landsburg vs stm
  misc_feature: MA Experiment 108435 PARAMETER Experiment Name: At_stm_Mutants_cDNA_P Parameter: Tissue Value: Shoot Apical Meristem Region
  misc_feature: MA Experiment ID: 108461 Result: Down-regulated in Transcription
  misc_feature: MA Experiment 108461 PARAMETER Experiment Name: At_Germinating_Seeds_cDNA_P Parameter: Age (day) Value: 1 vs. 0
  misc_feature: MA Experiment 108461 PARAMETER Experiment Name: At_Germinating_Seeds_cDNA_P Parameter: Tissue Value: Germinating Seeds
  misc_feature: MA Experiment ID: 108462 Result: Down-regulated in Transcription
  misc_feature: MA Experiment 108462 PARAMETER Experiment Name: At_Germinating_Seeds_cDNA_P Parameter: Age (day) Value: 2 vs. 0
  misc_feature: MA Experiment 108462 PARAMETER Experiment Name: At_Germinating_Seeds_cDNA_P Parameter: Tissue Value: Germinating Seeds
  misc_feature: MA Experiment ID: 108463 Result: Down-regulated in Transcription
  misc_feature: MA Experiment 108463 PARAMETER Experiment Name: At_Germinating_Seeds_cDNA_P Parameter: Age (day) Value: 3 vs. 0
  misc_feature: MA Experiment 108463 PARAMETER Experiment Name: At_Germinating_Seeds_cDNA_P Parameter: Tissue Value: Germinating Seeds
  misc_feature: MA Experiment ID: 108464 Result: Down-regulated in Transcription
  misc_feature: MA Experiment 108464 PARAMETER Experiment Name: At_Germinating_Seeds_cDNA_P Parameter: Age (day) Value: 4 vs. 0
  misc_feature: MA Experiment 108464 PARAMETER Experiment Name: At_Germinating_Seeds_cDNA_P Parameter: Tissue Value: Germinating Seeds
  misc_feature: MA Experiment ID: 108573 Result: Up-regulated in Transcription
  misc_feature: MA Experiment 108573 PARAMETER Experiment Name: At_Drought_cDNA_P Parameter: Timepoint (hr) Value: 6
  misc_feature: MA Experiment 108573 PARAMETER Experiment Name: At_Drought_cDNA_P Parameter: Tissue Value: Aerial
  misc_feature: MA Experiment 108573 PARAMETER Experiment Name: At_Drought_cDNA_P Parameter: Treatment Value: Drought vs. No Drought
  misc_feature: MA Experiment ID: 108585 Result: Up-regulated in Transcription
  misc_feature: MA Experiment 108585 PARAMETER Experiment Name: At_5mM_NaNP_cDNA_P Parameter: Timepoint (hr) Value: 6
  misc_feature: MA Experiment 108585 PARAMETER Experiment Name: At_5mM_NaNP_cDNA_P Parameter: Tissue Value: Aerial
  misc_feature: MA Experiment 108585 PARAMETER Experiment Name: At_5mM_NaNP_cDNA_P Parameter: Treatment Value: null
  misc_feature: MA Experiment ID: 20000093 Result: Up-regulated in Transcription
  misc_feature: MA Experiment 20000093 PARAMETER Experiment Name: At_42deg_Heat_cDNA_P Parameter: Temperature (deg C) Value: 42 vs. 22
  misc_feature: MA Experiment 20000093 PARAMETER Experiment Name: At_42deg_Heat_cDNA_P Parameter: Timepoint (hr) Value: 0.5
  misc_feature: MA Experiment 20000093 PARAMETER Experiment Name: At_42deg_Heat_cDNA_P Parameter: Tissue Value: Aerial
  misc_feature: MA Experiment ID: 20000111 Result: Up-regulated in Transcription
  misc_feature: MA Experiment 20000111 PARAMETER Experiment Name: At_42deg_Heat_cDNA_P Parameter: Temperature (deg C) Value: 42 vs. 22
  misc_feature: MA Experiment 20000111 PARAMETER Experiment Name: At_42deg_Heat_cDNA_P Parameter: Timepoint (hr) Value: 6
  misc_feature: MA Experiment 20000111 PARAMETER Experiment Name: At_42deg_Heat_cDNA_P Parameter: Tissue Value: Aerial
  misc_feature: MA Experiment ID: 20000112 Result: Up-regulated in Transcription
  misc_feature: MA Experiment 20000112 PARAMETER Experiment Name: At_42deg_Heat_cDNA_P Parameter: Temperature (deg C) Value: 42 vs. 22
  misc_feature: MA Experiment 20000112 PARAMETER Experiment Name: At_42deg_Heat_cDNA_P Parameter: Timepoint (hr) Value: 2
  misc_feature: MA Experiment 20000112 PARAMETER Experiment Name: At_42deg_Heat_cDNA_P Parameter: Tissue Value: Aerial
  misc_feature: MA Experiment ID: 20000113 Result: Up-regulated in Transcription
  misc_feature: MA Experiment 20000113 PARAMETER Experiment Name: At_42deg_Heat_cDNA_P Parameter: Temperature (deg C) Value: 42 vs. 22
  misc_feature: MA Experiment 20000113 PARAMETER Experiment Name: At_42deg_Heat_cDNA_P Parameter: Timepoint (hr) Value: 8
  misc_feature: MA Experiment 20000113 PARAMETER Experiment Name: At_42deg_Heat_cDNA_P Parameter: Tissue Value: Aerial
  misc_feature: MA Experiment ID: 20000144 Result: Up-regulated in Transcription
  misc_feature: MA Experiment 20000144 PARAMETER Experiment Name: At_42deg_Heat_cDNA_P Parameter: Temperature (deg C) Value: 42 vs. 22
  misc_feature: MA Experiment 20000144 PARAMETER Experiment Name: At_42deg_Heat_cDNA_P Parameter: Timepoint (hr) Value: 1
  misc_feature: MA Experiment 20000144 PARAMETER Experiment Name: At_42deg_Heat_cDNA_P Parameter: Tissue Value: Aerial
tggtttcagaaaagctttaacctaatttcacttcgtctctctctcgcgctcccaatttctccgccggcgggaaaaccatgtcgcacttcggaaggtcaggtccaccggatatcagcgacacctactcacttctcgtccttaacatcaccttccgtacgactgctgatgatctctatcctctattcgcaaagtatggaaaggtcgttgatgtgtttattcccagagatcgaaggactggtgattcgcgtggttttgcgtttgttcggtataagtataaagacgaagctcacaaagcagtggaaaggcttgatggaagagttgttgatggcagagaaataactgttcagtttgcgaaatatgggccaaatgctgaaaaaatttccaaaggaagagttgtggaaccaccgccgaagtcacgaagatctagaagccgtagtcctaggcggagtcgtagtcctaggaggagccgtagcccgcctagacgtcgtagtcccagaagaagccgcagtcctcgtaggaggtcccgagatgactatagggaaaaagactaccggaagcggagcaggagcagaagctatgacaggcgtgaaaggcatgaggagaaggatagagatcatcgtcgtcgcactaggtctcgtagtgccagcccagatgaaaaacgcagagtcagaggccgttatgataatgagagccgcagtcacagtcgttccttgagtgcatctcctgctcgccgcagccctagaagttcctccccacagaaaacctctcctgctagagaagtttctcctgataagcgtagcaatgagaggtctccatctcctcgtcgcagcctcagcccaagaagccctgctttgcaaaaggcctctccttctaaggagatgtctcctgaaaggcgtagcaatgagaggtccccatctcctggtagccctgctcctctgcgcaaagttgatgctgcttctcgaagtcaatctccttatgctgcggaatgactgcagccacttgtgaaagtgatacggtgtatgatgaaaaacacgtttgcttgtactgatgatgtttcatcattaagcactggaacgtctaccctctgtagtattacttgctttccgtaggtgccctcaaactactgagtactgactgtatctttgtttcctgttatcgttctggtttagtgttcatgtgcaagaattattactgtttgaacagcctttttagtctctgttttatttgaatcttctctggtttggaattcatagcattctaactct

SEQ ID NO: 35347 - protein, 303 aa, Arabidopsis thaliana
  peptide (1)..(303): Ceres Seq. ID no. 13494326
  misc_feature (18)..(89): Pfam Name: RNA recognition motif. (a.k.a. RRM, RBD, or RNP domain) Pfam Description: RNA recognition motif. (a.k.a. RRM, RBD, or RNP
  misc_feature (4)..(221): Homolog of NCBI NO: 39794351 NR Description: Unknown (protein for MGC:75633) [Silurana
  misc_feature (5)..(279): Homolog of NCBI NO: 15055543 NR Description: Splicing factor, arginine/serine-rich, 46kD [Homo
  misc_feature (4)..(234): Homolog of NCBI NO: 4506899 NR Description: splicing factor, arginine/serine-rich 2 [Homo
  misc_feature (4)..(234): Homolog of NCBI NO: 6755478 NR Description: splicing factor, arginine/serine-rich 2
  misc_feature (4)..(234): Homolog of NCBI NO: 266991 NR Description: Splicing factor, arginine/serine-rich 2 (Splicing
  misc_feature (4)..(216): Homolog of NCBI NO: 28279759 NR Description: Similar to splicing factor, arginine/serine-rich
  misc_feature (1)..(288): Homolog of NCBI NO: 7446336 NR Description: probable arginine/serine-rich splicing factor -
  misc_feature (1)..(280): Homolog of NCBI NO: 33146621 NR Description: putative splicing factor, arginine/serine-rich 2
  misc_feature (1)..(303): Homolog of NCBI NO: 9843653 NR Description: splicing factor SC35 [Arabidopsis thaliana]
  misc_feature (1)..(303): Homolog of NCBI NO: 15237641 NR Description: arginine/serine-rich splicing factor SC35
MSHFGRSGPPDISDTYSLLVLNITFRTTADDLYPLFAKYGKVVDVFIPRDRRTGDSRGFAFVRYKYKDEAHKAVERLDGRVVDGREITVQFAKYGPNAEKISKGRVVEPPPKSRRSRSRSPRRSRSPRRSRSPPRRRSPRRSRSPRRRSRDDYREKDYRKRSRSRSYDRRERHEEKDRDHRRRTRSRSASPDEKRRVRGRYDNESRSHSRSLSASPARRSPRSSSPQKTSPAREVSPDKRSNERSPSPRRSLSPRSPALQKASPSKEMSPERRSNERSPSPGSPAPLRKVDAASRSQSPYAAE

SEQ ID NO: 35348 - DNA, 867 bp, Arabidopsis thaliana
  misc_feature (1)..(867): Ceres Seq. ID no. 12397096
  misc_feature: MA Experiment ID: 108434 Result: Up-regulated in Transcription
  misc_feature: MA Experiment 108434 PARAMETER Experiment Name: At_Root_Tips_cDNA_P Parameter: Tissue Value: Root Tips
  misc_feature: MA Experiment ID: 108461 Result: Down-regulated in Transcription
  misc_feature: MA Experiment 108461 PARAMETER Experiment Name: At_Germinating_Seeds_cDNA_P Parameter: Age (day) Value: 1 vs. 0
  misc_feature: MA Experiment 108461 PARAMETER Experiment Name: At_Germinating_Seeds_cDNA_P Parameter: Tissue Value: Germinating Seeds
  misc_feature: MA Experiment ID: 108462 Result: Down-regulated in Transcription
  misc_feature: MA Experiment 108462 PARAMETER Experiment Name: At_Germinating_Seeds_cDNA_P Parameter: Age (day) Value: 2 vs. 0
  misc_feature: MA Experiment 108462 PARAMETER Experiment Name: At_Germinating_Seeds_cDNA_P Parameter: Tissue Value: Germinating Seeds
  misc_feature: MA Experiment ID: 108463 Result: Down-regulated in Transcription
  misc_feature: MA Experiment 108463 PARAMETER Experiment Name: At_Germinating_Seeds_cDNA_P Parameter: Age (day) Value: 3 vs. 0
  misc_feature: MA Experiment 108463 PARAMETER Experiment Name: At_Germinating_Seeds_cDNA_P Parameter: Tissue Value: Germinating Seeds
  misc_feature: MA Experiment ID: 108464 Result: Down-regulated in Transcription
  misc_feature: MA Experiment 108464 PARAMETER Experiment Name: At_Germinating_Seeds_cDNA_P Parameter: Age (day) Value: 4 vs. 0
  misc_feature: MA Experiment 108464 PARAMETER Experiment Name: At_Germinating_Seeds_cDNA_P Parameter: Tissue Value: Germinating Seeds
  misc_feature: MA Experiment ID: 108489 Result: Up-regulated in Transcription
  misc_feature: MA Experiment ID: 108572 Result: Down-regulated in Transcription
  misc_feature: MA Experiment 108572 PARAMETER Experiment Name: At_Drought_cDNA_P Parameter: Timepoint (hr) Value: 1
  misc_feature: MA Experiment 108572 PARAMETER Experiment Name: At_Drought_cDNA_P Parameter: Tissue Value: Aerial
  misc_feature: MA Experiment 108572 PARAMETER Experiment Name: At_Drought_cDNA_P Parameter: Treatment Value: Drought vs. No Drought
  misc_feature: MA Experiment ID: 108573 Result: Down-regulated in Transcription
  misc_feature: MA Experiment 108573 PARAMETER Experiment Name: At_Drought_cDNA_P Parameter: Timepoint (hr) Value: 6
  misc_feature: MA Experiment 108573 PARAMETER Experiment Name: At_Drought_cDNA_P Parameter: Tissue Value: Aerial
  misc_feature: MA Experiment 108573 PARAMETER Experiment Name: At_Drought_cDNA_P Parameter: Treatment Value: Drought vs. No Drought
  misc_feature: MA Experiment ID: 20000179 Result: Down-regulated in Transcription
  misc_feature: MA Experiment 20000179 PARAMETER Experiment Name: At_Germinating_Seeds_P Parameter: Age (hr) Value: 6 vs. 0
  misc_feature: MA Experiment 20000179 PARAMETER Experiment Name: At_Germinating_Seeds_P Parameter: Tissue Value: Germinating Seeds
  misc_feature: MA Experiment ID: 20000180 Result: Down-regulated in Transcription
  misc_feature: MA Experiment 20000180 PARAMETER Experiment Name: At_Germinating_Seeds_P Parameter: Age (hr) Value: 24 vs. 0
  misc_feature: MA Experiment 20000180 PARAMETER Experiment Name: At_Germinating_Seeds_P Parameter: Tissue Value: Germinating Seeds
  misc_feature: MA Experiment ID: 20000794 Result: Down-regulated in Transcription
  misc_feature: MA Experiment 20000794 PARAMETER Experiment Name: At_Petals_P Parameter: Age (day) Value: 23-25 days
  misc_feature: MA Experiment 20000794 PARAMETER Experiment Name: At_Petals_P Parameter: Plant Line Value: WS
  misc_feature: MA Experiment 20000794 PARAMETER Experiment Name: At_Petals_P Parameter: Tissue Value: Petals vs. Whole plant
  misc_feature: MA Experiment ID: 20001458 Result: Up-regulated in Transcription
  misc_feature: MA Experiment 20001458 PARAMETER Experiment Name: At_50mM_NH4NO3_L-to-H_P Parameter: Age (day) Value: Undefined
  misc_feature: MA Experiment 20001458 PARAMETER Experiment Name: At_50mM_NH4NO3_L-to-H_P Parameter: Organism Value: Undefined
  misc_feature: MA Experiment 20001458 PARAMETER Experiment Name: At_50mM_NH4NO3_L-to-H_P Parameter: Plant Line Value: Undefined
  misc_feature: MA Experiment 20001458 PARAMETER Experiment Name: At_50mM_NH4NO3_L-to-H_P Parameter: Timepoint (hr) Value: 2
  misc_feature: MA Experiment 20001458 PARAMETER Experiment Name: At_50mM_NH4NO3_L-to-H_P Parameter: Tissue Value: Siliques
  misc_feature: MA Experiment 20001458 PARAMETER Experiment Name: At_50mM_NH4NO3_L-to-H_P Parameter: Treatment Value: 50mM NH4NO3 vs. 100mM Manitol
  misc_feature: MA Experiment ID: 20001557 Result: Up-regulated in Transcription
  misc_feature: MA Experiment 20001557 PARAMETER Experiment Name: At_Drought_Soil_Dry_P Parameter: Age (day) Value: 27
  misc_feature: MA Experiment 20001557 PARAMETER Experiment Name: At_Drought_Soil_Dry_P Parameter: Organism Value: A. thaliana
  misc_feature: MA Experiment 20001557 PARAMETER Experiment Name: At_Drought_Soil_Dry_P Parameter: Plant Line Value: WS
  misc_feature: MA Experiment 20001557 PARAMETER Experiment Name: At_Drought_Soil_Dry_P Parameter: Post Timepoint (hr) Value: 3
  misc_feature: MA Experiment 20001557 PARAMETER Experiment Name: At_Drought_Soil_Dry_P Parameter: Post-Treatment Value: Re-Water vs. No Drought
  misc_feature: MA Experiment 20001557 PARAMETER Experiment Name: At_Drought_Soil_Dry_P Parameter: Timepoint (day) Value: 13
  misc_feature: MA Experiment 20001557 PARAMETER Experiment Name: At_Drought_Soil_Dry_P Parameter: Treatment Value: Drought vs. No Drought
  misc_feature: MA Experiment ID: 20001558 Result: Up-regulated in Transcription
  misc_feature: MA Experiment 20001558 PARAMETER Experiment Name: At_Drought_Soil_Dry_P Parameter: Age (day) Value: 27
  misc_feature: MA Experiment 20001558 PARAMETER Experiment Name: At_Drought_Soil_Dry_P Parameter: Organism Value: A. thaliana
  misc_feature: MA Experiment 20001558 PARAMETER Experiment Name: At_Drought_Soil_Dry_P Parameter: Plant Line Value: WS
  misc_feature: MA Experiment 20001558 PARAMETER Experiment Name: At_Drought_Soil_Dry_P Parameter: Post Timepoint (hr) Value: 6
  misc_feature: MA Experiment 20001558 PARAMETER Experiment Name: At_Drought_Soil_Dry_P Parameter: Post-Treatment Value: Re-Water vs. No Drought
  misc_feature: MA Experiment 20001558 PARAMETER Experiment Name: At_Drought_Soil_Dry_P Parameter: Timepoint (day) Value: 13
  misc_feature: MA Experiment 20001558 PARAMETER Experiment Name: At_Drought_Soil_Dry_P Parameter: Treatment Value: Drought vs. No Drought
  misc_feature: MA Experiment ID: 20001560 Result: Up-regulated in Transcription
  misc_feature: MA Experiment 20001560 PARAMETER Experiment Name: At_Drought_Soil_Dry_P Parameter: Age (day) Value: 28
  misc_feature: MA Experiment 20001560 PARAMETER Experiment Name: At_Drought_Soil_Dry_P Parameter: Organism Value: A. thaliana
  misc_feature: MA Experiment 20001560 PARAMETER Experiment Name: At_Drought_Soil_Dry_P Parameter: Plant Line Value: WS
  misc_feature: MA Experiment 20001560 PARAMETER Experiment Name: At_Drought_Soil_Dry_P Parameter: Post Timepoint (hr) Value: None
  misc_feature: MA Experiment 20001560 PARAMETER Experiment Name: At_Drought_Soil_Dry_P Parameter: Post-Treatment Value: None
  misc_feature: MA Experiment 20001560 PARAMETER Experiment Name: At_Drought_Soil_Dry_P Parameter: Timepoint (day) Value: 14
  misc_feature: MA Experiment 20001560 PARAMETER Experiment Name: At_Drought_Soil_Dry_P Parameter: Treatment Value: Drought vs. No Drought
  misc_feature: MA Experiment ID: 20001757 Result: Up-regulated in Transcription
  misc_feature: MA Experiment 20001757 PARAMETER Experiment Name: At_50mM_NH4NO3_L-to-H_P Parameter: Timepoint (hr) Value: 6
  misc_feature: MA Experiment 20001757 PARAMETER Experiment Name: At_50mM_NH4NO3_L-to-H_P Parameter: Tissue Value: Leaf
  misc_feature: MA Experiment 20001757 PARAMETER Experiment Name: At_50mM_NH4NO3_L-to-H_P Parameter: Treatment Value: 50mM NH4NO3 vs 100mM Mannitol
ataaaacaaaaaacatcctccgaagcagctactcctcctcagttgttgttccgccgtcccgccatcagatcccaatcaaagatttaggtaataatttaccatagaagaaatggcagagtctactcagatggaagttgagacagcaacagaaggaactgtgccattgccgcctaaaccaaccttcaagcctttgaaagctcatgaaatgtctgatggtaaagtccagttcaggaaaatagctgtaccaccaaaccgatactcgcctctcaagaaagcatggttggatatctacacacccatttacgatcagatgaaggttgacataaggatgaatctcaaagcccgcaaagtcgagcttaaaacccgagctgacactcccgacatcagtaatcttcagactctgcggattttgtacacgctttcatgcttggttttgatatccctgatgctatctctcttttgagaatggacgagctttatgttgagtcttttgagatcaaggatgtgaagactcttaaaggtgagcatttgtctagagccattggtaggttgtctggtaaaggagggaagacaaagtttgctattgagaactcgaccaagacgaggattgtgattgcagacactaggattcatattttgggagctttctctaatattaaagtcgcaaggagttcactttgcagtcttattatgggatctcctgctgggaaagtttactctaagctcagatctgtctctgctagattgaacgaatagttttgaatggcgaaattttgaaacattaacttgcttttgttcggagtgatctttgtaatgaaattttgaagaaacaaatgttatggtgttctttataaaatttgttatggg

SEQ ID NO: 35349 - protein, 117 aa, Arabidopsis thaliana
  peptide (1)..(117): Ceres Seq. ID no. 12397097
  misc_feature (13)..(95): Homolog of NCBI NO: 13384846 NR Description: RIKEN cDNA 1810003N24 [Mus musculus]
  misc_feature (13)..(95): Homolog of NCBI NO: 40018534 NR Description: putatative 28 kDa protein; partner of Nob1
  misc_feature (2)..(95): Homolog of NCBI NO: 33669478 NR Description: partner of Nob1 [Oryzias latipes]
  misc_feature (1)..(95): Homolog of NCBI NO: 34147041 NR Description: putatative 28 kDa protein [Bos taurus]
  misc_feature (1)..(95): Homolog of NCBI NO: 33989460 NR Description: Unknown (protein for MGC:65782) [Danio rerio]
  misc_feature (3)..(96): Homolog of NCBI NO: 20129085 NR Description: CG11738-PA [Drosophila melanogaster]
  misc_feature (4)..(96): Homolog of NCBI NO: 33669476 NR Description: partner of Nob1 [Sorghum bicolor]
  misc_feature (22)..(96): Homolog of NCBI NO: 34902190 NR Description: Hypothetical protein [Oryza sativa (japonica
  misc_feature (1)..(96): Homolog of NCBI NO: 34908792 NR Description: P0415A04.33 [Oryza sativa (japonica
  misc_feature (1)..(96): Homolog of NCBI NO: 18399930 NR Description: expressed protein
MAESTQMEVETATEGTVPLPPKPTFKPLKAHEMSDGKVQFRKIAVPPNRYSPLKKAWLDIYTPIYDQMKVDIRMNLKARKVELKTRADTPDISNLQTLRILYTLSCLVLISLMLSLF

SEQ ID NO: 35350 - protein, 111 aa, Arabidopsis thaliana
  peptide (1)..(111): Ceres Seq. ID no. 12397098
  misc_feature (7)..(89): Homolog of NCBI NO: 13384846 NR Description: RIKEN cDNA 1810003N24 [Mus musculus]
  misc_feature (7)..(89): Homolog of NCBI NO: 40018534 NR Description: putatative 28 kDa protein; partner of Nob1
  misc_feature (1)..(89): Homolog of NCBI NO: 33669478 NR Description: partner of Nob1 [Oryzias latipes]
  misc_feature (1)..(89): Homolog of NCBI NO: 34147041 NR Description: putatative 28 kDa protein [Bos taurus]
  misc_feature (1)..(89): Homolog of NCBI NO: 33989460 NR Description: Unknown (protein for MGC:65782) [Danio rerio]
  misc_feature (1)..(90): Homolog of NCBI NO: 20129085 NR Description: CG11738-PA [Drosophila melanogaster]
  misc_feature (1)..(90): Homolog of NCBI NO: 33669476 NR Description: partner of Nob1 [Sorghum bicolor]
  misc_feature (16)..(90): Homolog of NCBI NO: 34902190 NR Description: Hypothetical protein [Oryza sativa (japonica
  misc_feature (1)..(90): Homolog of NCBI NO: 34908792 NR Description: P0415A04.33 [Oryza sativa (japonica
  misc_feature (1)..(90): Homolog of NCBI NO: 18399930 NR Description: expressed protein
MEVETATEGTVPLPPKPTFKPLKAHEMSDGKVQFRKIAVPPNRYSPLKKAWLDIYTPIYDQMKVDIRMNLKARKVELKTRADTPDISNLQTLRILYTLSCLVLISLMLSLF

SEQ ID NO: 35351 - protein, 110 aa, Arabidopsis thaliana
  peptide (1)..(110): Ceres Seq. ID no. 12397099
  misc_feature (1)..(107): Homolog of NCBI NO: 13384846 NR Description: RIKEN cDNA 1810003N24 [Mus musculus]
  misc_feature (1)..(107): Homolog of NCBI NO: 40018534 NR Description: putatative 28 kDa protein; partner of Nob1
  misc_feature (1)..(110): Homolog of NCBI NO: 33669478 NR Description: partner of Nob1 [Oryzias latipes]
  misc_feature (1)..(110): Homolog of NCBI NO: 34147041 NR Description: putatative 28 kDa protein [Bos taurus]
  misc_feature (1)..(110): Homolog of NCBI NO: 33989460 NR Description: Unknown (protein for MGC:65782) [Danio rerio]
  misc_feature (1)..(110): Homolog of NCBI NO: 20129085 NR Description: CG11738-PA [Drosophila melanogaster]
  misc_feature (5)..(110): Homolog of NCBI NO: 33669476 NR Description: partner of Nob1 [Sorghum bicolor]
  misc_feature (1)..(110): Homolog of NCBI NO: 34902190 NR Description: Hypothetical protein [Oryza sativa (japonica
  misc_feature (1)..(110): Homolog of NCBI NO: 34908792 NR Description: P0415A04.33 [Oryza sativa (japonica
  misc_feature (1)..(110): Homolog of NCBI NO: 18399930 NR Description: expressed protein
MLGFDIPDAISLLRMDELYVESFEIKDVKTLKGEHLSRAIGRLSGKGGKTKFAIENSTKTRIVIADTRIHILGAFSNIKVARSSLCSLIMGSPAGKVYSKLRSVSARLNE

SEQ ID NO: 35352 - DNA, 1121 bp, Arabidopsis thaliana
  misc_feature (1)..(1121): Ceres Seq. ID no. 13501438
  misc_feature: MA Experiment ID: 108462 Result: Up-regulated in Transcription
  misc_feature: MA Experiment 108462 PARAMETER Experiment Name: At_Germinating_Seeds_cDNA_P Parameter: Age (day) Value: 2 vs. 0
  misc_feature: MA Experiment 108462 PARAMETER Experiment Name: At_Germinating_Seeds_cDNA_P Parameter: Tissue Value: Germinating Seeds
  misc_feature: MA Experiment ID: 108464 Result: Up-regulated in Transcription
  misc_feature: MA Experiment 108464 PARAMETER Experiment Name: At_Germinating_Seeds_cDNA_P Parameter: Age (day) Value: 4 vs. 0
  misc_feature: MA Experiment 108464 PARAMETER Experiment Name: At_Germinating_Seeds_cDNA_P Parameter: Tissue Value: Germinating Seeds
  misc_feature: MA Experiment ID: 108585 Result: Down-regulated in Transcription
  misc_feature: MA Experiment 108585 PARAMETER Experiment Name: At_5mM_NaNP_cDNA_P Parameter: Timepoint (hr) Value: 6
  misc_feature: MA Experiment 108585 PARAMETER Experiment Name: At_5mM_NaNP_cDNA_P Parameter: Tissue Value: Aerial
  misc_feature: MA Experiment 108585 PARAMETER Experiment Name: At_5mM_NaNP_cDNA_P Parameter: Treatment Value: null
  misc_feature: MA Experiment ID: 108595 Result: Down-regulated in Transcription
  misc_feature: MA Experiment 108595 PARAMETER Experiment Name: At_Ler-pi_Ovule_cDNA_P Parameter: Plant Line Value: null
  misc_feature: MA Experiment ID: 20000179 Result: Up-regulated in Transcription
  misc_feature: MA Experiment 20000179 PARAMETER Experiment Name: At_Germinating_Seeds_P Parameter: Age (hr) Value: 6 vs. 0
  misc_feature: MA Experiment 20000179 PARAMETER Experiment Name: At_Germinating_Seeds_P Parameter: Tissue Value: Germinating Seeds
  misc_feature: MA Experiment ID: 20000180 Result: Up-regulated in Transcription
  misc_feature: MA Experiment 20000180 PARAMETER Experiment Name: At_Germinating_Seeds_P Parameter: Age (hr) Value: 24 vs. 0
  misc_feature: MA Experiment 20000180 PARAMETER Experiment Name: At_Germinating_Seeds_P Parameter: Tissue Value: Germinating Seeds
  misc_feature: MA Experiment ID: 20000185 Result: Down-regulated in Transcription
  misc_feature: MA Experiment 20000185 PARAMETER Experiment Name: At_Roots__P Parameter: Age (day) Value: 7 vs. 21
  misc_feature: MA Experiment 20000185 PARAMETER Experiment Name: At_Roots__P Parameter: Organism Value: A. thaliana
  misc_feature: MA Experiment 20000185 PARAMETER Experiment Name: At_Roots__P Parameter: Tissue Value: Roots vs. Whole Plant
  misc_feature: MA Experiment ID: 20000438 Result: Up-regulated in Transcription
  misc_feature: MA Experiment 20000438 PARAMETER Experiment Name: At_Shoots__P Parameter: Age (day) Value: 14
  misc_feature: MA Experiment 20000438 PARAMETER Experiment Name: At_Shoots__P Parameter: Tissue Value: Shoots vs. Whole Plant
  misc_feature: MA Experiment ID: 20000439 Result: Down-regulated in Transcription
  misc_feature: MA Experiment 20000439 PARAMETER Experiment Name: At_Roots__P Parameter: Age (day) Value: 14 vs. 21
  misc_feature: MA Experiment 20000439 PARAMETER Experiment Name: At_Roots__P Parameter: Organism Value: A. thaliana
  misc_feature: MA Experiment 20000439 PARAMETER Experiment Name: At_Roots__P Parameter: Tissue Value: Roots vs. Whole Plant
  misc_feature: MA Experiment ID: 20000794 Result: Down-regulated in Transcription
  misc_feature: MA Experiment 20000794 PARAMETER Experiment Name: At_Petals_P Parameter: Age (day) Value: 23-25 days
  misc_feature: MA Experiment 20000794 PARAMETER Experiment Name: At_Petals_P Parameter: Plant Line Value: WS
  misc_feature: MA Experiment 20000794 PARAMETER Experiment Name: At_Petals_P Parameter: Tissue Value: Petals vs. Whole plant
  misc_feature: MA Experiment ID: 20001450 Result: Down-regulated in Transcription
  misc_feature: MA Experiment 20001450 PARAMETER Experiment Name: At_Far-red-induction_P Parameter: Age (day) Value: 7
  misc_feature: MA Experiment 20001450 PARAMETER Experiment Name: At_Far-red-induction_P Parameter: Light Value: Far-red vs. White
  misc_feature: MA Experiment 20001450 PARAMETER Experiment Name: At_Far-red-induction_P Parameter: Organism Value: A. thaliana
  misc_feature: MA Experiment 20001450 PARAMETER Experiment Name: At_Far-red-induction_P Parameter: Plant Line Value: Columbia
  misc_feature: MA Experiment 20001450 PARAMETER Experiment Name: At_Far-red-induction_P Parameter: Timepoint (hr) Value: 8
  misc_feature: MA Experiment 20001450 PARAMETER Experiment Name: At_Far-red-induction_P Parameter: Tissue Value: Whole Plant
  misc_feature: MA Experiment ID: 20001557 Result: Down-regulated in Transcription
  misc_feature: MA Experiment 20001557 PARAMETER Experiment Name: At_Drought_Soil_Dry_P Parameter: Age (day) Value: 27
  misc_feature: MA Experiment 20001557 PARAMETER Experiment Name: At_Drought_Soil_Dry_P Parameter: Organism Value: A. thaliana
  misc_feature: MA Experiment 20001557 PARAMETER Experiment Name: At_Drought_Soil_Dry_P Parameter: Plant Line Value: WS
  misc_feature: MA Experiment 20001557 PARAMETER Experiment Name: At_Drought_Soil_Dry_P Parameter: Post Timepoint (hr) Value: 3
  misc_feature: MA Experiment 20001557 PARAMETER Experiment Name: At_Drought_Soil_Dry_P Parameter: Post-Treatment Value: Re-Water vs. No Drought
  misc_feature: MA Experiment 20001557 PARAMETER Experiment Name: At_Drought_Soil_Dry_P Parameter: Timepoint (day) Value: 13
  misc_feature: MA Experiment 20001557 PARAMETER Experiment Name: At_Drought_Soil_Dry_P Parameter: Treatment Value: Drought vs. No Drought
  misc_feature: MA Experiment ID: 20001558 Result: Down-regulated in Transcription
  misc_feature: MA Experiment 20001558 PARAMETER Experiment Name: At_Drought_Soil_Dry_P Parameter: Age (day) Value: 27
  misc_feature: MA Experiment 20001558 PARAMETER Experiment Name: At_Drought_Soil_Dry_P Parameter: Organism Value: A. thaliana
  misc_feature: MA Experiment 20001558 PARAMETER Experiment Name: At_Drought_Soil_Dry_P Parameter: Plant Line Value: WS
  misc_feature: MA Experiment 20001558 PARAMETER Experiment Name: At_Drought_Soil_Dry_P Parameter: Post Timepoint (hr) Value: 6
  misc_feature: MA Experiment 20001558 PARAMETER Experiment Name: At_Drought_Soil_Dry_P Parameter: Post-Treatment Value: Re-Water vs. No Drought
  misc_feature: MA Experiment 20001558 PARAMETER Experiment Name: At_Drought_Soil_Dry_P Parameter: Timepoint (day) Value: 13
  misc_feature: MA Experiment 20001558 PARAMETER Experiment Name: At_Drought_Soil_Dry_P Parameter: Treatment Value: Drought vs. No Drought
  misc_feature: MA Experiment ID: 20001905 Result: Down-regulated in Transcription
  misc_feature: MA Experiment 20001905 PARAMETER Experiment Name: At_Drought_Reproduction_P Parameter: Age (day) Value: 40
  misc_feature: MA Experiment 20001905 PARAMETER Experiment Name: At_Drought_Reproduction_P Parameter: Organism Value: A. thaliana
  misc_feature: MA Experiment 20001905 PARAMETER Experiment Name: At_Drought_Reproduction_P Parameter: Plant Line Value: WS
  misc_feature: MA Experiment 20001905 PARAMETER Experiment Name: At_Drought_Reproduction_P Parameter: Timepoint (day) Value: 10
  misc_feature: MA Experiment 20001905 PARAMETER Experiment Name: At_Drought_Reproduction_P Parameter: Tissue Value: Rosettes
  misc_feature: MA Experiment 20001905 PARAMETER Experiment Name: At_Drought_Reproduction_P Parameter: Treatment Value: Drought vs. No Drought
  misc_feature: MA Experiment ID: 20001906 Result: Down-regulated in Transcription
  misc_feature: MA Experiment 20001906 PARAMETER Experiment Name: At_Drought_Reproduction_P Parameter: Age (day) Value: 35
  misc_feature: MA Experiment 20001906 PARAMETER Experiment Name: At_Drought_Reproduction_P Parameter: Organism Value: A. thaliana
  misc_feature: MA Experiment 20001906 PARAMETER Experiment Name: At_Drought_Reproduction_P Parameter: Plant Line Value: WS
  misc_feature: MA Experiment 20001906 PARAMETER Experiment Name: At_Drought_Reproduction_P Parameter: Timepoint (day) Value: 5
  misc_feature: MA Experiment 20001906 PARAMETER Experiment Name: At_Drought_Reproduction_P Parameter: Tissue Value: Siliques
  misc_feature: MA Experiment 20001906 PARAMETER Experiment Name: At_Drought_Reproduction_P Parameter: Treatment Value: Drought vs. No Drought
accaatccttcacttcctttcacgatccaaaacaaaacacaagaaaatgcaacaaaatcttctccatctctgaactcaaaaactcattcactgagaaaaatggagacccttctctcccctcgtgcgctctctcctcctctcaatcccaaacctttgtcccttcaccagaccaaacccacttcacattcattgtctctctcaaaacccaccaccttctccggtcctaaacacctctccacccggttcactaaaccggaatcaagaaactggttaatagatgcaaagcaaggactagctgctttagctttatctctaactctcactttctcacctgttggcactgctttagcctctgagttcaatatcctcaacgatggtccacctaaagaaacttacgtagtcgatgacgctggtgttcttagtcgagtgacgaagtcagatcttaagaagcttttgtctgatcttgaatacagaaagaaactgagactcaatttcatcactgtccgaaagctcaccagtaaagcagatgcgtttgagtatgcagaccaggttttggaaaaatggtatccttctattgaagaaggtaacaataagggtattgttgttttgataacaagtcagaaggaaggagctattactggtggtcctgcttttattgaagctgttggtgaaaacattcttgatgctaccgtctccgaaaatcttcccgtactagcaacggacgaaaaatacaacgaggcggtatatagcagtgcgaaaaggttggttgcagctatagacggtcaaccagatcccgggggtccaaccgtaaaggatagcaagagagaatcaaatttcaagacgaaagaagaaaccgatgagaagcgaggacagttcagtcttgtcgttggaggattacttgtaattgcctttgtagttcccatggcacaatactttgcttatgtctccaggaagtaagtaagtaaactcggttcactctcgtaaaccaaaccgatcaggtcagaactttgatttacctcggttatttggttatggtttcttggtaaattggtttatttgaacaatataagtaaataataacagaaaactaaagaatgaatgaaaccatccgattgtaacgg

SEQ ID NO: 35353 - protein, 318 aa, Arabidopsis thaliana; identical to SEQ ID NO: 26771
  peptide (1)..(318): Ceres Seq. ID no. 13501439
  misc_feature (107)..(315): Homolog of NCBI NO: 13812326 NR Description: hypothetical protein [Guillardia theta]
  misc_feature (87)..(314): Homolog of NCBI NO: 23128295 NR Description: hypothetical protein [Nostoc punctiforme]
  misc_feature (89)..(315): Homolog of NCBI NO: 16330824 NR Description: hypothetical protein [Synechocystis sp. PCC 6803]
  misc_feature (100)..(316): Homolog of NCBI NO: 17231592 NR Description: hypothetical protein [Nostoc sp. PCC 7120]
  misc_feature (89)..(314): Homolog of NCBI NO: 22297947 NR Description: ORF_ID:tll0404~hypothetical protein
  misc_feature (98)..(316): Homolog of NCBI NO: 23041448 NR Description: hypothetical protein [Trichodesmium erythraeum
  misc_feature (34)..(318): Homolog of NCBI NO: 18405061 NR Description: thylakoid lumen 18.3 kDa protein [Arabidopsis

SEQ ID NO: 35354 - protein, 285 aa, Arabidopsis thaliana; identical to SEQ ID NO: 26772
  peptide (1)..(285): Ceres Seq. ID no. 13501440
  misc_feature (74)..(282): Homolog of NCBI NO: 13812326 NR Description: hypothetical protein [Guillardia theta]
  misc_feature (54)..(281): Homolog of NCBI NO: 23128295 NR Description: hypothetical protein [Nostoc punctiforme]
  misc_feature (56)..(282): Homolog of NCBI NO: 16330824 NR Description: hypothetical protein [Synechocystis sp. PCC 6803]
  misc_feature (67)..(283): Homolog of NCBI NO: 17231592 NR Description: hypothetical protein [Nostoc sp. PCC 7120]
  misc_feature (56)..(281): Homolog of NCBI NO: 22297947 NR Description: ORF_ID:tll0404~hypothetical protein
  misc_feature (65)..(283): Homolog of NCBI NO: 23041448 NR Description: hypothetical protein [Trichodesmium erythraeum
  misc_feature (1)..(285): Homolog of NCBI NO: 18405061 NR Description: thylakoid lumen 18.3 kDa protein [Arabidopsis

SEQ ID NO: 35355 - DNA, 1069 bp, Arabidopsis thaliana
  misc_feature (1)..(1069): Ceres Seq. ID no. 13593680
  misc_feature: MA Experiment ID: 108434 Result: Up-regulated in Transcription
  misc_feature: MA Experiment 108434 PARAMETER Experiment Name: At_Root_Tips_cDNA_P Parameter: Tissue Value: Root Tips
  misc_feature: MA Experiment ID: 108463 Result: Down-regulated in Transcription
  misc_feature: MA Experiment 108463 PARAMETER Experiment Name: At_Germinating_Seeds_cDNA_P Parameter: Age (day) Value: 3 vs. 0
  misc_feature: MA Experiment 108463 PARAMETER Experiment Name: At_Germinating_Seeds_cDNA_P Parameter: Tissue Value: Germinating Seeds
ggtgaagccaaaggcatcgtgagcaaaatccgcagttttctacattaatggattgtttctgttctagagcttctcttccgtctctgtgatttctgggtagattctaggatttctatttgcatctctaacctgagagctgctaatagtccacacaactttttagtttgtgagttttcctaatttagggttaggacaaatttctgtatttttcatccaaggggataaagatgtatgctgataaattggaggctgagtctggaagcaggaaggtcgttaaggatcgtatcaatggcggttctggagacatctctactcgcgtgcgacaagtgactgggaagaggcaaaggcaggacgacaaatgggagcatgatcttttcagtagtgacaaacctcaactttcaaatcgcagggttgatcctagagatcttcgtttgaagctccaaaagagacatcatgggtctcaaagtgggcgagaagctggttcaggcgtgcgggatttacgggatcagctctctgggacaatgaatcagcaaccaaaaaacagtgacccaccaaaatccaaagcggaggctgctaggccaagtatgaagagcgtagcgactgaaacagagactagaaaaacttccagtcaagctaccaggaagaaatcacagcaggctgattcatcggttgatagctttcttgaatcattgggtctcgagaaatattcaacagcgtttcaagtggaagaagttgatatggatgctctcatgcatatgacagatgatgacctcaaggctatgctcataccgatgggtccgaggaagaagatacttcttgctttgggatctaaaccctaagagcttagtgccatctacctgatggttggaagctcaggtgaatggtctctggagttgttacattaagaattgtcagaaatgaattggctctttttctcttgattgtattttgcccattttaagagcttagaatttggttagacatctgtaatcgtaaacatggtgaaacatacactgtttgattgcaccacttttgatgtgagagaagccttaagataaacacaacaacg

SEQ ID NO: 35356 - protein, 203 aa, Arabidopsis thaliana
  peptide (1)..(203): Ceres Seq. ID no. 13593681
  misc_feature (141)..(203): Pfam Name: SAM domain (Sterile alpha motif) Pfam Description: SAM domain (Sterile alpha motif)
  misc_feature (73)..(203): Homolog of NCBI NO: 22330538 NR Description: expressed protein [Arabidopsis thaliana]
  misc_feature (1)..(189): Homolog of NCBI NO: 39546279 NR Description: OSJNBa0083D01.12 [Oryza sativa (japonica
  misc_feature (1)..(200): Homolog of NCBI NO: 30695517 NR Description: expressed protein [Arabidopsis thaliana]
  misc_feature (1)..(203): Homolog of NCBI NO: 18397861 NR Description: expressed protein [Arabidopsis thaliana]
MYADKLEAESGSRKVVKDRINGGSGDISTRVRQVTGKRQRQDDKWEHDLFSSDKPQLSNRRVDPRDLRLKLQKRHHGSQSGREAGSGVRDLRDQLSGTMNQQPKNSDPPKSKAEAARPSMKSVATETETRKTSSQATRKKSQQADSSVDSFLESLGLEKYSTAFQVEEVDMDALMHMTDDDLKAMLIPMGPRKKILLALGSKP

SEQ ID NO: 35357 - protein, 105 aa, Arabidopsis thaliana
  peptide (1)..(105): Ceres Seq. ID no. 13593682
  misc_feature (43)..(105): Pfam Name: SAM domain (Sterile alpha motif) Pfam Description: SAM domain (Sterile alpha motif)
  misc_feature (1)..(105): Homolog of NCBI NO: 22330538 NR Description: expressed protein [Arabidopsis thaliana]
  misc_feature (1)..(91): Homolog of NCBI NO: 39546279 NR Description: OSJNBa0083D01.12 [Oryza sativa (japonica
  misc_feature (1)..(102): Homolog of NCBI NO: 30695517 NR Description: expressed protein [Arabidopsis thaliana]
  misc_feature (1)..(105): Homolog of NCBI NO: 18397861 NR Description: expressed protein [Arabidopsis thaliana]
MNQQPKNSDPPKSKAEAARPSMKSVATETETRKTSSQATRKKSQQADSSVDSFLESLGLEKYSTAFQVEEVDMDALMHMTDDDLKAMLIPMGPRKKILLALGSKP

SEQ ID NO: 35358 - DNA, 722 bp, Arabidopsis thaliana
  misc_feature (1)..(722): Ceres Seq. ID no. 13497755
  misc_feature: MA Experiment ID: 108434 Result: Up-regulated in Transcription
  misc_feature: MA Experiment 108434 PARAMETER Experiment Name: At_Root_Tips_cDNA_P Parameter: Tissue Value: Root Tips
  misc_feature: MA Experiment ID: 108573 Result: Down-regulated in Transcription
  misc_feature: MA Experiment 108573 PARAMETER Experiment Name: At_Drought_cDNA_P Parameter: Timepoint (hr) Value: 6
  misc_feature: MA Experiment 108573 PARAMETER Experiment Name: At_Drought_cDNA_P Parameter: Tissue Value: Aerial
  misc_feature: MA Experiment 108573 PARAMETER Experiment Name: At_Drought_cDNA_P Parameter: Treatment Value: Drought vs. No Drought
  misc_feature: MA Experiment ID: 108577 Result: Down-regulated in Transcription
  misc_feature: MA Experiment 108577 PARAMETER Experiment Name: At_42deg_Heat_cDNA_P Parameter: Temperature (deg C) Value: 42 vs. 22
  misc_feature: MA Experiment 108577 PARAMETER Experiment Name: At_42deg_Heat_cDNA_P Parameter: Timepoint (hr) Value: 6
  misc_feature: MA Experiment 108577 PARAMETER Experiment Name: At_42deg_Heat_cDNA_P Parameter: Tissue Value: Aerial
  misc_feature: MA Experiment ID: 108579 Result: Up-regulated in Transcription
  misc_feature: MA Experiment 108579 PARAMETER Experiment Name: At_4deg_Cold_cDNA_P Parameter: Temperature (deg C) Value: 4 vs. 22
  misc_feature: MA Experiment 108579 PARAMETER Experiment Name: At_4deg_Cold_cDNA_P Parameter: Timepoint (hr) Value: 6
  misc_feature: MA Experiment 108579 PARAMETER Experiment Name: At_4deg_Cold_cDNA_P Parameter: Tissue Value: Aerial
  misc_feature: MA Experiment ID: 20000072 Result: Down-regulated in Transcription
  misc_feature: MA Experiment 20000072 PARAMETER Experiment Name: At_100uM_ABA_Mutants_cDNA_P Parameter: Plant Line Value: CS8105
  misc_feature: MA Experiment 20000072 PARAMETER Experiment Name: At_100uM_ABA_Mutants_cDNA_P Parameter: Timepoint (hr) Value: 6
  misc_feature: MA Experiment 20000072 PARAMETER Experiment Name: At_100uM_ABA_Mutants_cDNA_P Parameter: Tissue Value: Aerial
  misc_feature: MA Experiment 20000072 PARAMETER Experiment Name: At_100uM_ABA_Mutants_cDNA_P Parameter: Treatment Value: 100uM ABA vs. No Treatment
  misc_feature: MA Experiment ID: 20000179 Result: Up-regulated in Transcription
  misc_feature: MA Experiment 20000179 PARAMETER Experiment Name: At_Germinating_Seeds_P Parameter: Age (hr) Value: 6 vs. 0
  misc_feature: MA Experiment 20000179 PARAMETER Experiment Name: At_Germinating_Seeds_P Parameter: Tissue Value: Germinating Seeds
  misc_feature: MA Experiment ID: 20000180 Result: Up-regulated in Transcription
  misc_feature: MA Experiment 20000180 PARAMETER Experiment Name: At_Germinating_Seeds_P Parameter: Age (hr) Value: 24 vs. 0
  misc_feature: MA Experiment 20000180 PARAMETER Experiment Name: At_Germinating_Seeds_P Parameter: Tissue Value: Germinating Seeds
  misc_feature: MA Experiment ID: 20000234 Result: Up-regulated in Transcription
  misc_feature: MA Experiment 20000234 PARAMETER Experiment Name: At_Siliques_P Parameter: Age (day) Value: 21
  misc_feature: MA Experiment 20000234 PARAMETER Experiment Name: At_Siliques_P Parameter: Organism Value: A. thaliana
  misc_feature: MA Experiment 20000234 PARAMETER Experiment Name: At_Siliques_P Parameter: Plant Line Value: WS
  misc_feature: MA Experiment 20000234 PARAMETER Experiment Name: At_Siliques_P Parameter: Tissue Value: Less Than 5mm Siliques vs. Whole Plant
  misc_feature: MA Experiment ID: 20000235 Result: Up-regulated in Transcription
  misc_feature: MA Experiment 20000235 PARAMETER Experiment Name: At_Siliques_P Parameter: Age (day) Value: 21
  misc_feature: MA Experiment 20000235 PARAMETER Experiment Name: At_Siliques_P Parameter: Organism Value: A. thaliana
  misc_feature: MA Experiment 20000235 PARAMETER Experiment Name: At_Siliques_P Parameter: Plant Line Value: WS
  misc_feature: MA Experiment 20000235 PARAMETER Experiment Name: At_Siliques_P Parameter: Tissue Value: 5-10mm Siliques vs. Whole Plant
  misc_feature: MA Experiment ID: 20000265 Result: Up-regulated in Transcription
  misc_feature: MA Experiment 20000265 PARAMETER Experiment Name: At_Open_Flower_P Parameter: Age (day) Value: 21
  misc_feature: MA Experiment 20000265 PARAMETER Experiment Name: At_Open_Flower_P Parameter: Plant Line Value: WS
  misc_feature: MA Experiment 20000265 PARAMETER Experiment Name: At_Open_Flower_P Parameter: Tissue Value: Closed Flower vs. Whole Plant
  misc_feature: MA Experiment ID: 20001560 Result: Up-regulated in Transcription
  misc_feature: MA Experiment 20001560 PARAMETER Experiment Name: At_Drought_Soil_Dry_P Parameter: Age (day) Value: 28
  misc_feature: MA Experiment 20001560 PARAMETER Experiment Name: At_Drought_Soil_Dry_P Parameter: Organism Value: A. thaliana
  misc_feature: MA Experiment 20001560 PARAMETER Experiment Name: At_Drought_Soil_Dry_P Parameter: Plant Line Value: WS
  misc_feature: MA Experiment 20001560 PARAMETER Experiment Name: At_Drought_Soil_Dry_P Parameter: Post Timepoint (hr) Value: None
  misc_feature: MA Experiment 20001560 PARAMETER Experiment Name: At_Drought_Soil_Dry_P Parameter: Post-Treatment Value: None
  misc_feature: MA Experiment 20001560 PARAMETER Experiment Name: At_Drought_Soil_Dry_P Parameter: Timepoint (day) Value: 14
  misc_feature: MA Experiment 20001560 PARAMETER Experiment Name: At_Drought_Soil_Dry_P Parameter: Treatment Value: Drought vs. No Drought
gaatttattctcatgtttgtttgtttctcactttaccaatctcacttacagatcttccttcttcttcctcttcctcttcttcttccttaaaccctacaagcttctactctattgacaatttgattccgagtttacatcgataatggcggaccaaacctccgattcaacatctcccgtggctcctctctccgtatcttctcctactgctactaagaaagataataccaatcctgttgattcgaagctcacggaattgaatgaatcaagggctgagttactaaacaggatccagaatctgaaacaggacttgcaaagttggagaggtaaattggacactcaagttaaagtctaccgtgaggagctctctgggctaaagaagactctgaatcttgaagttgagcagcttcgtgaggaattcaaagatctgaaaactaccttgaatcaacagcaagatgatgtttccgctagcctgaaaagcttaggcctacaagattcaaaagagcaaattgataagagaagtgaggtgacagaagagaaagtggaagctctatcgactgatgataatgccaaagaagcagaacattagataatatgaaattgtttgttcttatgatattctcgccactactgttaccactaccttgagattgtactagtatgcttaatatgtagttccgcggtttagttgattctaatgatgcaccatgacacaatggtttgct

SEQ ID NO: 35359 - protein, 147 aa, Arabidopsis thaliana
  peptide (1)..(147): Ceres Seq. ID no. 13497756
  misc_feature (14)..(145): Homolog of NCBI NO: 22831125 NR Description: contains ESTs
  misc_feature (26)..(147): Homolog of NCBI NO: 7485072 NR Description: hypothetical protein - Arabidopsis thaliana
  misc_feature (11)..(120): Homolog of NCBI NO: 29370843 NR Description: unknown [Oryza sativa (japonica cultivar-group)]
  misc_feature (1)..(123): Homolog of NCBI NO: 7485072 NR Description: hypothetical protein - Arabidopsis thaliana
  misc_feature (1)..(147): Homolog of NCBI NO: 21592347 NR Description: unknown [Arabidopsis thaliana]
  misc_feature (1)..(147): Homolog of NCBI NO: 18175846 NR Description: unknown protein [Arabidopsis thaliana]
  misc_feature (1)..(147): Homolog of NCBI NO: 30683404 NR Description: expressed protein [Arabidopsis thaliana]
MADQTSDSTSPVAPLSVSSPTATKKDNTNPVDSKLTELNESRAELLNRIQNLKQDLQSWRGKLDTQVKVYREELSGLKKTLNLEVEQLREEFKDLKTTLNQQQDDVSASLKSLGLQDSKEQIDKRSEVTEEKVEALSTDDNAKEAEH

SEQ ID NO: 35360 - DNA, 967 bp, Arabidopsis thaliana
  misc_feature (1)..(967): Ceres Seq. ID no. 13497723
  misc_feature: MA Experiment ID: 108462 Result: Up-regulated in Transcription
  misc_feature: MA Experiment 108462 PARAMETER Experiment Name: At_Germinating_Seeds_cDNA_P Parameter: Age (day) Value: 2 vs. 0
  misc_feature: MA Experiment 108462 PARAMETER Experiment Name: At_Germinating_Seeds_cDNA_P Parameter: Tissue Value: Germinating Seeds
  misc_feature: MA Experiment ID: 108463 Result: Up-regulated in Transcription
  misc_feature: MA Experiment 108463 PARAMETER Experiment Name: At_Germinating_Seeds_cDNA_P Parameter: Age (day) Value: 3 vs. 0
  misc_feature: MA Experiment 108463 PARAMETER Experiment Name: At_Germinating_Seeds_cDNA_P Parameter: Tissue Value: Germinating Seeds
  misc_feature: MA Experiment ID: 108464 Result: Up-regulated in Transcription
  misc_feature: MA Experiment 108464 PARAMETER Experiment Name: At_Germinating_Seeds_cDNA_P Parameter: Age (day) Value: 4 vs. 0
  misc_feature: MA Experiment 108464 PARAMETER Experiment Name: At_Germinating_Seeds_cDNA_P Parameter: Tissue Value: Germinating Seeds
  misc_feature: MA Experiment ID: 108501 Result: Down-regulated in Transcription
  misc_feature: MA Experiment 108501 PARAMETER Experiment Name: At_ap2_floral_buds_cDNA_P Parameter: Plant Line Value: ap2 (Ler.)
  misc_feature: MA Experiment 108501 PARAMETER Experiment Name: At_ap2_floral_buds_cDNA_P Parameter: Tissue Value: Closed Flower
  misc_feature: MA Experiment ID: 108574 Result: Down-regulated in Transcription
  misc_feature: MA Experiment 108574 PARAMETER Experiment Name: At_Wounding__cDNA_P Parameter: Timepoint (hr) Value: 1
  misc_feature: MA Experiment 108574 PARAMETER Experiment Name: At_Wounding__cDNA_P Parameter: Tissue Value: Aerial
  misc_feature: MA Experiment 108574 PARAMETER Experiment Name: At_Wounding__cDNA_P Parameter: Treatment Value: Wounding vs. No Wounding
  misc_feature: MA Experiment ID: 108585 Result: Up-regulated in Transcription
  misc_feature: MA Experiment 108585 PARAMETER Experiment Name: At_5mM_NaNP_cDNA_P Parameter: Timepoint (hr) Value: 6
  misc_feature: MA Experiment 108585 PARAMETER Experiment Name: At_5mM_NaNP_cDNA_P Parameter: Tissue Value: Aerial
  misc_feature: MA Experiment 108585 PARAMETER Experiment Name: At_5mM_NaNP_cDNA_P Parameter: Treatment Value: null
  misc_feature: MA Experiment ID: 108594 Result: Up-regulated in Transcription
  misc_feature: MA Experiment 108594 PARAMETER Experiment Name: At_Ler-rhl_Root_cDNA_P Parameter: Plant Line Value: null
  misc_feature: MA Experiment ID: 108595 Result: Down-regulated in Transcription
  misc_feature: MA Experiment 108595 PARAMETER Experiment Name: At_Ler-pi_Ovule_cDNA_P Parameter: Plant Line Value: null
  misc_feature: MA Experiment ID: 20000144 Result: Down-regulated in Transcription
  misc_feature: MA Experiment 20000144 PARAMETER Experiment Name: At_42deg_Heat_cDNA_P Parameter: Temperature (deg C) Value: 42 vs. 22
  misc_feature: MA Experiment 20000144 PARAMETER Experiment Name: At_42deg_Heat_cDNA_P Parameter: Timepoint (hr) Value: 1
  misc_feature: MA Experiment 20000144 PARAMETER Experiment Name: At_42deg_Heat_cDNA_P Parameter: Tissue Value: Aerial
  misc_feature: MA Experiment ID: 20000173 Result: Down-regulated in Transcription
  misc_feature: MA Experiment 20000173 PARAMETER Experiment Name: At_42deg_Heat_P Parameter: Age (day) Value: 14
  misc_feature: MA Experiment 20000173 PARAMETER Experiment Name: At_42deg_Heat_P Parameter: Organism Value: A. thaliana
  misc_feature: MA Experiment 20000173 PARAMETER Experiment Name: At_42deg_Heat_P Parameter: Plant Line Value: WS
  misc_feature: MA Experiment 20000173 PARAMETER Experiment Name: At_42deg_Heat_P Parameter: Temperature (deg C) Value: 42 vs. 22
  misc_feature: MA Experiment 20000173 PARAMETER Experiment Name: At_42deg_Heat_P Parameter: Timepoint (hr) Value: 6
  misc_feature: MA Experiment 20000173 PARAMETER Experiment Name: At_42deg_Heat_P Parameter: Tissue Value: Aerial
  misc_feature: MA Experiment ID: 20000180 Result: Up-regulated in Transcription
  misc_feature: MA Experiment 20000180 PARAMETER Experiment Name: At_Germinating_Seeds_P Parameter: Age (hr) Value: 24 vs. 0
  misc_feature: MA Experiment 20000180 PARAMETER Experiment Name: At_Germinating_Seeds_P Parameter: Tissue Value: Germinating Seeds
  misc_feature: MA Experiment ID: 20000185 Result: Down-regulated in Transcription
  misc_feature: MA Experiment 20000185 PARAMETER Experiment Name: At_Roots__P Parameter: Age (day) Value: 7 vs. 21
  misc_feature: MA Experiment 20000185 PARAMETER Experiment Name: At_Roots__P Parameter: Organism Value: A. thaliana
  misc_feature: MA Experiment 20000185 PARAMETER Experiment Name: At_Roots__P Parameter: Tissue Value: Roots vs. Whole Plant
  misc_feature: MA Experiment ID: 20000213 Result: Down-regulated in Transcription
  misc_feature: MA Experiment 20000213 PARAMETER Experiment Name: At_4deg_Cold_P Parameter: Timepoint (hr) Value: 2
  misc_feature: MA Experiment ID: 20000224 Result: Down-regulated in Transcription
  misc_feature: MA Experiment ID: 20000234 Result: Down-regulated in Transcription
  misc_feature: MA Experiment 20000234 PARAMETER Experiment Name: At_Siliques_P Parameter: Age (day) Value: 21
  misc_feature: MA Experiment 20000234 PARAMETER Experiment Name: At_Siliques_P Parameter: Organism Value: A. thaliana
  misc_feature: MA Experiment 20000234 PARAMETER Experiment Name: At_Siliques_P Parameter: Plant Line Value: WS
  misc_feature: MA Experiment 20000234 PARAMETER Experiment Name: At_Siliques_P Parameter: Tissue Value: Less Than 5mm Siliques vs. Whole Plant
  misc_feature: MA Experiment ID: 20000264 Result: Up-regulated in Transcription
  misc_feature: MA Experiment 20000264 PARAMETER Experiment Name: At_Open_Flower_P Parameter: Age (day) Value: 21
  misc_feature: MA Experiment 20000264 PARAMETER Experiment Name: At_Open_Flower_P Parameter: Plant Line Value: WS
  misc_feature: MA Experiment 20000264 PARAMETER Experiment Name: At_Open_Flower_P Parameter: Tissue Value: Open Flower vs. Whole Plant
  misc_feature: MA Experiment ID: 20000268 Result: Down-regulated in Transcription
  misc_feature: MA Experiment 20000268 PARAMETER Experiment Name: At_100mM_NaCl__P Parameter: Age (day) Value: 14
  misc_feature: MA Experiment 20000268 PARAMETER Experiment Name: At_100mM_NaCl__P Parameter: Organism Value: A. thaliana
  misc_feature: MA Experiment 20000268 PARAMETER Experiment Name: At_100mM_NaCl__P Parameter: Plant Line Value: WS
  misc_feature: MA Experiment 20000268 PARAMETER Experiment Name: At_100mM_NaCl__P Parameter: Timepoint (hr) Value: 6
  misc_feature: MA Experiment 20000268 PARAMETER Experiment Name: At_100mM_NaCl__P Parameter: Tissue Value: Whole Plant
  misc_feature: MA Experiment 20000268 PARAMETER Experiment Name: At_100mM_NaCl__P Parameter: Treatment Value: 100mM NaCl vs. No Treatment
  misc_feature: MA Experiment ID: 20000286 Result: Up-regulated in Transcription
  misc_feature: MA Experiment 20000286 PARAMETER Experiment Name: At_Open_Flower_P Parameter: Age (day) Value: 21
  misc_feature: MA Experiment 20000286 PARAMETER Experiment Name: At_Open_Flower_P Parameter: Plant Line Value: WS
  misc_feature: MA Experiment 20000286 PARAMETER Experiment Name: At_Open_Flower_P Parameter: Tissue Value: Half Open vs. Whole Plant
  misc_feature: MA Experiment ID: 20000308 Result: Down-regulated in Transcription
  misc_feature: MA Experiment 20000308 PARAMETER Experiment Name: At_100mM_NaCl__P Parameter: Age (day) Value: 17
  misc_feature: MA Experiment 20000308 PARAMETER Experiment Name: At_100mM_NaCl__P Parameter: Organism Value: A. thaliana
  misc_feature: MA Experiment 20000308 PARAMETER Experiment Name: At_100mM_NaCl__P Parameter: Plant Line Value: WS
  misc_feature: MA Experiment 20000308 PARAMETER Experiment Name: At_100mM_NaCl__P Parameter: Timepoint (hr) Value: 72
  misc_feature: MA Experiment 20000308 PARAMETER Experiment Name: At_100mM_NaCl__P Parameter: Tissue Value: Whole Plant
  misc_feature: MA Experiment 20000308 PARAMETER Experiment Name: At_100mM_NaCl__P Parameter: Treatment Value: 100mM NaCl vs. No Treatment
  misc_feature: MA Experiment ID: 20000437 Result: Down-regulated in Transcription
  misc_feature: MA Experiment 20000437 PARAMETER Experiment Name: At_Drought_P Parameter: Age (day) Value: 8
  misc_feature: MA Experiment 20000437 PARAMETER Experiment Name: At_Drought_P Parameter: Organism Value: A. thaliana
  misc_feature: MA Experiment 20000437 PARAMETER Experiment Name: At_Drought_P Parameter: Plant Line Value: WS
  misc_feature: MA Experiment 20000437 PARAMETER Experiment Name: At_Drought_P Parameter: Timepoint (hr) Value: 24
  misc_feature: MA Experiment 20000437 PARAMETER Experiment Name: At_Drought_P Parameter: Tissue Value: Whole Plant
  misc_feature: MA Experiment 20000437 PARAMETER Experiment Name: At_Drought_P Parameter: Treatment Value: Drought vs. No Drought
  misc_feature: MA Experiment ID: 20000439 Result: Down-regulated in Transcription
  misc_feature: MA Experiment 20000439 PARAMETER Experiment Name: At_Roots__P Parameter: Age (day) Value: 14 vs. 21
  misc_feature: MA Experiment 20000439 PARAMETER Experiment Name: At_Roots__P Parameter: Organism Value: A. thaliana
  misc_feature: MA Experiment 20000439 PARAMETER Experiment Name: At_Roots__P Parameter: Tissue Value: Roots vs. Whole Plant
  misc_feature: MA Experiment ID: 20000452 Result: Down-regulated in Transcription
  misc_feature: MA Experiment 20000452 PARAMETER Experiment Name: At_CS6879_Shoots-Roots_P Parameter: Age (day) Value: 14
  misc_feature: MA Experiment 20000452 PARAMETER Experiment Name: At_CS6879_Shoots-Roots_P Parameter: Organism Value: A. thaliana
  misc_feature: MA Experiment 20000452 PARAMETER Experiment Name: At_CS6879_Shoots-Roots_P Parameter: Plant Line Value: CS6879 vs. WS
  misc_feature: MA Experiment 20000452 PARAMETER Experiment Name: At_CS6879_Shoots-Roots_P Parameter: Tissue Value: Shoots
  misc_feature: MA Experiment ID: 20000794 Result: Up-regulated in Transcription
  misc_feature: MA Experiment 20000794 PARAMETER Experiment Name: At_Petals_P Parameter: Age (day) Value: 23-25 days
  misc_feature: MA Experiment 20000794 PARAMETER Experiment Name: At_Petals_P Parameter: Plant Line Value: WS
  misc_feature: MA Experiment 20000794 PARAMETER Experiment Name: At_Petals_P Parameter: Tissue Value: Petals vs. Whole plant
  misc_feature: MA Experiment ID: 20001247 Result: Up-regulated in Transcription
  misc_feature: MA Experiment 20001247 PARAMETER Experiment Name: At_Far-red-induction_P Parameter: Age (day) Value: 7
  misc_feature: MA Experiment 20001247 PARAMETER Experiment Name: At_Far-red-induction_P Parameter: Light Value: Far-red vs. White
  misc_feature: MA Experiment 20001247 PARAMETER Experiment Name: At_Far-red-induction_P Parameter: Organism Value: A. thaliana
  misc_feature: MA Experiment 20001247 PARAMETER Experiment Name: At_Far-red-induction_P Parameter: Plant Line Value: Columbia
  misc_feature: MA Experiment 20001247 PARAMETER Experiment Name: At_Far-red-induction_P Parameter: Timepoint (hr) Value: 1
  misc_feature: MA Experiment 20001247 PARAMETER Experiment Name: At_Far-red-induction_P Parameter: Tissue Value: Whole Plant
  misc_feature: MA Experiment ID: 20001248 Result: Up-regulated in Transcription
  misc_feature: MA Experiment 20001248 PARAMETER Experiment Name: At_Far-red-induction_P Parameter: Age (day) Value: 7
  misc_feature: MA Experiment 20001248 PARAMETER Experiment Name: At_Far-red-induction_P Parameter: Light Value: Far-red vs. White
  misc_feature: MA Experiment 20001248 PARAMETER Experiment Name: At_Far-red-induction_P Parameter: Organism Value: A. thaliana
  misc_feature: MA Experiment 20001248 PARAMETER Experiment Name: At_Far-red-induction_P Parameter: Plant Line Value: Columbia
  misc_feature: MA Experiment 20001248 PARAMETER Experiment Name: At_Far-red-induction_P Parameter: Timepoint (hr) Value: 4
  misc_feature: MA Experiment 20001248 PARAMETER Experiment Name: At_Far-red-induction_P Parameter: Tissue Value: Whole Plant
  misc_feature: MA Experiment ID: 20001450 Result: Up-regulated in Transcription
  misc_feature: MA Experiment 20001450 PARAMETER Experiment Name: At_Far-red-induction_P Parameter: Age (day) Value: 7
  misc_feature: MA Experiment 20001450 PARAMETER Experiment Name: At_Far-red-induction_P Parameter: Light Value: Far-red vs. White
  misc_feature: MA Experiment 20001450 PARAMETER Experiment Name: At_Far-red-induction_P Parameter: Organism Value: A. thaliana
  misc_feature: MA Experiment 20001450 PARAMETER Experiment Name: At_Far-red-induction_P Parameter: Plant Line Value: Columbia
  misc_feature: MA Experiment 20001450 PARAMETER Experiment Name: At_Far-red-induction_P Parameter: Timepoint (hr) Value: 8
  misc_feature: MA Experiment 20001450 PARAMETER Experiment Name: At_Far-red-induction_P Parameter: Tissue Value: Whole Plant
  misc_feature: MA Experiment ID: 20001451 Result: Up-regulated in Transcription
  misc_feature: MA Experiment 20001451 PARAMETER Experiment Name: At_Far-red-induction_P Parameter: Age (day) Value: 7
  misc_feature: MA Experiment 20001451 PARAMETER Experiment Name: At_Far-red-induction_P Parameter: Light Value: Far-red vs. White
  misc_feature: MA Experiment 20001451 PARAMETER Experiment Name: At_Far-red-induction_P Parameter: Organism Value: A. thaliana
  misc_feature: MA Experiment 20001451 PARAMETER Experiment Name: At_Far-red-induction_P Parameter: Plant Line Value: Columbia
  misc_feature: MA Experiment 20001451 PARAMETER Experiment Name: At_Far-red-induction_P Parameter: Timepoint (hr) Value: 24
  misc_feature: MA Experiment 20001451 PARAMETER Experiment Name: At_Far-red-induction_P Parameter: Tissue Value: Whole Plant
  misc_feature: MA Experiment ID: 20001554 Result: Down-regulated in Transcription
  misc_feature: MA Experiment 20001554 PARAMETER Experiment Name: At_Drought_Soil_Dry_P Parameter: Age (day) Value: 21
  misc_feature: MA Experiment 20001554 PARAMETER Experiment Name: At_Drought_Soil_Dry_P Parameter: Organism Value: A. thaliana
  misc_feature: MA Experiment 20001554 PARAMETER Experiment Name: At_Drought_Soil_Dry_P Parameter: Plant Line Value: WS
  misc_feature: MA Experiment 20001554 PARAMETER Experiment Name: At_Drought_Soil_Dry_P Parameter: Post Timepoint (hr) Value: None
  misc_feature: MA Experiment 20001554 PARAMETER Experiment Name: At_Drought_Soil_Dry_P Parameter: Post-Treatment Value: None
  misc_feature: MA Experiment 20001554 PARAMETER Experiment Name: At_Drought_Soil_Dry_P Parameter: Timepoint (day) Value: 7
  misc_feature: MA Experiment 20001554 PARAMETER Experiment Name: At_Drought_Soil_Dry_P Parameter: Treatment Value: Drought vs. No Drought
  misc_feature: MA Experiment ID: 20001555 Result: Down-regulated in Transcription
  misc_feature: MA Experiment 20001555 PARAMETER Experiment Name: At_Drought_Soil_Dry_P Parameter: Age (day) Value: 24
  misc_feature: MA Experiment 20001555 PARAMETER Experiment Name: At_Drought_Soil_Dry_P Parameter: Organism Value: A. thaliana
  misc_feature: MA Experiment 20001555 PARAMETER Experiment Name: At_Drought_Soil_Dry_P Parameter: Plant Line Value: WS
  misc_feature: MA Experiment 20001555 PARAMETER Experiment Name: At_Drought_Soil_Dry_P Parameter: Post Timepoint (hr) Value: None
  misc_feature: MA Experiment 20001555 PARAMETER Experiment Name: At_Drought_Soil_Dry_P Parameter: Post-Treatment Value: None
  misc_feature: MA Experiment 20001555 PARAMETER Experiment Name: At_Drought_Soil_Dry_P Parameter: Timepoint (day) Value: 10
  misc_feature: MA Experiment 20001555 PARAMETER Experiment Name: At_Drought_Soil_Dry_P Parameter: Treatment Value: Drought vs. No Drought
  misc_feature: MA Experiment ID: 20001556 Result: Down-regulated in Transcription
  misc_feature: MA Experiment 20001556 PARAMETER Experiment Name: At_Drought_Soil_Dry_P Parameter: Age (day) Value: 26
  misc_feature: MA Experiment 20001556 PARAMETER Experiment Name: At_Drought_Soil_Dry_P Parameter: Organism Value: A. thaliana
  misc_feature: MA Experiment 20001556 PARAMETER Experiment Name: At_Drought_Soil_Dry_P Parameter: Plant Line Value: WS
  misc_feature: MA Experiment 20001556 PARAMETER Experiment Name: At_Drought_Soil_Dry_P Parameter: Post Timepoint (hr) Value: None
  misc_feature: MA Experiment 20001556 PARAMETER Experiment Name: At_Drought_Soil_Dry_P Parameter: Post-Treatment Value: None
  misc_feature: MA Experiment 20001556 PARAMETER Experiment Name: At_Drought_Soil_Dry_P Parameter: Timepoint (day) Value: 12
  misc_feature: MA Experiment 20001556 PARAMETER Experiment Name: At_Drought_Soil_Dry_P Parameter: Treatment Value: Drought vs. No Drought
  misc_feature: MA Experiment ID: 20001557 Result: Down-regulated in Transcription
  misc_feature: MA Experiment 20001557 PARAMETER Experiment Name: At_Drought_Soil_Dry_P Parameter: Age (day) Value: 27
  misc_feature: MA Experiment 20001557 PARAMETER Experiment Name: At_Drought_Soil_Dry_P Parameter: Organism Value: A. thaliana
  misc_feature: MA Experiment 20001557 PARAMETER Experiment Name: At_Drought_Soil_Dry_P Parameter: Plant Line Value: WS
  misc_feature: MA Experiment 20001557 PARAMETER Experiment Name: At_Drought_Soil_Dry_P Parameter: Post Timepoint (hr) Value: 3
  misc_feature: MA Experiment 20001557 PARAMETER Experiment Name: At_Drought_Soil_Dry_P Parameter: Post-Treatment Value: Re-Water vs. No Drought
  misc_feature: MA Experiment 20001557 PARAMETER Experiment Name: At_Drought_Soil_Dry_P Parameter: Timepoint (day) Value: 13
  misc_feature: MA Experiment 20001557 PARAMETER Experiment Name: At_Drought_Soil_Dry_P Parameter: Treatment Value: Drought vs. No Drought
  misc_feature: MA Experiment ID: 20001558 Result: Down-regulated in Transcription
  misc_feature: MA Experiment 20001558 PARAMETER Experiment Name: At_Drought_Soil_Dry_P Parameter: Age (day) Value: 27
  misc_feature: MA Experiment 20001558 PARAMETER Experiment Name: At_Drought_Soil_Dry_P Parameter: Organism Value: A. thaliana
  misc_feature: MA Experiment 20001558 PARAMETER Experiment Name: At_Drought_Soil_Dry_P Parameter: Plant Line Value: WS
  misc_feature: MA Experiment 20001558 PARAMETER Experiment Name: At_Drought_Soil_Dry_P Parameter: Post Timepoint (hr) Value: 6
  misc_feature: MA Experiment 20001558 PARAMETER Experiment Name: At_Drought_Soil_Dry_P Parameter: Post-Treatment Value: Re-Water vs. No Drought
  misc_feature: MA Experiment 20001558 PARAMETER Experiment Name: At_Drought_Soil_Dry_P Parameter: Timepoint (day) Value: 13
  misc_feature: MA Experiment 20001558 PARAMETER Experiment Name: At_Drought_Soil_Dry_P Parameter: Treatment Value: Drought vs. No Drought
  misc_feature: MA Experiment ID: 20001904 Result: Down-regulated in Transcription
  misc_feature: MA Experiment 20001904 PARAMETER Experiment Name: At_Drought_Reproduction_P Parameter: Age (day) Value: 37
  misc_feature: MA Experiment 20001904 PARAMETER Experiment Name: At_Drought_Reproduction_P Parameter: Organism Value: A. thaliana
  misc_feature: MA Experiment 20001904 PARAMETER Experiment Name: At_Drought_Reproduction_P Parameter: Plant Line Value: WS
  misc_feature: MA Experiment 20001904 PARAMETER Experiment Name: At_Drought_Reproduction_P Parameter: Timepoint (day) Value: 7
  misc_feature: MA Experiment 20001904 PARAMETER Experiment Name: At_Drought_Reproduction_P Parameter: Tissue Value: Rosettes
  misc_feature: MA Experiment 20001904 PARAMETER Experiment Name: At_Drought_Reproduction_P Parameter: Treatment Value: Drought vs. No Drought
  misc_feature: MA Experiment ID: 20001906 Result: Down-regulated in Transcription
  misc_feature: MA Experiment 20001906 PARAMETER Experiment Name: At_Drought_Reproduction_P Parameter: Age (day) Value: 35
  misc_feature: MA Experiment 20001906 PARAMETER Experiment Name: At_Drought_Reproduction_P Parameter: Organism Value: A. thaliana
  misc_feature: MA Experiment 20001906 PARAMETER Experiment Name: At_Drought_Reproduction_P Parameter: Plant Line Value: WS
  misc_feature: MA Experiment 20001906 PARAMETER Experiment Name: At_Drought_Reproduction_P Parameter: Timepoint (day) Value: 5
  misc_feature: MA Experiment 20001906 PARAMETER Experiment Name: At_Drought_Reproduction_P Parameter: Tissue Value: Siliques
  misc_feature: MA Experiment 20001906 PARAMETER Experiment Name: At_Drought_Reproduction_P Parameter: Treatment Value: Drought vs. No Drought
  misc_feature: MA Experiment ID: 20001908 Result: Down-regulated in Transcription
  misc_feature: MA Experiment 20001908 PARAMETER Experiment Name: At_Drought_Reproduction_P Parameter: Age (day) Value: 40
  misc_feature: MA Experiment 20001908 PARAMETER Experiment Name: At_Drought_Reproduction_P Parameter: Organism Value: A. thaliana
  misc_feature: MA Experiment 20001908 PARAMETER Experiment Name: At_Drought_Reproduction_P Parameter: Plant Line Value: WS
  misc_feature: MA Experiment 20001908 PARAMETER Experiment Name: At_Drought_Reproduction_P Parameter: Timepoint (day) Value: 10
  misc_feature: MA Experiment 20001908 PARAMETER Experiment Name: At_Drought_Reproduction_P Parameter: Tissue Value: Siliques
  misc_feature: MA Experiment 20001908 PARAMETER Experiment Name: At_Drought_Reproduction_P Parameter: Treatment Value: Drought vs. No Drought
  misc_feature: MA Experiment ID: 20001911 Result: Down-regulated in Transcription
  misc_feature: MA Experiment 20001911 PARAMETER Experiment Name: At_Drought_Reproduction_P Parameter: Age (day) Value: 40
  misc_feature: MA Experiment 20001911 PARAMETER Experiment Name: At_Drought_Reproduction_P Parameter: Organism Value: A. thaliana
  misc_feature: MA Experiment 20001911 PARAMETER Experiment Name: At_Drought_Reproduction_P Parameter: Plant Line Value: WS
  misc_feature: MA Experiment 20001911 PARAMETER Experiment Name: At_Drought_Reproduction_P Parameter: Timepoint (day) Value: 10
  misc_feature: MA Experiment 20001911 PARAMETER Experiment Name: At_Drought_Reproduction_P Parameter: Tissue Value: Flowers
  misc_feature: MA Experiment 20001911 PARAMETER Experiment Name: At_Drought_Reproduction_P Parameter: Treatment Value: Drought vs. No Drought
atttacaactgtggataagccttttagtctgactcagctttctcaagatccgaaaacacactgacccaacccggttcgattttgcttaaccggacaagatacattaatctgcctaatcttcaattatttaaaagctaactaaacgttatacgtactaatcacttcttcccctataaataaacctttctaatttctcatctcaaatcacactgcatcacaaaacccaaatcggaacttaaaccaaaagacaaacaaaaacgccgtcgtttcacgatgctttcttcttccccaaccttcttcgctactccatttctctcttcttcttcttcttcttctccgtcgttctcttctacttcaccaccgtcacgcatttcccggatctcgccgtcgctttctacaaccaccgcgtcctacacctgcgccgaagatctaccgagattacgccaaatcccgcagcgattttcagcaaccgcgtctctctacgagatccttgaaattcccgtcggctcgacgagtcaagagatcaaatcagcttaccggcgactagccaggatctgtcatcccgatgtagcgagaaatagtcgggataactcgtcggcggacgatttcatgaagatccacgcagcgtattgcacgctttcggatcccgagaaacgcgccgtttatgatcggaggactcttcttcggagccggccgttaacggctggatacggcagttacggtggacggaattgggaaaccgatcagtgctggtagcgagttgactcgatgtgtcgagttggtccaaaaccattgaattggttgtaattagagcaaacccagagattctgggtggttgtgccacgtaggatcaacacggtttatcgtgccacgtaggatctgtcgcgttgttagcctttgtatccataattagtaagtagtctgtatttagtatttaccatctaataaagaaaataaaaatttatgt

SEQ ID NO: 35361 - protein, 160 aa, Arabidopsis thaliana
  peptide (1)..(160): Ceres Seq. ID no. 13497724
  misc_feature (68)..(135): Pfam Name: DnaJ domain Pfam Description: DnaJ domain
  misc_feature (69)..(157): Homolog of NCBI NO: 11061652 NR Description: DNAJ protein [Leishmania major]
  misc_feature (17)..(133): Homolog of NCBI NO: 30682610 NR Description: DnaJ protein family [Arabidopsis thaliana]
  misc_feature (17)..(133): Homolog of NCBI NO: 15236355 NR Description: DnaJ protein family [Arabidopsis thaliana]
  misc_feature (17)..(133): Homolog of NCBI NO: 6691127 NR Description: DnaJ-like protein [Arabidopsis thaliana]
  misc_feature (53)..(160): Homolog of NCBI NO: 34863272 NR Description: similar to hypothetical protein FLJ40417 [Rattus
  misc_feature (1)..(160): Homolog of NCBI NO: 15231204 NR Description: DnaJ protein family [Arabidopsis thaliana]
  misc_feature (28)..(160): Homolog of NCBI NO: 7488763 NR Description: DnaJ protein homolog - kidney bean (fragment)
  misc_feature (1)..(160): Homolog of NCBI NO: 9843641 NR Description: J11 protein [Arabidopsis thaliana]
  misc_feature (1)..(160): Homolog of NCBI NO: 15233446 NR Description: DnaJ protein family [Arabidopsis thaliana]
  misc_feature (1)..(160): Homolog of NCBI NO: 15227919 NR Description: J11 protein, putative [Arabidopsis thaliana]
MLSSSPTFFATPFLSSSSSSSPSFSSTSPPSRISRISPSLSTTTASYTCAEDLPRLRQIPQRFSATASLYEILEIPVGSTSQEIKSAYRRLARICHPDVARNSRDNSSADDFMKIHAAYCTLSDPEKRAVYDRRTLLRSRPLTAGYGSYGGRNWETDQCW

SEQ ID NO: 35362 - DNA, 988 bp, Arabidopsis thaliana
  misc_feature (1)..(988): Ceres Seq. ID no. 12396938
  misc_feature: MA Experiment ID: 108473 Result: Up-regulated in Transcription
  misc_feature: MA Experiment 108473 PARAMETER Experiment Name: At_Drought_Flowers_cDNA_P Parameter: Timepoint (hr) Value: 7 d
  misc_feature: MA Experiment 108473 PARAMETER Experiment Name: At_Drought_Flowers_cDNA_P Parameter: Tissue Value: Flower
  misc_feature: MA Experiment 108473 PARAMETER Experiment Name: At_Drought_Flowers_cDNA_P Parameter: Treatment Value: Drought vs. No Drought
  misc_feature: MA Experiment ID: 108474 Result: Down-regulated in Transcription
  misc_feature: MA Experiment 108474 PARAMETER Experiment Name: At_Drought_Flowers_cDNA_P Parameter: Timepoint (hr) Value: null
  misc_feature: MA Experiment 108474 PARAMETER Experiment Name: At_Drought_Flowers_cDNA_P Parameter: Treatment Value: Drought vs. No Drought
  misc_feature: MA Experiment ID: 108561 Result: Up-regulated in Transcription
  misc_feature: MA Experiment 108561 PARAMETER Experiment Name: At_100uM_ABA_cDNA_P Parameter: Timepoint (hr) Value: 6
  misc_feature: MA Experiment 108561 PARAMETER Experiment Name: At_100uM_ABA_cDNA_P Parameter: Tissue Value: Aerial
  misc_feature: MA Experiment 108561 PARAMETER Experiment Name: At_100uM_ABA_cDNA_P Parameter: Treatment Value: 100uM ABA vs. No Treatment
  misc_feature: MA Experiment ID: 108572 Result: Up-regulated in Transcription
  misc_feature: MA Experiment 108572 PARAMETER Experiment Name: At_Drought_cDNA_P Parameter: Timepoint (hr) Value: 1
  misc_feature: MA Experiment 108572 PARAMETER Experiment Name: At_Drought_cDNA_P Parameter: Tissue Value: Aerial
  misc_feature: MA Experiment 108572 PARAMETER Experiment Name: At_Drought_cDNA_P Parameter: Treatment Value: Drought vs. No Drought
  misc_feature: MA Experiment ID: 108573 Result: Up-regulated in Transcription
  misc_feature: MA Experiment 108573 PARAMETER Experiment Name: At_Drought_cDNA_P Parameter: Timepoint (hr) Value: 6
  misc_feature: MA Experiment 108573 PARAMETER Experiment Name: At_Drought_cDNA_P Parameter: Tissue Value: Aerial
  misc_feature: MA Experiment 108573 PARAMETER Experiment Name: At_Drought_cDNA_P Parameter: Treatment Value: Drought vs. No Drought
  misc_feature: MA Experiment ID: 108595 Result: Up-regulated in Transcription
  misc_feature: MA Experiment 108595 PARAMETER Experiment Name: At_Ler-pi_Ovule_cDNA_P Parameter: Plant Line Value: null
  misc_feature: MA Experiment ID: 108605 Result: Up-regulated in Transcription
  misc_feature: MA Experiment 108605 PARAMETER Experiment Name: At_100uM_ABA_cDNA_P Parameter: Timepoint (hr) Value: 6
  misc_feature: MA Experiment 108605 PARAMETER Experiment Name: At_100uM_ABA_cDNA_P Parameter: Tissue Value: Aerial
  misc_feature: MA Experiment 108605 PARAMETER Experiment Name: At_100uM_ABA_cDNA_P Parameter: Treatment Value: 100uM ABA vs. No Treatment
  misc_feature: MA Experiment ID: 108607 Result: Up-regulated in Transcription
  misc_feature: MA Experiment 108607 PARAMETER Experiment Name: At_100uM_ABA_cDNA_P Parameter: Timepoint (hr) Value: 4
  misc_feature: MA Experiment 108607 PARAMETER Experiment Name: At_100uM_ABA_cDNA_P Parameter: Tissue Value: Aerial
  misc_feature: MA Experiment 108607 PARAMETER Experiment Name: At_100uM_ABA_cDNA_P Parameter: Treatment Value: 100uM ABA vs. No Treatment
  misc_feature: MA Experiment ID: 108668 Result: Up-regulated in Transcription
  misc_feature: MA Experiment 108668 PARAMETER Experiment Name: At_2mM_SA_cDNA_P Parameter: Plant Line Value: WS
  misc_feature: MA Experiment 108668 PARAMETER Experiment Name: At_2mM_SA_cDNA_P Parameter: Timepoint (hr) Value: 6
  misc_feature: MA Experiment 108668 PARAMETER Experiment Name: At_2mM_SA_cDNA_P Parameter: Treatment Value: 2mM SA vs. No Treatment
  misc_feature: MA Experiment ID: 20000069 Result: Up-regulated in Transcription
  misc_feature: MA Experiment 20000069 PARAMETER Experiment Name: At_100uM_ABA_Mutants_cDNA_P Parameter: Plant Line Value: CS23
  misc_feature: MA Experiment 20000069 PARAMETER Experiment Name: At_100uM_ABA_Mutants_cDNA_P Parameter: Timepoint (hr) Value: 6
  misc_feature: MA Experiment 20000069 PARAMETER Experiment Name: At_100uM_ABA_Mutants_cDNA_P Parameter: Tissue Value: Aerial
  misc_feature: MA Experiment 20000069 PARAMETER Experiment Name: At_100uM_ABA_Mutants_cDNA_P Parameter: Treatment Value: 100uM ABA vs. No Treatment
  misc_feature: MA Experiment ID: 20000070 Result: Up-regulated in Transcription
  misc_feature: MA Experiment 20000070 PARAMETER Experiment Name: At_100uM_ABA_Mutants_cDNA_P Parameter: Plant Line Value: CS24
  misc_feature: MA Experiment 20000070 PARAMETER Experiment Name: At_100uM_ABA_Mutants_cDNA_P Parameter: Timepoint (hr) Value: 6
  misc_feature: MA Experiment 20000070 PARAMETER Experiment Name: At_100uM_ABA_Mutants_cDNA_P Parameter: Tissue Value: Aerial
  misc_feature: MA Experiment 20000070 PARAMETER Experiment Name: At_100uM_ABA_Mutants_cDNA_P Parameter: Treatment Value: 100uM ABA vs. No Treatment
  misc_feature: MA Experiment ID: 20000071 Result: Up-regulated in Transcription
  misc_feature: MA Experiment 20000071 PARAMETER Experiment Name: At_100uM_ABA_Mutants_cDNA_P Parameter: Plant Line Value: CS8104
  misc_feature: MA Experiment 20000071 PARAMETER Experiment Name: At_100uM_ABA_Mutants_cDNA_P Parameter: Timepoint (hr) Value: 6
  misc_feature: MA Experiment 20000071 PARAMETER Experiment Name: At_100uM_ABA_Mutants_cDNA_P Parameter: Tissue Value: Aerial
  misc_feature: MA Experiment 20000071 PARAMETER Experiment Name: At_100uM_ABA_Mutants_cDNA_P Parameter: Treatment Value: 100uM ABA vs. No Treatment
  misc_feature: MA Experiment ID: 20000086 Result: Up-regulated in Transcription
  misc_feature: MA Experiment 20000086 PARAMETER Experiment Name: At_100uM_ABA_Mutants_cDNA_P Parameter: Plant Line Value: CS22
  misc_feature: MA Experiment 20000086 PARAMETER Experiment Name: At_100uM_ABA_Mutants_cDNA_P Parameter: Timepoint (hr) Value: 6
  misc_feature: MA Experiment 20000086 PARAMETER Experiment Name: At_100uM_ABA_Mutants_cDNA_P Parameter: Tissue Value: Aerial
  misc_feature: MA Experiment 20000086 PARAMETER Experiment Name: At_100uM_ABA_Mutants_cDNA_P Parameter: Treatment Value: 100uM ABA vs. No Treatment
  misc_feature: MA Experiment ID: 20000087 Result: Up-regulated in Transcription
  misc_feature: MA Experiment 20000087 PARAMETER Experiment Name: At_100uM_ABA_Mutants_cDNA_P Parameter: Plant Line Value: WS
  misc_feature: MA Experiment 20000087 PARAMETER Experiment Name: At_100uM_ABA_Mutants_cDNA_P Parameter: Timepoint (hr) Value: 6
  misc_feature: MA Experiment 20000087 PARAMETER Experiment Name: At_100uM_ABA_Mutants_cDNA_P Parameter: Tissue Value: Aerial
  misc_feature: MA Experiment 20000087 PARAMETER Experiment Name: At_100uM_ABA_Mutants_cDNA_P Parameter: Treatment Value: 100uM ABA vs. No Treatment
  misc_feature: MA Experiment ID: 20000088 Result: Up-regulated in Transcription
  misc_feature: MA Experiment 20000088 PARAMETER Experiment Name: At_100uM_ABA_Mutants_cDNA_P Parameter: Plant Line Value: Landsberg
  misc_feature: MA Experiment 20000088 PARAMETER Experiment Name: At_100uM_ABA_Mutants_cDNA_P Parameter: Timepoint (hr) Value: 6
  misc_feature: MA Experiment 20000088 PARAMETER Experiment Name: At_100uM_ABA_Mutants_cDNA_P Parameter: Tissue Value: Aerial
  misc_feature: MA Experiment 20000088 PARAMETER Experiment Name: At_100uM_ABA_Mutants_cDNA_P Parameter: Treatment Value: 100uM ABA vs. No Treatment
  misc_feature: MA Experiment ID: 20000090 Result: Up-regulated in Transcription
  misc_feature: MA Experiment ID: 20000113 Result: Down-regulated in Transcription
  misc_feature: MA Experiment 20000113 PARAMETER Experiment Name: At_42deg_Heat_cDNA_P Parameter: Temperature (deg C) Value: 42 vs. 22
  misc_feature: MA Experiment 20000113 PARAMETER Experiment Name: At_42deg_Heat_cDNA_P Parameter: Timepoint (hr) Value: 8
  misc_feature: MA Experiment 20000113 PARAMETER Experiment Name: At_42deg_Heat_cDNA_P Parameter: Tissue Value: Aerial
  misc_feature: MA Experiment ID: 20000117 Result: Up-regulated in Transcription
  misc_feature: MA Experiment 20000117 PARAMETER Experiment Name: At_100uM_ABA_Mutants_cDNA_P Parameter: Plant Line Value: Columbia
  misc_feature: MA Experiment 20000117 PARAMETER Experiment Name: At_100uM_ABA_Mutants_cDNA_P Parameter: Timepoint (hr) Value: 6
  misc_feature: MA Experiment 20000117 PARAMETER Experiment Name: At_100uM_ABA_Mutants_cDNA_P Parameter: Tissue Value: Aerial
  misc_feature: MA Experiment 20000117 PARAMETER Experiment Name: At_100uM_ABA_Mutants_cDNA_P Parameter: Treatment Value: 100uM ABA vs. No Treatment
  misc_feature: MA Experiment ID: 20000169 Result: Up-regulated in Transcription
  misc_feature: MA Experiment 20000169 PARAMETER Experiment Name: At_100uM_ABA_P Parameter: Age (day) Value: 14
  misc_feature: MA Experiment 20000169 PARAMETER Experiment Name: At_100uM_ABA_P Parameter: Organism Value: A. thaliana
  misc_feature: MA Experiment 20000169 PARAMETER Experiment Name: At_100uM_ABA_P Parameter: Plant Line Value: WS
  misc_feature: MA Experiment 20000169 PARAMETER Experiment Name: At_100uM_ABA_P Parameter: Timepoint (hr) Value: 6
  misc_feature: MA Experiment 20000169 PARAMETER Experiment Name: At_100uM_ABA_P Parameter: Tissue Value: Aerial
  misc_feature: MA Experiment 20000169 PARAMETER Experiment Name: At_100uM_ABA_P Parameter: Treatment Value: 100uM ABA vs. No Treatment
  misc_feature: MA Experiment ID: 20000182 Result: Up-regulated in Transcription
  misc_feature: MA Experiment 20000182 PARAMETER Experiment Name: At_2mM_SA_P Parameter: Age (day) Value: 14
  misc_feature: MA Experiment 20000182 PARAMETER Experiment Name: At_2mM_SA_P Parameter: Organism Value: A. thaliana
  misc_feature: MA Experiment 20000182 PARAMETER Experiment Name: At_2mM_SA_P Parameter: Plant Line Value: WS
  misc_feature: MA Experiment 20000182 PARAMETER Experiment Name: At_2mM_SA_P Parameter: Timepoint (hr) Value: 6
  misc_feature: MA Experiment 20000182 PARAMETER Experiment Name: At_2mM_SA_P Parameter: Tissue Value: Aerial
  misc_feature: MA Experiment 20000182 PARAMETER Experiment Name: At_2mM_SA_P Parameter: Treatment Value: 2mM SA vs. No Treatment
  misc_feature: MA Experiment ID: 20000234 Result: Up-regulated in Transcription
  misc_feature: MA Experiment 20000234 PARAMETER Experiment Name: At_Siliques_P Parameter: Age (day) Value: 21
  misc_feature: MA Experiment 20000234 PARAMETER Experiment Name: At_Siliques_P Parameter: Organism Value: A. thaliana
  misc_feature: MA Experiment 20000234 PARAMETER Experiment Name: At_Siliques_P Parameter: Plant Line Value: WS
  misc_feature: MA Experiment 20000234 PARAMETER Experiment Name: At_Siliques_P Parameter: Tissue Value: Less Than 5mm Siliques vs. Whole Plant
  misc_feature: MA Experiment ID: 20000265 Result: Up-regulated in Transcription
  misc_feature: MA Experiment 20000265 PARAMETER Experiment Name: At_Open_Flower_P Parameter: Age (day) Value: 21
  misc_feature: MA Experiment 20000265 PARAMETER Experiment Name: At_Open_Flower_P Parameter: Plant Line Value: WS
  misc_feature: MA Experiment 20000265 PARAMETER Experiment Name: At_Open_Flower_P Parameter: Tissue Value: Closed Flower vs. Whole Plant
  misc_feature: MA Experiment ID: 20000267 Result: Up-regulated in Transcription
  misc_feature: MA Experiment 20000267 PARAMETER Experiment Name: At_Drought_P Parameter: Age (day) Value: 7
  misc_feature: MA Experiment 20000267 PARAMETER Experiment Name: At_Drought_P Parameter: Organism Value: A. thaliana
  misc_feature: MA Experiment 20000267 PARAMETER Experiment Name: At_Drought_P Parameter: Plant Line Value: WS
  misc_feature: MA Experiment 20000267 PARAMETER Experiment Name: At_Drought_P Parameter: Timepoint (hr) Value: 6
  misc_feature: MA Experiment 20000267 PARAMETER Experiment Name: At_Drought_P Parameter: Tissue Value: Whole Plant
  misc_feature: MA Experiment 20000267 PARAMETER Experiment Name: At_Drought_P Parameter: Treatment Value: Drought vs. No Drought
  misc_feature: MA Experiment ID: 20000286 Result: Up-regulated in Transcription
  misc_feature: MA Experiment 20000286 PARAMETER Experiment Name: At_Open_Flower_P Parameter: Age (day) Value: 21
  misc_feature: MA Experiment 20000286 PARAMETER Experiment Name: At_Open_Flower_P Parameter: Plant Line Value: WS
  misc_feature: MA Experiment 20000286 PARAMETER Experiment Name: At_Open_Flower_P Parameter: Tissue Value: Half Open vs. Whole Plant
  misc_feature: MA Experiment ID: 20000436 Result: Up-regulated in Transcription
  misc_feature: MA Experiment 20000436 PARAMETER Experiment Name: At_Drought_P Parameter: Age (day) Value: 7
  misc_feature: MA Experiment 20000436 PARAMETER Experiment Name: At_Drought_P Parameter: Organism Value: A. thaliana
  misc_feature: MA Experiment 20000436 PARAMETER Experiment Name: At_Drought_P Parameter: Plant Line Value: WS
  misc_feature: MA Experiment 20000436 PARAMETER Experiment Name: At_Drought_P Parameter: Timepoint (hr) Value: 12
  misc_feature: MA Experiment 20000436 PARAMETER Experiment Name: At_Drought_P Parameter: Tissue Value: Whole Plant
  misc_feature: MA Experiment 20000436 PARAMETER Experiment Name: At_Drought_P Parameter: Treatment Value: Drought vs. No Drought
  misc_feature: MA Experiment ID: 20000437 Result: Up-regulated in Transcription
  misc_feature: MA Experiment 20000437 PARAMETER Experiment Name: At_Drought_P Parameter: Age (day) Value: 8
  misc_feature: MA Experiment 20000437 PARAMETER Experiment Name: At_Drought_P Parameter: Organism Value: A. thaliana
  misc_feature: MA Experiment 20000437 PARAMETER Experiment Name: At_Drought_P Parameter: Plant Line Value: WS
  misc_feature: MA Experiment 20000437 PARAMETER Experiment Name: At_Drought_P Parameter: Timepoint (hr) Value: 24
  misc_feature: MA Experiment 20000437 PARAMETER Experiment Name: At_Drought_P Parameter: Tissue Value: Whole Plant
  misc_feature: MA Experiment 20000437 PARAMETER Experiment Name: At_Drought_P Parameter: Treatment Value: Drought vs. No Drought
  misc_feature: MA Experiment ID: 20000438 Result: Down-regulated in Transcription
  misc_feature: MA Experiment 20000438 PARAMETER Experiment Name: At_Shoots__P Parameter: Age (day) Value: 14
  misc_feature: MA Experiment 20000438 PARAMETER Experiment Name: At_Shoots__P Parameter: Tissue Value: Shoots vs. Whole Plant
  misc_feature: MA Experiment ID: 20000441 Result: Down-regulated in Transcription
  misc_feature: MA Experiment 20000441 PARAMETER Experiment Name: At_1uM_BR-BRZ__P Parameter: Tissue Value: Shoot Apices
  misc_feature: MA Experiment 20000441 PARAMETER Experiment Name: At_1uM_BR-BRZ__P Parameter: Treatment Value: 1uM BR vs. No Treatment
  misc_feature: MA Experiment ID: 20000453 Result: Up-regulated in Transcription
  misc_feature: MA Experiment 20000453 PARAMETER Experiment Name: At_100uM_ABA_P Parameter: Age (day) Value: 15
  misc_feature: MA Experiment 20000453 PARAMETER Experiment Name: At_100uM_ABA_P Parameter: Organism Value: A. thaliana
  misc_feature: MA Experiment 20000453 PARAMETER Experiment Name: At_100uM_ABA_P Parameter: Plant Line Value: WS
  misc_feature: MA Experiment 20000453 PARAMETER Experiment Name: At_100uM_ABA_P Parameter: Timepoint (hr) Value: 24
  misc_feature: MA Experiment 20000453 PARAMETER Experiment Name: At_100uM_ABA_P Parameter: Tissue Value: Aerial
  misc_feature: MA Experiment 20000453 PARAMETER Experiment Name: At_100uM_ABA_P Parameter: Treatment Value: 100uM ABA vs. No Treatment
  misc_feature: MA Experiment ID: 20000794 Result: Up-regulated in Transcription
  misc_feature: MA Experiment 20000794 PARAMETER Experiment Name: At_Petals_P Parameter: Age (day) Value: 23-25 days
  misc_feature: MA Experiment 20000794 PARAMETER Experiment Name: At_Petals_P Parameter: Plant Line Value: WS
  misc_feature: MA Experiment 20000794 PARAMETER Experiment Name: At_Petals_P Parameter: Tissue Value: Petals vs. Whole plant
  misc_feature: MA Experiment ID: 20001554 Result: Up-regulated in Transcription
  misc_feature: MA Experiment 20001554 PARAMETER Experiment Name: At_Drought_Soil_Dry_P Parameter: Age (day) Value: 21
  misc_feature: MA Experiment 20001554 PARAMETER Experiment Name: At_Drought_Soil_Dry_P Parameter: Organism Value: A. thaliana
  misc_feature: MA Experiment 20001554 PARAMETER Experiment Name: At_Drought_Soil_Dry_P Parameter: Plant Line Value: WS
  misc_feature: MA Experiment 20001554 PARAMETER Experiment Name: At_Drought_Soil_Dry_P Parameter: Post Timepoint (hr) Value: None
  misc_feature: MA Experiment 20001554 PARAMETER Experiment Name: At_Drought_Soil_Dry_P Parameter: Post-Treatment Value: None
  misc_feature: MA Experiment 20001554 PARAMETER Experiment Name: At_Drought_Soil_Dry_P Parameter: Timepoint (day) Value: 7
  misc_feature: MA Experiment 20001554 PARAMETER Experiment Name: At_Drought_Soil_Dry_P Parameter: Treatment Value: Drought vs. No Drought
  misc_feature: MA Experiment ID: 20001555 Result: Up-regulated in Transcription
  misc_feature: MA Experiment 20001555 PARAMETER Experiment Name: At_Drought_Soil_Dry_P Parameter: Age (day) Value: 24
  misc_feature: MA Experiment 20001555 PARAMETER Experiment Name: At_Drought_Soil_Dry_P Parameter: Organism Value: A. thaliana
  misc_feature: MA Experiment 20001555 PARAMETER Experiment Name: At_Drought_Soil_Dry_P Parameter: Plant Line Value: WS
  misc_feature: MA Experiment 20001555 PARAMETER Experiment Name: At_Drought_Soil_Dry_P Parameter: Post Timepoint (hr) Value: None
  misc_feature: MA Experiment 20001555 PARAMETER Experiment Name: At_Drought_Soil_Dry_P Parameter: Post-Treatment Value: None
  misc_feature: MA Experiment 20001555 PARAMETER Experiment Name: At_Drought_Soil_Dry_P Parameter: Timepoint (day) Value: 10
  misc_feature: MA Experiment 20001555 PARAMETER Experiment Name: At_Drought_Soil_Dry_P Parameter: Treatment Value: Drought vs. No Drought
  misc_feature: MA Experiment ID: 20001556 Result: Up-regulated in Transcription
  misc_feature: MA Experiment 20001556 PARAMETER Experiment Name: At_Drought_Soil_Dry_P Parameter: Age (day) Value: 26
  misc_feature: MA Experiment 20001556 PARAMETER Experiment Name: At_Drought_Soil_Dry_P Parameter: Organism Value: A. thaliana
  misc_feature: MA Experiment 20001556 PARAMETER Experiment Name: At_Drought_Soil_Dry_P Parameter: Plant Line Value: WS
  misc_feature: MA Experiment 20001556 PARAMETER Experiment Name: At_Drought_Soil_Dry_P Parameter: Post Timepoint (hr) Value: None
  misc_feature: MA Experiment 20001556 PARAMETER Experiment Name: At_Drought_Soil_Dry_P Parameter: Post-Treatment Value: None
  misc_feature: MA Experiment 20001556 PARAMETER Experiment Name: At_Drought_Soil_Dry_P Parameter: Timepoint (day) Value: 12
  misc_feature: MA Experiment 20001556 PARAMETER Experiment Name: At_Drought_Soil_Dry_P Parameter: Treatment Value: Drought vs. No Drought
  misc_feature: MA Experiment ID: 20001559 Result: Up-regulated in Transcription
  misc_feature: MA Experiment 20001559 PARAMETER Experiment Name: At_Drought_Soil_Dry_P Parameter: Age (day) Value: 28
  misc_feature: MA Experiment 20001559 PARAMETER Experiment Name: At_Drought_Soil_Dry_P Parameter: Organism Value: A. thaliana
  misc_feature: MA Experiment 20001559 PARAMETER Experiment Name: At_Drought_Soil_Dry_P Parameter: Plant Line Value: WS
  misc_feature: MA Experiment 20001559 PARAMETER Experiment Name: At_Drought_Soil_Dry_P Parameter: Post Timepoint (hr) Value: 29
  misc_feature: MA Experiment 20001559 PARAMETER Experiment Name: At_Drought_Soil_Dry_P Parameter: Post-Treatment Value: Re-Water vs. No Drought
  misc_feature: MA Experiment 20001559 PARAMETER Experiment Name: At_Drought_Soil_Dry_P Parameter: Timepoint (day) Value: 14
  misc_feature: MA Experiment 20001559 PARAMETER Experiment Name: At_Drought_Soil_Dry_P Parameter: Treatment Value: Drought vs. No Drought
  misc_feature: MA Experiment ID: 20001560 Result: Up-regulated in Transcription
  misc_feature: MA Experiment 20001560 PARAMETER Experiment Name: At_Drought_Soil_Dry_P Parameter: Age (day) Value: 28
  misc_feature: MA Experiment 20001560 PARAMETER Experiment Name: At_Drought_Soil_Dry_P Parameter: Organism Value: A. thaliana
  misc_feature: MA Experiment 20001560 PARAMETER Experiment Name: At_Drought_Soil_Dry_P Parameter: Plant Line Value: WS
  misc_feature: MA Experiment 20001560 PARAMETER Experiment Name: At_Drought_Soil_Dry_P Parameter: Post Timepoint (hr) Value: None
  misc_feature: MA Experiment 20001560 PARAMETER Experiment Name: At_Drought_Soil_Dry_P Parameter: Post-Treatment Value: None
  misc_feature: MA Experiment 20001560 PARAMETER Experiment Name: At_Drought_Soil_Dry_P Parameter: Timepoint (day) Value: 14
  misc_feature: MA Experiment 20001560 PARAMETER Experiment Name: At_Drought_Soil_Dry_P Parameter: Treatment Value: Drought vs. No Drought
  misc_feature: MA Experiment ID: 20001757 Result: Down-regulated in Transcription
  misc_feature: MA Experiment 20001757 PARAMETER Experiment Name: At_50mM_NH4NO3_L-to-H_P Parameter: Timepoint (hr) Value: 6
  misc_feature: MA Experiment 20001757 PARAMETER Experiment Name: At_50mM_NH4NO3_L-to-H_P Parameter: Tissue Value: Leaf
  misc_feature: MA Experiment 20001757 PARAMETER Experiment Name: At_50mM_NH4NO3_L-to-H_P Parameter: Treatment Value: 50mM NH4NO3 vs 100mM Mannitol
  misc_feature: MA Experiment ID: 20001904 Result: Up-regulated in Transcription
  misc_feature: MA Experiment 20001904 PARAMETER Experiment Name: At_Drought_Reproduction_P Parameter: Age (day) Value: 37
  misc_feature: MA Experiment 20001904 PARAMETER Experiment Name: At_Drought_Reproduction_P Parameter: Organism Value: A. thaliana
  misc_feature: MA Experiment 20001904 PARAMETER Experiment Name: At_Drought_Reproduction_P Parameter: Plant Line Value: WS
  misc_feature: MA Experiment 20001904 PARAMETER Experiment Name: At_Drought_Reproduction_P Parameter: Timepoint (day) Value: 7
  misc_feature: MA Experiment 20001904 PARAMETER Experiment Name: At_Drought_Reproduction_P Parameter: Tissue Value: Rosettes
  misc_feature: MA Experiment 20001904 PARAMETER Experiment Name: At_Drought_Reproduction_P Parameter: Treatment Value: Drought vs. No Drought
  misc_feature: MA Experiment ID: 20001905 Result: Up-regulated in Transcription
  misc_feature: MA Experiment 20001905 PARAMETER Experiment Name: At_Drought_Reproduction_P Parameter: Age (day) Value: 40
  misc_feature: MA Experiment 20001905 PARAMETER Experiment Name: At_Drought_Reproduction_P Parameter: Organism Value: A. thaliana
  misc_feature: MA Experiment 20001905 PARAMETER Experiment Name: At_Drought_Reproduction_P Parameter: Plant Line Value: WS
  misc_feature: MA Experiment 20001905 PARAMETER Experiment Name: At_Drought_Reproduction_P Parameter: Timepoint (day) Value: 10
  misc_feature: MA Experiment 20001905 PARAMETER Experiment Name: At_Drought_Reproduction_P Parameter: Tissue Value: Rosettes
  misc_feature: MA Experiment 20001905 PARAMETER Experiment Name: At_Drought_Reproduction_P Parameter: Treatment Value: Drought vs. No Drought
  misc_feature: MA Experiment ID: 20001906 Result: Up-regulated in Transcription
  misc_feature: MA Experiment 20001906 PARAMETER Experiment Name: At_Drought_Reproduction_P Parameter: Age (day) Value: 35
  misc_feature: MA Experiment 20001906 PARAMETER Experiment Name: At_Drought_Reproduction_P Parameter: Organism Value: A. thaliana
  misc_feature: MA Experiment 20001906 PARAMETER Experiment Name: At_Drought_Reproduction_P Parameter: Plant Line Value: WS
  misc_feature: MA Experiment 20001906 PARAMETER Experiment Name: At_Drought_Reproduction_P Parameter: Timepoint (day) Value: 5
  misc_feature: MA Experiment 20001906 PARAMETER Experiment Name: At_Drought_Reproduction_P Parameter: Tissue Value: Siliques
  misc_feature: MA Experiment 20001906 PARAMETER Experiment Name: At_Drought_Reproduction_P Parameter: Treatment Value: Drought vs. No Drought
  misc_feature: MA Experiment ID: 20001907 Result: Up-regulated in Transcription
  misc_feature: MA Experiment 20001907 PARAMETER Experiment Name: At_Drought_Reproduction_P Parameter: Age (day) Value: 37
  misc_feature: MA Experiment 20001907 PARAMETER Experiment Name: At_Drought_Reproduction_P Parameter: Organism Value: A. thaliana
  misc_feature: MA Experiment 20001907 PARAMETER Experiment Name: At_Drought_Reproduction_P Parameter: Plant Line Value: WS
  misc_feature: MA Experiment 20001907 PARAMETER Experiment Name: At_Drought_Reproduction_P Parameter: Timepoint (day) Value: 7
  misc_feature: MA Experiment 20001907 PARAMETER Experiment Name: At_Drought_Reproduction_P Parameter: Tissue Value: Siliques
  misc_feature: MA Experiment 20001907 PARAMETER Experiment Name: At_Drought_Reproduction_P Parameter: Treatment Value: Drought vs. No Drought
  misc_feature: MA Experiment ID: 20001908 Result: Up-regulated in Transcription
  misc_feature: MA Experiment 20001908 PARAMETER Experiment Name: At_Drought_Reproduction_P Parameter: Age (day) Value: 40
  misc_feature: MA Experiment 20001908 PARAMETER Experiment Name: At_Drought_Reproduction_P Parameter: Organism Value: A. thaliana
  misc_feature: MA Experiment 20001908 PARAMETER Experiment Name: At_Drought_Reproduction_P Parameter: Plant Line Value: WS
  misc_feature: MA Experiment 20001908 PARAMETER Experiment Name: At_Drought_Reproduction_P Parameter: Timepoint (day) Value: 10
  misc_feature: MA Experiment 20001908 PARAMETER Experiment Name: At_Drought_Reproduction_P Parameter: Tissue Value: Siliques
  misc_feature: MA Experiment 20001908 PARAMETER Experiment Name: At_Drought_Reproduction_P Parameter: Treatment Value: Drought vs. No Drought
aaacataccgaattacatatatatctcgctcgctctcttctttgttcttgctccttgttctagttcggatttttcttttgaagtgaaatggttaacgctacagttgcgagaaacattgccggcatttgtggaaatgtcatctccttgttcttgttcttatctcccatacctacgttcataaccatatacaagaagaaaaaggtggaggagtacaaagctgacccatacttagccacggttctaaattgcgcactatgggtcttttatggcttaccaatggttcaaccagatagtctccttgtgatcaccataaatggtaccggtttagccattgagctggtgtatctcgctatcttcttcttcttttctccaactagtcgcaaggtgaaagtggggctatggttaataggagagatggtgtttgtaggaatagtagccacatgcacattgctattgttccacacacataaccagagatcttcttttgttggaatcttttgtgtcatttttgttagtctcatgtatattgctcctctcaccatcatgagtaaggtgatcaagaccaaaagtgtgaagtacatgccattctctctctcacttgccaatttcctcaatggtgtcgtttgggttatttatgcacttattaagttcgaccttttcattttgattggaaatggacttggaacggtatcaggagcagtacaacttatactctatgcttgctattacaagacaacaccaaaagatgatgaagatgaagaagatgaggagaatctttctaaggttaactctcagttacaacttagtggcaacagtggacaagctaaacgagtttcagcttgattatatgtttggattcatgagatatgaatttagttttatgtttttttttaagcttttggctgatttaactttaagtaactctattattttcgcgtttcctttttgtaaaatgcaaactctttttcttctatgaaagatattaacc

SEQ ID NO: 35363 - protein, 251 aa, Arabidopsis thaliana
  peptide (1)..(251): Ceres Seq. ID no. 12396939
  misc_feature (9)..(98): Pfam Name: MtN3/saliva family Pfam Description: MtN3/saliva family
  misc_feature (1)..(231): Homolog of NCBI NO: 18421965 NR Description: putative protein
  misc_feature (28)..(246): Homolog of NCBI NO: 7486148 NR Description: hypothetical protein F25I24.60 - Arabidopsis
  misc_feature (1)..(217): Homolog of NCBI NO: 15219732 NR Description: hypothetical protein; protein id: At1g66770.1
  misc_feature (8)..(246): Homolog of NCBI NO: 18413388 NR Description: putative protein
  misc_feature (1)..(194): Homolog of NCBI NO: 10177463 NR Description: contains similarity to MtN3
  misc_feature (1)..(235): Homolog of NCBI NO: 34912462 NR Description: MtN3-like protein [Oryza sativa (japonica
  misc_feature (1)..(234): Homolog of NCBI NO: 34912454 NR Description: P0681B11.31 [Oryza sativa (japonica
  misc_feature (1)..(251): Homolog of NCBI NO: 21592355 NR Description: contains similarity to nodulin MtN3 protein
  misc_feature (1)..(251): Homolog of NCBI NO: 18405611 NR Description: Expressed protein
  misc_feature (39)..(251): Homolog of NCBI NO: 11994120 NR Description: contains similarity to nodulin MtN3
MVNATVARNIAGICGNVISLFLFLSPIPTFITIYKKKKVEEYKADPYLATVLNCALWVFYGLPMVQPDSLLVITINGTGLAIELVYLAIFFFFSPTSRKVKVGLWLIGEMVFVGIVATCTLLLFHTHNQRSSFVGIFCVIFVSLMYIAPLTIMSKVIKTKSVKYMPFSLSLANFLNGVVWVIYALIKFDLFILIGNGLGTVSGAVQLILYACYYKTTPKDDEDEEDEENLSKVNSQLQLSGNSGQAKRVSA

SEQ ID NO: 35364 - protein, 188 aa, Arabidopsis thaliana
  peptide (1)..(188): Ceres Seq. ID no. 12396940
  misc_feature (1)..(168): Homolog of NCBI NO: 18421965 NR Description: putative protein
  misc_feature (1)..(183): Homolog of NCBI NO: 7486148 NR Description: hypothetical protein F25I24.60 - Arabidopsis
  misc_feature (1)..(154): Homolog of NCBI NO: 15219732 NR Description: hypothetical protein; protein id: At1g66770.1
  misc_feature (1)..(183): Homolog of NCBI NO: 18413388 NR Description: putative protein
  misc_feature (1)..(131): Homolog of NCBI NO: 10177463 NR Description: contains similarity to MtN3
  misc_feature (1)..(172): Homolog of NCBI NO: 34912462 NR Description: MtN3-like protein [Oryza sativa (japonica
  misc_feature (1)..(171): Homolog of NCBI NO: 34912454 NR Description: P0681B11.31 [Oryza sativa (japonica
  misc_feature (1)..(188): Homolog of NCBI NO: 21592355 NR Description: contains similarity to nodulin MtN3 protein
  misc_feature (1)..(188): Homolog of NCBI NO: 18405611 NR Description: Expressed protein
  misc_feature (1)..(188): Homolog of NCBI NO: 11994120 NR Description: contains similarity to nodulin MtN3
MVQPDSLLVITINGTGLAIELVYLAIFFFFSPTSRKVKVGLWLIGEMVFVGIVATCTLLLFHTHNQRSSFVGIFCVIFVSLMYIAPLTIMSKVIKTKSVKYMPFSLSLANFLNGVVWVIYALIKFDLFILIGNGLGTVSGAVQLILYACYYKTTPKDDEDEEDEENLSKVNSQLQLSGNSGQAKRVSA

SEQ ID NO: 35365 - protein, 142 aa, Arabidopsis thaliana
  peptide (1)..(142): Ceres Seq. ID no. 12396941
  misc_feature (1)..(122): Homolog of NCBI NO: 18421965 NR Description: putative protein
  misc_feature (1)..(137): Homolog of NCBI NO: 7486148 NR Description: hypothetical protein F25I24.60 - Arabidopsis
  misc_feature (1)..(108): Homolog of NCBI NO: 15219732 NR Description: hypothetical protein; protein id: At1g66770.1
  misc_feature (1)..(137): Homolog of NCBI NO: 18413388 NR Description: putative protein
  misc_feature (1)..(85): Homolog of NCBI NO: 10177463 NR Description: contains similarity to MtN3
  misc_feature (1)..(126): Homolog of NCBI NO: 34912462 NR Description: MtN3-like protein [Oryza sativa (japonica
  misc_feature (1)..(125): Homolog of NCBI NO: 34912454 NR Description: P0681B11.31 [Oryza sativa (japonica
  misc_feature (1)..(142): Homolog of NCBI NO: 21592355 NR Description: contains similarity to nodulin MtN3 protein
  misc_feature (1)..(142): Homolog of NCBI NO: 18405611 NR Description: Expressed protein
  misc_feature (1)..(142): Homolog of NCBI NO: 11994120 NR Description: contains similarity to nodulin MtN3
MVFVGIVATCTLLLFHTHNQRSSFVGIFCVIFVSLMYIAPLTIMSKVIKTKSVKYMPFSLSLANFLNGVVWVIYALIKFDLFILIGNGLGTVSGAVQLILYACYYKTTPKDDEDEEDEENLSKVNSQLQLSGNSGQAKRVSA

SEQ ID NO: 35366 - DNA, 1243 bp, Arabidopsis thaliana; identical to SEQ ID NO: 22030
  misc_feature (1)..(1243): Ceres Seq. ID no. 12562371
  misc_feature: MA Experiment ID: 20000179 Result: Down-regulated in Transcription
  misc_feature: MA Experiment 20000179 PARAMETER Experiment Name: At_Germinating_Seeds_P Parameter: Age (hr) Value: 6 vs. 0
  misc_feature: MA Experiment 20000179 PARAMETER Experiment Name: At_Germinating_Seeds_P Parameter: Tissue Value: Germinating Seeds
  misc_feature: MA Experiment ID: 20000180 Result: Down-regulated in Transcription
  misc_feature: MA Experiment 20000180 PARAMETER Experiment Name: At_Germinating_Seeds_P Parameter: Age (hr) Value: 24 vs. 0
  misc_feature: MA Experiment 20000180 PARAMETER Experiment Name: At_Germinating_Seeds_P Parameter: Tissue Value: Germinating Seeds
  misc_feature: MA Experiment ID: 20000437 Result: Up-regulated in Transcription
  misc_feature: MA Experiment 20000437 PARAMETER Experiment Name: At_Drought_P Parameter: Age (day) Value: 8
  misc_feature: MA Experiment 20000437 PARAMETER Experiment Name: At_Drought_P Parameter: Organism Value: A. thaliana
  misc_feature: MA Experiment 20000437 PARAMETER Experiment Name: At_Drought_P Parameter: Plant Line Value: WS
  misc_feature: MA Experiment 20000437 PARAMETER Experiment Name: At_Drought_P Parameter: Timepoint (hr) Value: 24
  misc_feature: MA Experiment 20000437 PARAMETER Experiment Name: At_Drought_P Parameter: Tissue Value: Whole Plant
  misc_feature: MA Experiment 20000437 PARAMETER Experiment Name: At_Drought_P Parameter: Treatment Value: Drought vs. No Drought
  misc_feature: MA Experiment ID: 20001450 Result: Up-regulated in Transcription
  misc_feature: MA Experiment 20001450 PARAMETER Experiment Name: At_Far-red-induction_P Parameter: Age (day) Value: 7
  misc_feature: MA Experiment 20001450 PARAMETER Experiment Name: At_Far-red-induction_P Parameter: Light Value: Far-red vs. White
  misc_feature: MA Experiment 20001450 PARAMETER Experiment Name: At_Far-red-induction_P Parameter: Organism Value: A. thaliana
  misc_feature: MA Experiment 20001450 PARAMETER Experiment Name: At_Far-red-induction_P Parameter: Plant Line Value: Columbia
  misc_feature: MA Experiment 20001450 PARAMETER Experiment Name: At_Far-red-induction_P Parameter: Timepoint (hr) Value: 8
  misc_feature: MA Experiment 20001450 PARAMETER Experiment Name: At_Far-red-induction_P Parameter: Tissue Value: Whole Plant
  misc_feature: MA Experiment ID: 20001451 Result: Up-regulated in Transcription
  misc_feature: MA Experiment 20001451 PARAMETER Experiment Name: At_Far-red-induction_P Parameter: Age (day) Value: 7
  misc_feature: MA Experiment 20001451 PARAMETER Experiment Name: At_Far-red-induction_P Parameter: Light Value: Far-red vs. White
  misc_feature: MA Experiment 20001451 PARAMETER Experiment Name: At_Far-red-induction_P Parameter: Organism Value: A. thaliana
  misc_feature: MA Experiment 20001451 PARAMETER Experiment Name: At_Far-red-induction_P Parameter: Plant Line Value: Columbia
  misc_feature: MA Experiment 20001451 PARAMETER Experiment Name: At_Far-red-induction_P Parameter: Timepoint (hr) Value: 24
  misc_feature: MA Experiment 20001451 PARAMETER Experiment Name: At_Far-red-induction_P Parameter: Tissue Value: Whole Plant
  misc_feature: Phenotype: ROSETTE LEAVES Shape-Serrate
  misc_feature: Phenotype: ROSETTE LEAVES Shape-Serrate
  misc_feature: Phenotype: WHOLE PLANT Other
  misc_feature: Phenotype: INFLORESCENCE Flowering Time-Late Flowering
  misc_feature: Phenotype: INFLORESCENCE Height-Short
  misc_feature: Phenotype: ROSETTE LEAVES Shape-Serrate
  misc_feature: Phenotype: WHOLE PLANT Other
  misc_feature: Phenotype: ROSETTE LEAVES Shape-Serrate
  misc_feature: Phenotype: ROSETTE LEAVES Other
  misc_feature: Phenotype: WHOLE PLANT Size-Small
  misc_feature: Phenotype: WHOLE PLANT Size-Small
  misc_feature: Phenotype: WHOLE PLANT Other
  misc_feature: Phenotype: INFLORESCENCE Flowering Time-Late Flowering
  misc_feature: Phenotype: INFLORESCENCE Height-Short
  misc_feature: Phenotype: INFLORESCENCE Strength-Weak
  misc_feature: Phenotype: ROSETTE LEAVES Shape-Serrate
  misc_feature: Phenotype: WHOLE PLANT Size-Small
  misc_feature: Phenotype: WHOLE PLANT Other
  misc_feature: Phenotype: WHOLE PLANT Color-Yellow-Green Viable 2
  misc_feature: Phenotype: WHOLE PLANT Size-Small
  misc_feature: Phenotype: ROSETTE LEAVES Shape-Serrate
  misc_feature: Phenotype: WHOLE PLANT Color-Yellow-Green Viable 2
  misc_feature: Phenotype: WHOLE PLANT Size-Small
  misc_feature: Phenotype: WHOLE PLANT Size-Small
  misc_feature: Phenotype: WHOLE PLANT Color-Yellow-Green Viable 3
  misc_feature: Phenotype: WHOLE PLANT Size-Small

SEQ ID NO: 35367 - protein, 244 aa, Arabidopsis thaliana; identical to SEQ ID NO: 20888
  peptide (1)..(244): Ceres Seq. ID no. 12562372
  misc_feature (90)..(160): Pfam Name: RNA recognition motif. (a.k.a. RRM, RBD, or RNP domain) Pfam Description: RNA recognition motif. (a.k.a. RRM, RBD, or RNP
  misc_feature (90)..(160): Pfam Name: RNA recognition motif. (a.k.a. RRM, RBD, or RNP domain) Pfam Description: RNA recognition motif. (a.k.a. RRM, RBD, or RNP
  misc_feature (90)..(160): Pfam Name: RNA recognition motif. (a.k.a. RRM, RBD, or RNP domain) Pfam Description: RNA recognition motif. (a.k.a. RRM, RBD, or RNP
  misc_feature (90)..(160): Pfam Name: RNA recognition motif. (a.k.a. RRM, RBD, or RNP domain) Pfam Description: RNA recognition motif. (a.k.a. RRM, RBD, or RNP
  misc_feature (18)..(219): Homolog of NCBI NO: 30679669 NR Description: RNA and export factor binding protein, putative
  misc_feature (18)..(219): Homolog of NCBI NO: 11358209 NR Description: hypothetical protein T22P11.120 - Arabidopsis
  misc_feature (1)..(36): Homolog of NCBI NO: 30411083 NR Description: Similar to THO complex 4 [Homo sapiens]
  misc_feature (18)..(244): Homolog of NCBI NO: 30411083 NR Description: Similar to THO complex 4 [Homo sapiens]
  misc_feature (1)..(36): Homolog of NCBI NO: 6755763 NR Description: RNA and export factor binding protein 1
  misc_feature (18)..(219): Homolog of NCBI NO: 30679669 NR Description: RNA and export factor binding protein, putative
  misc_feature (1)..(36): Homolog of NCBI NO: 30411083 NR Description: Similar to THO complex 4 [Homo sapiens]
  misc_feature (1)..(36): Homolog of NCBI NO: 6755763 NR Description: RNA and export factor binding protein 1
  misc_feature (18)..(244): Homolog of NCBI NO: 30411083 NR Description: Similar to THO complex 4 [Homo sapiens]
  misc_feature (1)..(36): Homolog of NCBI NO: 30411083 NR Description: Similar to THO complex 4 [Homo sapiens]
  misc_feature (18)..(219): Homolog of NCBI NO: 11358209 NR Description: hypothetical protein T22P11.120 - Arabidopsis
  misc_feature (18)..(219): Homolog of NCBI NO: 30679669 NR Description: RNA and export factor binding protein, putative
  misc_feature (1)..(244): Homolog of NCBI NO: 30697310 NR Description: RNA and export factor binding protein, putative
  misc_feature (1)..(244): Homolog of NCBI NO: 30697313 NR Description: RNA and export factor binding protein, putative
  misc_feature (1)..(244): Homolog of NCBI NO: 21555029 NR Description: transcriptional coactivator-like protein
  misc_feature (1)..(244): Homolog of NCBI NO: 9757916 NR Description: RNA and export factor binding protein 2-I-like
  misc_feature (14)..(244): Homolog of NCBI NO: 6755763 NR Description: RNA and export factor binding protein 1
  misc_feature (1)..(244): Homolog of NCBI NO: 30697310 NR Description: RNA and export factor binding protein, putative
  misc_feature (1)..(244): Homolog of NCBI NO: 30697313 NR Description: RNA and export factor binding protein, putative
  misc_feature (1)..(244): Homolog of NCBI NO: 21555029 NR Description: transcriptional coactivator-like protein
  misc_feature (1)..(244): Homolog of NCBI NO: 9757916 NR Description: RNA and export factor binding protein 2-I-like
  misc_feature (14)..(244): Homolog of NCBI NO: 6755763 NR Description: RNA and export factor binding protein 1
  misc_feature (1)..(36): Homolog of NCBI NO: 6755763 NR Description: RNA and export factor binding protein 1
  misc_feature (18)..(244): Homolog of NCBI NO: 30411083 NR Description: Similar to THO complex 4 [Homo sapiens]
  misc_feature (1)..(36): Homolog of NCBI NO: 30411083 NR Description: Similar to THO complex 4 [Homo sapiens]
  misc_feature (18)..(219): Homolog of NCBI NO: 11358209 NR Description: hypothetical protein T22P11.120 - Arabidopsis
  misc_feature (18)..(219): Homolog of NCBI NO: 30679669 NR Description: RNA and export factor binding protein, putative
  misc_feature (1)..(244): Homolog of NCBI NO: 30697310 NR Description: RNA and export factor binding protein, putative
  misc_feature (1)..(244): Homolog of NCBI NO: 30697313 NR Description: RNA and export factor binding protein, putative
  misc_feature (1)..(244): Homolog of NCBI NO: 21555029 NR Description: transcriptional coactivator-like protein
  misc_feature (1)..(244): Homolog of NCBI NO: 9757916 NR Description: RNA and export factor binding protein 2-I-like
  misc_feature (14)..(244): Homolog of NCBI NO: 6755763 NR Description: RNA and export factor binding protein 1
  misc_feature (1)..(36): Homolog of NCBI NO: 6755763 NR Description: RNA and export factor binding protein 1
  misc_feature (18)..(244): Homolog of NCBI NO: 30411083 NR Description: Similar to THO complex 4 [Homo sapiens]
  misc_feature (18)..(219): Homolog of NCBI NO: 11358209 NR Description: hypothetical protein T22P11.120 - Arabidopsis
  misc_feature (14)..(244): Homolog of NCBI NO: 6755763 NR Description: RNA and export factor binding protein 1
  misc_feature (1)..(244): Homolog of NCBI NO: 9757916 NR Description: RNA and export factor binding protein 2-I-like
  misc_feature (1)..(244): Homolog of NCBI NO: 21555029 NR Description: transcriptional coactivator-like protein
  misc_feature (1)..(244): Homolog of NCBI NO: 30697313 NR Description: RNA and export factor binding protein, putative
  misc_feature (1)..(244): Homolog of NCBI NO: 30697310 NR Description: RNA and export factor binding protein, putative

SEQ ID NO: 35368 - protein, 238 aa, Arabidopsis thaliana; identical to SEQ ID NO: 20889
  peptide (1)..(238): Ceres Seq. ID no. 12562373
  misc_feature (84)..(154): Pfam Name: RNA recognition motif. (a.k.a. RRM, RBD, or RNP domain) Pfam Description: RNA recognition motif. (a.k.a. RRM, RBD, or RNP
  misc_feature (84)..(154): Pfam Name: RNA recognition motif. (a.k.a. RRM, RBD, or RNP domain) Pfam Description: RNA recognition motif. (a.k.a. RRM, RBD, or RNP
  misc_feature (84)..(154): Pfam Name: RNA recognition motif. (a.k.a. RRM, RBD, or RNP domain) Pfam Description: RNA recognition motif. (a.k.a. RRM, RBD, or RNP
  misc_feature (84)..(154): Pfam Name: RNA recognition motif. (a.k.a. RRM, RBD, or RNP domain) Pfam Description: RNA recognition motif. (a.k.a. RRM, RBD, or RNP
  misc_feature (12)..(213): Homolog of NCBI NO: 30679669 NR Description: RNA and export factor binding protein, putative
  misc_feature (12)..(213): Homolog of NCBI NO: 11358209 NR Description: hypothetical protein T22P11.120 - Arabidopsis
  misc_feature (1)..(30): Homolog of NCBI NO: 30411083 NR Description: Similar to THO complex 4 [Homo sapiens]
  misc_feature (12)..(238): Homolog of NCBI NO: 30411083 NR Description: Similar to THO complex 4 [Homo sapiens]
  misc_feature (1)..(30): Homolog of NCBI NO: 6755763 NR Description: RNA and export factor binding protein 1
  misc_feature (12)..(213): Homolog of NCBI NO: 30679669 NR Description: RNA and export factor binding protein, putative
  misc_feature (1)..(30): Homolog of NCBI NO: 30411083 NR Description: Similar to THO complex 4 [Homo sapiens]
  misc_feature (1)..(30): Homolog of NCBI NO: 6755763 NR Description: RNA and export factor binding protein 1
  misc_feature (12)..(238): Homolog of NCBI NO: 30411083 NR Description: Similar to THO complex 4 [Homo sapiens]
  misc_feature (1)..(30): Homolog of NCBI NO: 30411083 NR Description: Similar to THO complex 4 [Homo sapiens]
  misc_feature (12)..(213): Homolog of NCBI NO: 11358209 NR Description: hypothetical protein T22P11.120 - Arabidopsis
  misc_feature (12)..(213): Homolog of NCBI NO: 30679669 NR Description: RNA and export factor binding protein, putative
  misc_feature (1)..(238): Homolog of NCBI NO: 30697310 NR Description: RNA and export factor binding protein, putative
  misc_feature (1)..(238): Homolog of NCBI NO: 30697313 NR Description: RNA and export factor binding protein, putative
  misc_feature (1)..(238): Homolog of NCBI NO: 21555029 NR Description: transcriptional coactivator-like protein
  misc_feature (1)..(238): Homolog of NCBI NO: 9757916 NR Description: RNA and export factor binding protein 2-I-like
  misc_feature (8)..(238): Homolog of NCBI NO: 6755763 NR Description: RNA and export factor binding protein 1
  misc_feature (1)..(238): Homolog of NCBI NO: 30697310 NR Description: RNA and export factor binding protein, putative
  misc_feature (1)..(238): Homolog of NCBI NO: 30697313 NR Description: RNA and export factor binding protein, putative
  misc_feature (1)..(238): Homolog of NCBI NO: 21555029 NR Description: transcriptional coactivator-like protein
  misc_feature (1)..(238): Homolog of NCBI NO: 9757916 NR Description: RNA and export factor binding protein 2-I-like
  misc_feature (8)..(238): Homolog of NCBI NO: 6755763 NR Description: RNA and export factor binding protein 1
  misc_feature (1)..(30): Homolog of NCBI NO: 6755763 NR Description: RNA and export factor binding protein 1
  misc_feature (12)..(238): Homolog of NCBI NO: 30411083 NR Description: Similar to THO complex 4 [Homo sapiens]
  misc_feature (1)..(30): Homolog of NCBI NO: 30411083 NR Description: Similar to THO complex 4 [Homo sapiens]
  misc_feature (12)..(213): Homolog of NCBI NO: 11358209 NR Description: hypothetical protein T22P11.120 - Arabidopsis
  misc_feature (12)..(213): Homolog of NCBI NO: 30679669 NR Description: RNA and export factor binding protein, putative
  misc_feature (1)..(238): Homolog of NCBI NO: 30697310 NR Description: RNA and export factor binding protein, putative
  misc_feature (1)..(238): Homolog of NCBI NO: 30697313 NR Description: RNA and export factor binding protein, putative
  misc_feature (1)..(238): Homolog of NCBI NO: 21555029 NR Description: transcriptional coactivator-like protein
  misc_feature (1)..(238): Homolog of NCBI NO: 9757916 NR Description: RNA and export factor binding protein 2-I-like
  misc_feature (8)..(238): Homolog of NCBI NO: 6755763 NR Description: RNA and export factor binding protein 1
  misc_feature (1)..(30): Homolog of NCBI NO: 6755763 NR Description: RNA and export factor binding protein 1
  misc_feature (12)..(238): Homolog of NCBI NO: 30411083 NR Description: Similar to THO complex 4 [Homo sapiens]
  misc_feature (12)..(213): Homolog of NCBI NO: 11358209 NR Description: hypothetical protein T22P11.120 - Arabidopsis
  misc_feature (8)..(238): Homolog of NCBI NO: 6755763 NR Description: RNA and export factor binding protein 1
  misc_feature (1)..(238): Homolog of NCBI NO: 9757916 NR Description: RNA and export factor binding protein 2-I-like
  misc_feature (1)..(238): Homolog of NCBI NO: 21555029 NR Description: transcriptional coactivator-like protein
  misc_feature (1)..(238): Homolog of NCBI NO: 30697313 NR Description: RNA and export factor binding protein, putative
  misc_feature (1)..(238): Homolog of NCBI NO: 30697310 NR Description: RNA and export factor binding protein, putative

SEQ ID NO: 35369 - protein, 233 aa, Arabidopsis thaliana; identical to SEQ ID NO: 22033
  peptide (1)..(233): Ceres Seq. ID no. 12562374
  misc_feature (79)..(149): Pfam Name: RNA recognition motif. (a.k.a. RRM, RBD, or RNP domain) Pfam Description: RNA recognition motif. (a.k.a. RRM, RBD, or RNP
  misc_feature (79)..(149): Pfam Name: RNA recognition motif. (a.k.a. RRM, RBD, or RNP domain) Pfam Description: RNA recognition motif. (a.k.a. RRM, RBD, or RNP
  misc_feature (79)..(149): Pfam Name: RNA recognition motif. (a.k.a. RRM, RBD, or RNP domain) Pfam Description: RNA recognition motif. (a.k.a. RRM, RBD, or RNP
  misc_feature (79)..(149): Pfam Name: RNA recognition motif. (a.k.a. RRM, RBD, or RNP domain) Pfam Description: RNA recognition motif. (a.k.a. RRM, RBD, or RNP
  misc_feature (7)..(208): Homolog of NCBI NO: 30679669 NR Description: RNA and export factor binding protein, putative
  misc_feature (7)..(208): Homolog of NCBI NO: 11358209 NR Description: hypothetical protein T22P11.120 - Arabidopsis
  misc_feature (1)..(25): Homolog of NCBI NO: 30411083 NR Description: Similar to THO complex 4 [Homo sapiens]
  misc_feature (7)..(233): Homolog of NCBI NO: 30411083 NR Description: Similar to THO complex 4 [Homo sapiens]
  misc_feature (1)..(25): Homolog of NCBI NO: 6755763 NR Description: RNA and export factor binding protein 1
  misc_feature (7)..(208): Homolog of NCBI NO: 30679669 NR Description: RNA and export factor binding protein, putative
  misc_feature (1)..(25): Homolog of NCBI NO: 30411083 NR Description: Similar to THO complex 4 [Homo sapiens]
  misc_feature (1)..(25): Homolog of NCBI NO: 6755763 NR Description: RNA and export factor binding protein 1
  misc_feature (7)..(233): Homolog of NCBI NO: 30411083 NR Description: Similar to THO complex 4 [Homo sapiens]
  misc_feature (1)..(25): Homolog of NCBI NO: 30411083 NR Description: Similar to THO complex 4 [Homo sapiens]
  misc_feature (7)..(208): Homolog of NCBI NO: 11358209 NR Description: hypothetical protein T22P11.120 - Arabidopsis
  misc_feature (7)..(208): Homolog of NCBI NO: 30679669 NR Description: RNA and export factor binding protein, putative
  misc_feature (1)..(233): Homolog of NCBI NO: 30697310 NR Description: RNA and export factor binding protein, putative
  misc_feature (1)..(233): Homolog of NCBI NO: 30697313 NR Description: RNA and export factor binding protein, putative
  misc_feature (1)..(233): Homolog of NCBI NO: 21555029 NR Description: transcriptional coactivator-like protein
  misc_feature (1)..(233): Homolog of NCBI NO: 9757916 NR Description: RNA and export factor binding protein 2-I-like
  misc_feature (3)..(233): Homolog of NCBI NO: 6755763 NR Description: RNA and export factor binding protein 1
  misc_feature (1)..(233): Homolog of NCBI NO: 30697310 NR Description: RNA and export factor binding protein, putative
  misc_feature (1)..(233): Homolog of NCBI NO: 30697313 NR Description: RNA and export factor binding protein, putative
  misc_feature (1)..(233): Homolog of NCBI NO: 21555029 NR Description: transcriptional coactivator-like protein
  misc_feature (1)..(233): Homolog of NCBI NO: 9757916 NR Description: RNA and export factor binding protein 2-I-like
  misc_feature (3)..(233): Homolog of NCBI NO: 6755763 NR Description: RNA and export factor binding protein 1
  misc_feature (1)..(25): Homolog of NCBI NO: 6755763 NR Description: RNA and export factor binding protein 1
  misc_feature (7)..(233): Homolog of NCBI NO: 30411083 NR Description: Similar to THO complex 4 [Homo sapiens]
  misc_feature (1)..(25): Homolog of NCBI NO: 30411083 NR Description: Similar to THO complex 4 [Homo sapiens]
  misc_feature (7)..(208): Homolog of NCBI NO: 11358209 NR Description: hypothetical protein T22P11.120 - Arabidopsis
  misc_feature (7)..(208): Homolog of NCBI NO: 30679669 NR Description: RNA and export factor binding protein, putative
  misc_feature (1)..(233): Homolog of NCBI NO: 30697310 NR Description: RNA and export factor binding protein, putative
  misc_feature (1)..(233): Homolog of NCBI NO: 30697313 NR Description: RNA and export factor binding protein, putative
  misc_feature (1)..(233): Homolog of NCBI NO: 21555029 NR Description: transcriptional coactivator-like protein
  misc_feature (1)..(233): Homolog of NCBI NO: 9757916 NR Description: RNA and export factor binding protein 2-I-like
  misc_feature (3)..(233): Homolog of NCBI NO: 6755763 NR Description: RNA and export factor binding protein 1
  misc_feature (1)..(25): Homolog of NCBI NO: 6755763 NR Description: RNA and export factor binding protein 1
  misc_feature (7)..(233): Homolog of NCBI NO: 30411083 NR Description: Similar to THO complex 4 [Homo sapiens]
  misc_feature (7)..(208): Homolog of NCBI NO: 11358209 NR Description: hypothetical protein T22P11.120 - Arabidopsis
  misc_feature (3)..(233): Homolog of NCBI NO: 6755763 NR Description: RNA and export factor binding protein 1
  misc_feature (1)..(233): Homolog of NCBI NO: 9757916 NR Description: RNA and export factor binding protein 2-I-like
  misc_feature (1)..(233): Homolog of NCBI NO: 21555029 NR Description: transcriptional coactivator-like protein
  misc_feature (1)..(233): Homolog of NCBI NO: 30697313 NR Description: RNA and export factor binding protein, putative
  misc_feature (1)..(233): Homolog of NCBI NO: 30697310 NR Description: RNA and export factor binding protein, putative

SEQ ID NO: 35370 - DNA, 1796 bp, Arabidopsis thaliana
  misc_feature (1)..(1796): Ceres Seq. ID no. 13487042
  misc_feature: MA Experiment ID: 108434 Result: Up-regulated in Transcription
  misc_feature: MA Experiment 108434 PARAMETER Experiment Name: At_Root_Tips_cDNA_P Parameter: Tissue Value: Root Tips
  misc_feature: MA Experiment ID: 108461 Result: Down-regulated in Transcription
  misc_feature: MA Experiment 108461 PARAMETER Experiment Name: At_Germinating_Seeds_cDNA_P Parameter: Age (day) Value: 1 vs. 0
  misc_feature: MA Experiment 108461 PARAMETER Experiment Name: At_Germinating_Seeds_cDNA_P Parameter: Tissue Value: Germinating Seeds
  misc_feature: MA Experiment ID: 108462 Result: Down-regulated in Transcription
  misc_feature: MA Experiment 108462 PARAMETER Experiment Name: At_Germinating_Seeds_cDNA_P Parameter: Age (day) Value: 2 vs. 0
  misc_feature: MA Experiment 108462 PARAMETER Experiment Name: At_Germinating_Seeds_cDNA_P Parameter: Tissue Value: Germinating Seeds
  misc_feature: MA Experiment ID: 108463 Result: Down-regulated in Transcription
  misc_feature: MA Experiment 108463 PARAMETER Experiment Name: At_Germinating_Seeds_cDNA_P Parameter: Age (day) Value: 3 vs. 0
  misc_feature: MA Experiment 108463 PARAMETER Experiment Name: At_Germinating_Seeds_cDNA_P Parameter: Tissue Value: Germinating Seeds
  misc_feature: MA Experiment ID: 108464 Result: Down-regulated in Transcription
  misc_feature: MA Experiment 108464 PARAMETER Experiment Name: At_Germinating_Seeds_cDNA_P Parameter: Age (day) Value: 4 vs. 0
  misc_feature: MA Experiment 108464 PARAMETER Experiment Name: At_Germinating_Seeds_cDNA_P Parameter: Tissue Value: Germinating Seeds
  misc_feature: MA Experiment ID: 108572 Result: Down-regulated in Transcription
  misc_feature: MA Experiment 108572 PARAMETER Experiment Name: At_Drought_cDNA_P Parameter: Timepoint (hr) Value: 1
  misc_feature: MA Experiment 108572 PARAMETER Experiment Name: At_Drought_cDNA_P Parameter: Tissue Value: Aerial
  misc_feature: MA Experiment 108572 PARAMETER Experiment Name: At_Drought_cDNA_P Parameter: Treatment Value: Drought vs. No Drought
  misc_feature: MA Experiment ID: 108573 Result: Down-regulated in Transcription
  misc_feature: MA Experiment 108573 PARAMETER Experiment Name: At_Drought_cDNA_P Parameter: Timepoint (hr) Value: 6
  misc_feature: MA Experiment 108573 PARAMETER Experiment Name: At_Drought_cDNA_P Parameter: Tissue Value: Aerial
  misc_feature: MA Experiment 108573 PARAMETER Experiment Name: At_Drought_cDNA_P Parameter: Treatment Value: Drought vs. No Drought
  misc_feature: MA Experiment ID: 108585 Result: Down-regulated in Transcription
  misc_feature: MA Experiment 108585 PARAMETER Experiment Name: At_5mM_NaNP_cDNA_P Parameter: Timepoint (hr) Value: 6
  misc_feature: MA Experiment 108585 PARAMETER Experiment Name: At_5mM_NaNP_cDNA_P Parameter: Tissue Value: Aerial
  misc_feature: MA Experiment 108585 PARAMETER Experiment Name: At_5mM_NaNP_cDNA_P Parameter: Treatment Value: null
  misc_feature: MA Experiment ID: 20000227 Result: Up-regulated in Transcription
  misc_feature: MA Experiment 20000227 PARAMETER Experiment Name: At_Root-Tips-vs-Tops_P Parameter: Tissue Value: Root Tips vs. Root Tops
  misc_feature: MA Experiment ID: 20001558 Result: Up-regulated in Transcription
  misc_feature: MA Experiment 20001558 PARAMETER Experiment Name: At_Drought_Soil_Dry_P Parameter: Age (day) Value: 27
  misc_feature: MA Experiment 20001558 PARAMETER Experiment Name: At_Drought_Soil_Dry_P Parameter: Organism Value: A. thaliana
  misc_feature: MA Experiment 20001558 PARAMETER Experiment Name: At_Drought_Soil_Dry_P Parameter: Plant Line Value: WS
  misc_feature: MA Experiment 20001558 PARAMETER Experiment Name: At_Drought_Soil_Dry_P Parameter: Post Timepoint (hr) Value: 6
  misc_feature: MA Experiment 20001558 PARAMETER Experiment Name: At_Drought_Soil_Dry_P Parameter: Post-Treatment Value: Re-Water vs. No Drought
  misc_feature: MA Experiment 20001558 PARAMETER Experiment Name: At_Drought_Soil_Dry_P Parameter: Timepoint (day) Value: 13
  misc_feature: MA Experiment 20001558 PARAMETER Experiment Name: At_Drought_Soil_Dry_P Parameter: Treatment Value: Drought vs. No Drought
gacagtgaattagggttttactcaaaaaaccttctcgttgtcgttgtttactgctccgacgagaaaatggcgatgcgacatttgagccgatcgagagacgttacaaagagatcgacaaagaagtacatcgaagaacctctgtacaatcgcctcttcaaagatggtggtacagaggtcaaagttcgacagcagcttaatcagttcctcaaaggcactaaacacgtcttcaaatgggaggtcggcgatacgatcaagaaactccgaaatcgcggcctctattacccagctctcaagctatctgaagttatggaagagagaggtatgaacaagacagtgagtgatcaagcaatccatcttgatcttgttgctaaagctcgtgaaattactgctggggagaattattttgttgatcttccggaaacatctaagacggaactcacgtatgggtctcttttgaactgttactgcaaggagttgttgacagagaaagcggaaggtttgctgaataagatgaaagagctcaacattactcctagttccatgtcttataacagcctcatgactctttacaccaagacaggtgagactgagaaagttccggcgatgattcaagaattgaaggcggagaatgtgatgccggattcgtacacttataatgtctggatgagggctttggctgctactaatgatatttctggtgttgagagagtcattgaagagatgaatagagatggtagagttgctccggattggactacgtatagcaatatggcatcgatatatgttgatgctggactgtctcagaaagctgagaaggctcttcaggaactggagatgaaaaacacgcaacgggattttacggcatatcagtttcttattactttgtatggacgtctggggaagctgactgaagtttacagaatttggcgttcgttgaggctggctattccgaaaacctcaaatgtagcttatctaaacatgatacaagtgctggtcaagttgaatgatttacctggtgcagagacattgttcaaggaatggcaagctaactgttctacttatgacatcaggattgtgaatgtgttgattggagcttatgctcaagagggtctaatccagaaagcaaatgagctcaaggagaaagctcccagaagaggtggaaagctcaatgctaaaacatgggagatcttcatggattactatgtaaagagcggtgatatggctcgagcactcgaatgcatgtcaaaggcagtctccatcggcaaaggagatggtggcaagtggctaccgtcacctgaaacagtcagagctttgatgagctatttcgagcaaaagaaagatgttaatggagctgagaatttgttggagattttaaagaatggaacagacaacataggcgcagaaatatttgaaccattgataagaacatatgcagcagcgggaaagagtcaccctgctatgcgacggcgcctgaagatggaaaacgtggaggttaatgaagcgacaaagaagctactcgatgaagtatctcaggatgtgtgaggtctgttccatctctttctccttcattattcacttcagacaaagacatcattagtcgtgatagggtcacttgcattctcacagctctgtctcttattggtaataaaaaaataggctctgaatcggcaaaatcaattgtatgggtctgttttactttcaccgtagactgtttgttcatgtttttgtgaattgtttttggtttagcttggatttacagttgagacagctctcacaatgtaatcccttttttggag

SEQ ID NO: 35371 - protein, 513 aa, Arabidopsis thaliana
  peptide (1)..(513): Ceres Seq. ID no. 13487043
  misc_feature (322)..(356): Pfam Name: PPR repeat Pfam Description: PPR repeat
  misc_feature (39)..(506): Homolog of NCBI NO: 22328859 NR Description: pentatricopeptide (PPR) repeat-containing protein
  misc_feature (13)..(463): Homolog of NCBI NO: 20453085 NR Description: At1g02150/T7I23.8 [Arabidopsis thaliana]
  misc_feature (13)..(463): Homolog of NCBI NO: 22329290 NR Description: pentatricopeptide (PPR) repeat-containing protein
  misc_feature (73)..(459): Homolog of NCBI NO: 34393591 NR Description: putative DNA-binding protein
  misc_feature (35)..(509): Homolog of NCBI NO: 25407143 NR Description: hypothetical protein AT4g01990 [imported] -
  misc_feature (35)..(509): Homolog of NCBI NO: 18411800 NR Description: pentatricopeptide (PPR) repeat-containing protein
  misc_feature (44)..(509): Homolog of NCBI NO: 17529324 NR Description: unknown protein [Arabidopsis thaliana]
  misc_feature (44)..(509): Homolog of NCBI NO: 15217734 NR Description: pentatricopeptide (PPR) repeat-containing protein
  misc_feature (29)..(349): Homolog of NCBI NO: 32490390 NR Description: OSJNBa0041M06.2 [Oryza sativa (japonica
  misc_feature (23)..(513): Homolog of NCBI NO: 15219808 NR Description: pentatricopeptide (PPR) repeat-containing protein
DSELGFYSKNLLVVVVYCSDEKMAMRHLSRSRDVTKRSTKKYIEEPLYNRLFKDGGTEVKVRQQLNQFLKGTKHVFKWEVGDTIKKLRNRGLYYPALKLSEVMEERGMNKTVSDQAIHLDLVAKAREITAGENYFVDLPETSKTELTYGSLLNCYCKELLTEKAEGLLNKMKELNITPSSMSYNSLMTLYTKTGETEKVPAMIQELKAENVMPDSYTYNVWMRALAATNDISGVERVIEEMNRDGRVAPDWTTYSNMASIYVDAGLSQKAEKALQELEMKNTQRDFTAYQFLITLYGRLGKLTEVYRIWRSLRLAIPKTSNVAYLNMIQVLVKLNDLPGAETLFKEWQANCSTYDIRIVNVLIGAYAQEGLIQKANELKEKAPRRGGKLNAKTWEIFMDYYVKSGDMARALECMSKAVSIGKGDGGKWLPSPETVRALMSYFEQKKDVNGAENLLEILKNGTDNIGAEIFEPLIRTYAAAGKSHPAMRRRLKMENVEVNEATKKLLDEVSQDV

SEQ ID NO: 35372 - protein, 491 aa, Arabidopsis thaliana
  peptide (1)..(491): Ceres Seq. ID no. 13487044
  misc_feature (300)..(334): Pfam Name: PPR repeat Pfam Description: PPR repeat
  misc_feature (17)..(484): Homolog of NCBI NO: 22328859 NR Description: pentatricopeptide (PPR) repeat-containing protein
  misc_feature (1)..(441): Homolog of NCBI NO: 20453085 NR Description: At1g02150/T7I23.8 [Arabidopsis thaliana]
  misc_feature (1)..(441): Homolog of NCBI NO: 22329290 NR Description: pentatricopeptide (PPR) repeat-containing protein
  misc_feature (51)..(437): Homolog of NCBI NO: 34393591 NR Description: putative DNA-binding protein
  misc_feature (13)..(487): Homolog of NCBI NO: 25407143 NR Description: hypothetical protein AT4g01990 [imported] -
  misc_feature (13)..(487): Homolog of NCBI NO: 18411800 NR Description: pentatricopeptide (PPR) repeat-containing protein
  misc_feature (22)..(487): Homolog of NCBI NO: 17529324 NR Description: unknown protein [Arabidopsis thaliana]
  misc_feature (22)..(487): Homolog of NCBI NO: 15217734 NR Description: pentatricopeptide (PPR) repeat-containing protein
  misc_feature (7)..(327): Homolog of NCBI NO: 32490390 NR Description: OSJNBa0041M06.2 [Oryza sativa (japonica
  misc_feature (1)..(491): Homolog of NCBI NO: 15219808 NR Description: pentatricopeptide (PPR) repeat-containing protein
MAMRHLSRSRDVTKRSTKKYIEEPLYNRLFKDGGTEVKVRQQLNQFLKGTKHVFKWEVGDTIKKLRNRGLYYPALKLSEVMEERGMNKTVSDQAIHLDLVAKAREITAGENYFVDLPETSKTELTYGSLLNCYCKELLTEKAEGLLNKMKELNITPSSMSYNSLMTLYTKTGETEKVPAMIQELKAENVMPDSYTYNVWMRALAATNDISGVERVIEEMNRDGRVAPDWTTYSNMASIYVDAGLSQKAEKALQELEMKNTQRDFTAYQFLITLYGRLGKLTEVYRIWRSLRLAIPKTSNVAYLNMIQVLVKLNDLPGAETLFKEWQANCSTYDIRIVNVLIGAYAQEGLIQKANELKEKAPRRGGKLNAKTWEIFMDYYVKSGDMARALECMSKAVSIGKGDGGKWLPSPETVRALMSYFEQKKDVNGAENLLEILKNGTDNIGAEIFEPLIRTYAAAGKSHPAMRRRLKMENVEVNEATKKLLDEVSQDV

SEQ ID NO: 35373 - protein, 489 aa, Arabidopsis thaliana
  peptide (1)..(489): Ceres Seq. ID no. 13487045
  misc_feature (298)..(332): Pfam Name: PPR repeat Pfam Description: PPR repeat
  misc_feature (15)..(482): Homolog of NCBI NO: 22328859 NR Description: pentatricopeptide (PPR) repeat-containing protein
  misc_feature (1)..(439): Homolog of NCBI NO: 20453085 NR Description: At1g02150/T7I23.8 [Arabidopsis thaliana]
  misc_feature (1)..(439): Homolog of NCBI NO: 22329290 NR Description: pentatricopeptide (PPR) repeat-containing protein
  misc_feature (49)..(435): Homolog of NCBI NO: 34393591 NR Description: putative DNA-binding protein
  misc_feature (11)..(485): Homolog of NCBI NO: 25407143 NR Description: hypothetical protein AT4g01990 [imported] -
  misc_feature (11)..(485): Homolog of NCBI NO: 18411800 NR Description: pentatricopeptide (PPR) repeat-containing protein
  misc_feature (20)..(485): Homolog of NCBI NO: 17529324 NR Description: unknown protein [Arabidopsis thaliana]
  misc_feature (20)..(485): Homolog of NCBI NO: 15217734 NR Description: pentatricopeptide (PPR) repeat-containing protein
  misc_feature (5)..(325): Homolog of NCBI NO: 32490390 NR Description: OSJNBa0041M06.2 [Oryza sativa (japonica
  misc_feature (1)..(489): Homolog of NCBI NO: 15219808 NR Description: pentatricopeptide (PPR) repeat-containing protein
MRHLSRSRDVTKRSTKKYIEEPLYNRLFKDGGTEVKVRQQLNQFLKGTKHVFKWEVGDTIKKLRNRGLYYPALKLSEVMEERGMNKTVSDQAIHLDLVAKAREITAGENYFVDLPETSKTELTYGSLLNCYCKELLTEKAEGLLNKMKELNITPSSMSYNSLMTLYTKTGETEKVPAMIQELKAENVMPDSYTYNVWMRALAATNDISGVERVIEEMNRDGRVAPDWTTYSNMASIYVDAGLSQKAEKALQELEMKNTQRDFTAYQFLITLYGRLGKLTEVYRIWRSLRLAIPKTSNVAYLNMIQVLVKLNDLPGAETLFKEWQANCSTYDIRIVNVLIGAYAQEGLIQKANELKEKAPRRGGKLNAKTWEIFMDYYVKSGDMARALECMSKAVSIGKGDGGKWLPSPETVRALMSYFEQKKDVNGAENLLEILKNGTDNIGAEIFEPLIRTYAAAGKSHPAMRRRLKMENVEVNEATKKLLDEVSQDV

SEQ ID NO: 35374 - DNA, 1058 bp, Arabidopsis thaliana
  misc_feature (1)..(1058): Ceres Seq. ID no. 13592274
  misc_feature: MA Experiment ID: 108569 Result: Up-regulated in Transcription
  misc_feature: MA Experiment 108569 PARAMETER Experiment Name: At_0.001%_MeJA__cDNA_P Parameter: Timepoint (hr) Value: 6
  misc_feature: MA Experiment 108569 PARAMETER Experiment Name: At_0.001%_MeJA__cDNA_P Parameter: Tissue Value: Aerial
  misc_feature: MA Experiment 108569 PARAMETER Experiment Name: At_0.001%_MeJA__cDNA_P Parameter: Treatment Value: 0.001% MeJA vs. No Treatment
  misc_feature: MA Experiment ID: 108573 Result: Up-regulated in Transcription
  misc_feature: MA Experiment 108573 PARAMETER Experiment Name: At_Drought_cDNA_P Parameter: Timepoint (hr) Value: 6
  misc_feature: MA Experiment 108573 PARAMETER Experiment Name: At_Drought_cDNA_P Parameter: Tissue Value: Aerial
  misc_feature: MA Experiment 108573 PARAMETER Experiment Name: At_Drought_cDNA_P Parameter: Treatment Value: Drought vs. No Drought
  misc_feature: MA Experiment ID: 108574 Result: Up-regulated in Transcription
  misc_feature: MA Experiment 108574 PARAMETER Experiment Name: At_Wounding__cDNA_P Parameter: Timepoint (hr) Value: 1
  misc_feature: MA Experiment 108574 PARAMETER Experiment Name: At_Wounding__cDNA_P Parameter: Tissue Value: Aerial
  misc_feature: MA Experiment 108574 PARAMETER Experiment Name: At_Wounding__cDNA_P Parameter: Treatment Value: Wounding vs. No Wounding
  misc_feature: MA Experiment ID: 108579 Result: Up-regulated in Transcription
  misc_feature: MA Experiment 108579 PARAMETER Experiment Name: At_4deg_Cold_cDNA_P Parameter: Temperature (deg C) Value: 4 vs. 22
  misc_feature: MA Experiment 108579 PARAMETER Experiment Name: At_4deg_Cold_cDNA_P Parameter: Timepoint (hr) Value: 6
  misc_feature: MA Experiment 108579 PARAMETER Experiment Name: At_4deg_Cold_cDNA_P Parameter: Tissue Value: Aerial
  misc_feature: MA Experiment ID: 108595 Result: Up-regulated in Transcription
  misc_feature: MA Experiment 108595 PARAMETER Experiment Name: At_Ler-pi_Ovule_cDNA_P Parameter: Plant Line Value: null
  misc_feature: MA Experiment ID: 20000069 Result: Up-regulated in Transcription
  misc_feature: MA Experiment 20000069 PARAMETER Experiment Name: At_100uM_ABA_Mutants_cDNA_P Parameter: Plant Line Value: CS23
  misc_feature: MA Experiment 20000069 PARAMETER Experiment Name: At_100uM_ABA_Mutants_cDNA_P Parameter: Timepoint (hr) Value: 6
  misc_feature: MA Experiment 20000069 PARAMETER Experiment Name: At_100uM_ABA_Mutants_cDNA_P Parameter: Tissue Value: Aerial
  misc_feature: MA Experiment 20000069 PARAMETER Experiment Name: At_100uM_ABA_Mutants_cDNA_P Parameter: Treatment Value: 100uM ABA vs. No Treatment
  misc_feature: MA Experiment ID: 20000071 Result: Up-regulated in Transcription
  misc_feature: MA Experiment 20000071 PARAMETER Experiment Name: At_100uM_ABA_Mutants_cDNA_P Parameter: Plant Line Value: CS8104
  misc_feature: MA Experiment 20000071 PARAMETER Experiment Name: At_100uM_ABA_Mutants_cDNA_P Parameter: Timepoint (hr) Value: 6
  misc_feature: MA Experiment 20000071 PARAMETER Experiment Name: At_100uM_ABA_Mutants_cDNA_P Parameter: Tissue Value: Aerial
  misc_feature: MA Experiment 20000071 PARAMETER Experiment Name: At_100uM_ABA_Mutants_cDNA_P Parameter: Treatment Value: 100uM ABA vs. No Treatment
  misc_feature: MA Experiment ID: 20000089 Result: Down-regulated in Transcription
  misc_feature: MA Experiment ID: 20000185 Result: Down-regulated in Transcription
  misc_feature: MA Experiment 20000185 PARAMETER Experiment Name: At_Roots__P Parameter: Age (day) Value: 7 vs. 21
  misc_feature: MA Experiment 20000185 PARAMETER Experiment Name: At_Roots__P Parameter: Organism Value: A. thaliana
  misc_feature: MA Experiment 20000185 PARAMETER Experiment Name: At_Roots__P Parameter: Tissue Value: Roots vs. Whole Plant
  misc_feature: MA Experiment ID: 20000224 Result: Down-regulated in Transcription
  misc_feature: MA Experiment ID: 20000227 Result: Down-regulated in Transcription
  misc_feature: MA Experiment 20000227 PARAMETER Experiment Name: At_Root-Tips-vs-Tops_P Parameter: Tissue Value: Root Tips vs. Root Tops
  misc_feature: MA Experiment ID: 20000234 Result: Down-regulated in Transcription
  misc_feature: MA Experiment 20000234 PARAMETER Experiment Name: At_Siliques_P Parameter: Age (day) Value: 21
  misc_feature: MA Experiment 20000234 PARAMETER Experiment Name: At_Siliques_P Parameter: Organism Value: A. thaliana
  misc_feature: MA Experiment 20000234 PARAMETER Experiment Name: At_Siliques_P Parameter: Plant Line Value: WS
  misc_feature: MA Experiment 20000234 PARAMETER Experiment Name: At_Siliques_P Parameter: Tissue Value: Less Than 5mm Siliques vs. Whole Plant
  misc_feature: MA Experiment ID: 20000235 Result: Down-regulated in Transcription
  misc_feature: MA Experiment 20000235 PARAMETER Experiment Name: At_Siliques_P Parameter: Age (day) Value: 21
  misc_feature: MA Experiment 20000235 PARAMETER Experiment Name: At_Siliques_P Parameter: Organism Value: A. thaliana
  misc_feature: MA Experiment 20000235 PARAMETER Experiment Name: At_Siliques_P Parameter: Plant Line Value: WS
  misc_feature: MA Experiment 20000235 PARAMETER Experiment Name: At_Siliques_P Parameter: Tissue Value: 5-10mm Siliques vs. Whole Plant
  misc_feature: MA Experiment ID: 20000264 Result: Down-regulated in Transcription
  misc_feature: MA Experiment 20000264 PARAMETER Experiment Name: At_Open_Flower_P Parameter: Age (day) Value: 21
  misc_feature: MA Experiment 20000264 PARAMETER Experiment Name: At_Open_Flower_P Parameter: Plant Line Value: WS
  misc_feature: MA Experiment 20000264 PARAMETER Experiment Name: At_Open_Flower_P Parameter: Tissue Value: Open Flower vs. Whole Plant
  misc_feature: MA Experiment ID: 20000265 Result: Down-regulated in Transcription
  misc_feature: MA Experiment 20000265 PARAMETER Experiment Name: At_Open_Flower_P Parameter: Age (day) Value: 21
  misc_feature: MA Experiment 20000265 PARAMETER Experiment Name: At_Open_Flower_P Parameter: Plant Line Value: WS
  misc_feature: MA Experiment 20000265 PARAMETER Experiment Name: At_Open_Flower_P Parameter: Tissue Value: Closed Flower vs. Whole Plant
  misc_feature: MA Experiment ID: 20000286 Result: Down-regulated in Transcription
  misc_feature: MA Experiment 20000286 PARAMETER Experiment Name: At_Open_Flower_P Parameter: Age (day) Value: 21
  misc_feature: MA Experiment 20000286 PARAMETER Experiment Name: At_Open_Flower_P Parameter: Plant Line Value: WS
  misc_feature: MA Experiment 20000286 PARAMETER Experiment Name: At_Open_Flower_P Parameter: Tissue Value: Half Open vs. Whole Plant
  misc_feature: MA Experiment ID: 20000436 Result: Up-regulated in Transcription
  misc_feature: MA Experiment 20000436 PARAMETER Experiment Name: At_Drought_P Parameter: Age (day) Value: 7
  misc_feature: MA Experiment 20000436 PARAMETER Experiment Name: At_Drought_P Parameter: Organism Value: A. thaliana
  misc_feature: MA Experiment 20000436 PARAMETER Experiment Name: At_Drought_P Parameter: Plant Line Value: WS
  misc_feature: MA Experiment 20000436 PARAMETER Experiment Name: At_Drought_P Parameter: Timepoint (hr) Value: 12
  misc_feature: MA Experiment 20000436 PARAMETER Experiment Name: At_Drought_P Parameter: Tissue Value: Whole Plant
  misc_feature: MA Experiment 20000436 PARAMETER Experiment Name: At_Drought_P Parameter: Treatment Value: Drought vs. No Drought
  misc_feature: MA Experiment ID: 20000438 Result: Down-regulated in Transcription
  misc_feature: MA Experiment 20000438 PARAMETER Experiment Name: At_Shoots__P Parameter: Age (day) Value: 14
  misc_feature: MA Experiment 20000438 PARAMETER Experiment Name: At_Shoots__P Parameter: Tissue Value: Shoots vs. Whole Plant
  misc_feature: MA Experiment ID: 20000441 Result: Up-regulated in Transcription
  misc_feature: MA Experiment 20000441 PARAMETER Experiment Name: At_1uM_BR-BRZ__P Parameter: Tissue Value: Shoot Apices
  misc_feature: MA Experiment 20000441 PARAMETER Experiment Name: At_1uM_BR-BRZ__P Parameter: Treatment Value: 1uM BR vs. No Treatment
  misc_feature: MA Experiment ID: 20000495 Result: Down-regulated in Transcription
  misc_feature: MA Experiment 20000495 PARAMETER Experiment Name: At_Guard_Cells_P Parameter: Harvest Date Value: 8/2/2002
  misc_feature: MA Experiment 20000495 PARAMETER Experiment Name: At_Guard_Cells_P Parameter: Organism Value: A. thaliana
  misc_feature: MA Experiment 20000495 PARAMETER Experiment Name: At_Guard_Cells_P Parameter: Tissue Value: Guard Cells vs. Leaves
  misc_feature: MA Experiment ID: 20000574 Result: Down-regulated in Transcription
  misc_feature: MA Experiment 20000574 PARAMETER Experiment Name: At_100uM_ABA_Mutants__P Parameter: Organism Value: A. thaliana
  misc_feature: MA Experiment 20000574 PARAMETER Experiment Name: At_100uM_ABA_Mutants__P Parameter: Plant Line Value: CS23 vs. Ler wt
  misc_feature: MA Experiment 20000574 PARAMETER Experiment Name: At_100uM_ABA_Mutants__P Parameter: Timepoint (hr) Value: N/A
  misc_feature: MA Experiment 20000574 PARAMETER Experiment Name: At_100uM_ABA_Mutants__P Parameter: Tissue Value: Whole Plant
  misc_feature: MA Experiment 20000574 PARAMETER Experiment Name: At_100uM_ABA_Mutants__P Parameter: Treatment Value: None
  misc_feature: MA Experiment ID: 20000794 Result: Down-regulated in Transcription
  misc_feature: MA Experiment 20000794 PARAMETER Experiment Name: At_Petals_P Parameter: Age (day) Value: 23-25 days
  misc_feature: MA Experiment 20000794 PARAMETER Experiment Name: At_Petals_P Parameter: Plant Line Value: WS
  misc_feature: MA Experiment 20000794 PARAMETER Experiment Name: At_Petals_P Parameter: Tissue Value: Petals vs. Whole plant
  misc_feature: MA Experiment ID: 20001247 Result: Up-regulated in Transcription
  misc_feature: MA Experiment 20001247 PARAMETER Experiment Name: At_Far-red-induction_P Parameter: Age (day) Value: 7
  misc_feature: MA Experiment 20001247 PARAMETER Experiment Name: At_Far-red-induction_P Parameter: Light Value: Far-red vs. White
  misc_feature: MA Experiment 20001247 PARAMETER Experiment Name: At_Far-red-induction_P Parameter: Organism Value: A. thaliana
  misc_feature: MA Experiment 20001247 PARAMETER Experiment Name: At_Far-red-induction_P Parameter: Plant Line Value: Columbia
  misc_feature: MA Experiment 20001247 PARAMETER Experiment Name: At_Far-red-induction_P Parameter: Timepoint (hr) Value: 1
  misc_feature: MA Experiment 20001247 PARAMETER Experiment Name: At_Far-red-induction_P Parameter: Tissue Value: Whole Plant
gaattatctatcacaccaccactctctctctaatctatctatccgagaatggccaagatgggcttgaaacccgacccggctactactaaccagacccacaataatgccaaggagattcgttacagaggcgttaggaagcgtccttggggccgttatgccgccgagatccgagatccgggcaagaaaacccgcgtctggcttggcactttcgatacggctgaagaggcggcgcgtgcttacgatacggcggcgcgtgattttcgtggtgctaaggctaagaccaatttcccaacttttctcgagctgagtgaccagaaggtccctaccggtttcgcgcgtagccctagccagagcagcacgctcgactgtgcttctcctccgacgttagttgtgccttcagcgacggctgggaatgttcccccgcagctcgagcttagtctcggcggaggaggcggcggctcgtgttatcagatcccgatgtcgcgtcctgtctactttttggacctgatggggatcggtaacgtaggtcgtggtcagcctcctcctgtgacatcggcgtttagatcgccggtggtgcatgttgcgacgaagatggcttgtggtgcccaaagcgactctgattcgtcatcggtcgttgatttcgaaggtgggatggagaagagatctcagctgttagatctagatcttaatttgcctcctccatcggaacaggcctgagcttttaacggtgtcgtttcaattcgaagcgcatgcgtttcttcttctttttgagctgtgaaaattcgttttctcatagtttttcctctctctctctctcagtctaaatttattaccagtttttagaaagaaaaaacagattaaatctgagagagaaaaatataattttagctgacatggatcgttatgtacatattattacataaccggagatctgaacttttgttgtgtgcttttaattttttgcgacttggtttcaccccatgttgtttctctattttttttactactttttttttttttgttcttccaaattttcaatcaataatttggtaatcttc

SEQ ID NO: 35375 - protein, 222 aa, Arabidopsis thaliana
  peptide (1)..(222): Ceres Seq. ID no. 13592275
  misc_feature (22)..(86): Pfam Name: AP2 domain Pfam Description: AP2 domain
  misc_feature (22)..(86): Pfam Name: AP2 domain Pfam Description: AP2 domain
  misc_feature (167)..(220): Homolog of NCBI NO: 15218649 NR Description: ethylene responsive element binding factor 11,
  misc_feature (6)..(132): Homolog of NCBI NO: 25403338 NR Description: protein F3M18.20 [imported] - Arabidopsis
  misc_feature (6)..(132): Homolog of NCBI NO: 15218649 NR Description: ethylene responsive element binding factor 11,
  misc_feature (20)..(218): Homolog of NCBI NO: 30526297 NR Description: ethylene response factor 2 [Lycopersicon
  misc_feature (151)..(220): Homolog of NCBI NO: 15219215 NR Description: ethylene responsive element binding factor 8
  misc_feature (167)..(220): Homolog of NCBI NO: 15218649 NR Description: ethylene responsive element binding factor 11,
  misc_feature (6)..(132): Homolog of NCBI NO: 15218649 NR Description: ethylene responsive element binding factor 11,
  misc_feature (151)..(220): Homolog of NCBI NO: 15219215 NR Description: ethylene responsive element binding factor 8
  misc_feature (1)..(222): Homolog of NCBI NO: 15232526 NR Description: ethylene responsive element binding factor 4
  misc_feature (1)..(207): Homolog of NCBI NO: 2281635 NR Description: AP2 domain containing protein RAP2.5 [Arabidopsis
  misc_feature (1)..(153): Homolog of NCBI NO: 20340233 NR Description: ethylene responsive element binding factor 4-like
  misc_feature (179)..(220): Homolog of NCBI NO: 20340233 NR Description: ethylene responsive element binding factor 4-like
  misc_feature (4)..(113): Homolog of NCBI NO: 15219215 NR Description: ethylene responsive element binding factor 8
  misc_feature (20)..(218): Homolog of NCBI NO: 30526297 NR Description: ethylene response factor 2 [Lycopersicon
  misc_feature (6)..(132): Homolog of NCBI NO: 25403338 NR Description: protein F3M18.20 [imported] - Arabidopsis
  misc_feature (4)..(113): Homolog of NCBI NO: 15219215 NR Description: ethylene responsive element binding factor 8
  misc_feature (179)..(220): Homolog of NCBI NO: 20340233 NR Description: ethylene responsive element binding factor 4-like
  misc_feature (1)..(153): Homolog of NCBI NO: 20340233 NR Description: ethylene responsive element binding factor 4-like
  misc_feature (1)..(207): Homolog of NCBI NO: 2281635 NR Description: AP2 domain containing protein RAP2.5 [Arabidopsis
  misc_feature (1)..(222): Homolog of NCBI NO: 15232526 NR Description: ethylene responsive element binding factor 4
MAKMGLKPDPATTNQTHNNAKEIRYRGVRKRPWGRYAAEIRDPGKKTRVWLGTFDTAEEAARAYDTAARDFRGAKAKTNFPTFLELSDQKVPTGFARSPSQSSTLDCASPPTLVVPSATAGNVPPQLELSLGGGGGGSCYQIPMSRPVYFLDLMGIGNVGRGQPPPVTSAFRSPVVHVATKMACGAQSDSDSSSVVDFEGGMEKRSQLLDLDLNLPPPSEQA

SEQ ID NO: 35376 - protein, 219 aa, Arabidopsis thaliana
  peptide (1)..(219): Ceres Seq. ID no. 13592276
  misc_feature (19)..(83): Pfam Name: AP2 domain Pfam Description: AP2 domain
  misc_feature (19)..(83): Pfam Name: AP2 domain Pfam Description: AP2 domain
  misc_feature (164)..(217): Homolog of NCBI NO: 15218649 NR Description: ethylene responsive element binding factor 11,
  misc_feature (3)..(129): Homolog of NCBI NO: 25403338 NR Description: protein F3M18.20 [imported] - Arabidopsis
  misc_feature (3)..(129): Homolog of NCBI NO: 15218649 NR Description: ethylene responsive element binding factor 11,
  misc_feature (17)..(215): Homolog of NCBI NO: 30526297 NR Description: ethylene response factor 2 [Lycopersicon
  misc_feature (148)..(217): Homolog of NCBI NO: 15219215 NR Description: ethylene responsive element binding factor 8
  misc_feature (164)..(217): Homolog of NCBI NO: 15218649 NR Description: ethylene responsive element binding factor 11,
  misc_feature (3)..(129): Homolog of NCBI NO: 15218649 NR Description: ethylene responsive element binding factor 11,
  misc_feature (148)..(217): Homolog of NCBI NO: 15219215 NR Description: ethylene responsive element binding factor 8
  misc_feature (1)..(219): Homolog of NCBI NO: 15232526 NR Description: ethylene responsive element binding factor 4
  misc_feature (1)..(204): Homolog of NCBI NO: 2281635 NR Description: AP2 domain containing protein RAP2.5 [Arabidopsis
  misc_feature (1)..(150): Homolog of NCBI NO: 20340233 NR Description: ethylene responsive element binding factor 4-like
  misc_feature (176)..(217): Homolog of NCBI NO: 20340233 NR Description: ethylene responsive element binding factor 4-like
  misc_feature (1)..(110): Homolog of NCBI NO: 15219215 NR Description: ethylene responsive element binding factor 8
  misc_feature (17)..(215): Homolog of NCBI NO: 30526297 NR Description: ethylene response factor 2 [Lycopersicon
  misc_feature (3)..(129): Homolog of NCBI NO: 25403338 NR Description: protein F3M18.20 [imported] - Arabidopsis
  misc_feature (1)..(110): Homolog of NCBI NO: 15219215 NR Description: ethylene responsive element binding factor 8
  misc_feature (176)..(217): Homolog of NCBI NO: 20340233 NR Description: ethylene responsive element binding factor 4-like
  misc_feature (1)..(150): Homolog of NCBI NO: 20340233 NR Description: ethylene responsive element binding factor 4-like
  misc_feature (1)..(204): Homolog of NCBI NO: 2281635 NR Description: AP2 domain containing protein RAP2.5 [Arabidopsis
  misc_feature (1)..(219): Homolog of NCBI NO: 15232526 NR Description: ethylene responsive element binding factor 4
MGLKPDPATTNQTHNNAKEIRYRGVRKRPWGRYAAEIRDPGKKTRVWLGTFDTAEEAARAYDTAARDFRGAKAKTNFPTFLELSDQKVPTGFARSPSQSSTLDCASPPTLVVPSATAGNVPPQLELSLGGGGGGSCYQIPMSRPVYFLDLMGIGNVGRGQPPPVTSAFRSPVVHVATKMACGAQSDSDSSSVVDFEGGMEKRSQLLDLDLNLPPPSEQA

SEQ ID NO: 35377 - DNA, 950 bp, Arabidopsis thaliana
  misc_feature (1)..(950): Ceres Seq. ID no. 12396694
  misc_feature: MA Experiment ID: 20000111 Result: Up-regulated in Transcription
  misc_feature: MA Experiment 20000111 PARAMETER Experiment Name: At_42deg_Heat_cDNA_P Parameter: Temperature (deg C) Value: 42 vs. 22
  misc_feature: MA Experiment 20000111 PARAMETER Experiment Name: At_42deg_Heat_cDNA_P Parameter: Timepoint (hr) Value: 6
  misc_feature: MA Experiment 20000111 PARAMETER Experiment Name: At_42deg_Heat_cDNA_P Parameter: Tissue Value: Aerial
  misc_feature: MA Experiment ID: 20000113 Result: Up-regulated in Transcription
  misc_feature: MA Experiment 20000113 PARAMETER Experiment Name: At_42deg_Heat_cDNA_P Parameter: Temperature (deg C) Value: 42 vs. 22
  misc_feature: MA Experiment 20000113 PARAMETER Experiment Name: At_42deg_Heat_cDNA_P Parameter: Timepoint (hr) Value: 8
  misc_feature: MA Experiment 20000113 PARAMETER Experiment Name: At_42deg_Heat_cDNA_P Parameter: Tissue Value: Aerial
  misc_feature: MA Experiment ID: 20000173 Result: Up-regulated in Transcription
  misc_feature: MA Experiment 20000173 PARAMETER Experiment Name: At_42deg_Heat_P Parameter: Age (day) Value: 14
  misc_feature: MA Experiment 20000173 PARAMETER Experiment Name: At_42deg_Heat_P Parameter: Organism Value: A. thaliana
  misc_feature: MA Experiment 20000173 PARAMETER Experiment Name: At_42deg_Heat_P Parameter: Plant Line Value: WS
  misc_feature: MA Experiment 20000173 PARAMETER Experiment Name: At_42deg_Heat_P Parameter: Temperature (deg C) Value: 42 vs. 22
  misc_feature: MA Experiment 20000173 PARAMETER Experiment Name: At_42deg_Heat_P Parameter: Timepoint (hr) Value: 6
  misc_feature: MA Experiment 20000173 PARAMETER Experiment Name: At_42deg_Heat_P Parameter: Tissue Value: Aerial
  misc_feature: MA Experiment ID: 20000184 Result: Down-regulated in Transcription
  misc_feature: MA Experiment 20000184 PARAMETER Experiment Name: At_Shoots__P Parameter: Age (day) Value: 7
  misc_feature: MA Experiment 20000184 PARAMETER Experiment Name: At_Shoots__P Parameter: Tissue Value: Shoots vs. Whole Plant
  misc_feature: MA Experiment ID: 20000214 Result: Down-regulated in Transcription
  misc_feature: MA Experiment 20000214 PARAMETER Experiment Name: At_4deg_Cold_P Parameter: Timepoint (hr) Value: 6
  misc_feature: MA Experiment ID: 20001248 Result: Up-regulated in Transcription
  misc_feature: MA Experiment 20001248 PARAMETER Experiment Name: At_Far-red-induction_P Parameter: Age (day) Value: 7
  misc_feature: MA Experiment 20001248 PARAMETER Experiment Name: At_Far-red-induction_P Parameter: Light Value: Far-red vs. White
  misc_feature: MA Experiment 20001248 PARAMETER Experiment Name: At_Far-red-induction_P Parameter: Organism Value: A. thaliana
  misc_feature: MA Experiment 20001248 PARAMETER Experiment Name: At_Far-red-induction_P Parameter: Plant Line Value: Columbia
  misc_feature: MA Experiment 20001248 PARAMETER Experiment Name: At_Far-red-induction_P Parameter: Timepoint (hr) Value: 4
  misc_feature: MA Experiment 20001248 PARAMETER Experiment Name: At_Far-red-induction_P Parameter: Tissue Value: Whole Plant
  misc_feature: MA Experiment ID: 20001450 Result: Up-regulated in Transcription
  misc_feature: MA Experiment 20001450 PARAMETER Experiment Name: At_Far-red-induction_P Parameter: Age (day) Value: 7
  misc_feature: MA Experiment 20001450 PARAMETER Experiment Name: At_Far-red-induction_P Parameter: Light Value: Far-red vs. White
  misc_feature: MA Experiment 20001450 PARAMETER Experiment Name: At_Far-red-induction_P Parameter: Organism Value: A. thaliana
  misc_feature: MA Experiment 20001450 PARAMETER Experiment Name: At_Far-red-induction_P Parameter: Plant Line Value: Columbia
  misc_feature: MA Experiment 20001450 PARAMETER Experiment Name: At_Far-red-induction_P Parameter: Timepoint (hr) Value: 8
  misc_feature: MA Experiment 20001450 PARAMETER Experiment Name: At_Far-red-induction_P Parameter: Tissue Value: Whole Plant
  misc_feature: MA Experiment ID: 20001911 Result: Up-regulated in Transcription
  misc_feature: MA Experiment 20001911 PARAMETER Experiment Name: At_Drought_Reproduction_P Parameter: Age (day) Value: 40
  misc_feature: MA Experiment 20001911 PARAMETER Experiment Name: At_Drought_Reproduction_P Parameter: Organism Value: A. thaliana
  misc_feature: MA Experiment 20001911 PARAMETER Experiment Name: At_Drought_Reproduction_P Parameter: Plant Line Value: WS
  misc_feature: MA Experiment 20001911 PARAMETER Experiment Name: At_Drought_Reproduction_P Parameter: Timepoint (day) Value: 10
  misc_feature: MA Experiment 20001911 PARAMETER Experiment Name: At_Drought_Reproduction_P Parameter: Tissue Value: Flowers
  misc_feature: MA Experiment 20001911 PARAMETER Experiment Name: At_Drought_Reproduction_P Parameter: Treatment Value: Drought vs. No Drought
ttttcactttgttctctctctctctcgtaacacgcctgagagttctcgtcgtccttatctcgatcttggttgattcgctctccgatcggaaattagggcttttgttttctgaagatgacgactgcagcacgaccaacctgggctccagctaagggaggtaacgagcaaggtggtgctcggatctttggtccatctcagaagtattcgtcccgtgatgtcgccgctcacacaactttaaagccaaggagggaagggcaacacactcaagaggaactccagaagataaatcttcgtgatgagcttgaagagcgtgagaggagacatttctcatcaaaagacaaatcatacaatgatgatagagatcgcagaagaggaagtcagcttttactggaagactcgaaaagggatcctgaagagcggattattcctcgcagtgtagatgctgatgattctgatgttgatatcaaaagtgacgatgatagtgatgacgaaagtgacgatgatgatgaggacgacactgaagctcttatggcggaactcgaccagataaagaaagaaagagtggaagagaggctcaggaaggaaaaagagcagcagatggaagagctaaacgctaaggaagaggaacttctcaaaggaaacccattgcttaatactccagcgtcttttagcgtcaaaaggaggtgggatgatgatgttgtattcaaaaaccaggcacgtggtgaaatgaaagctcctaagcgcttcatcaatgatacaatcaggaatgacttccacagaaaattcctgcatagatacatgaagtgattgtttgtcaagagtgttattgctacttctttgtatgatgattatgactaaaagcttttattctgtctggaattacgatgtctctgtactcaaacaacaaatgtttttaagctttatatcaaaaacttatgcatttgattttg

SEQ ID NO: 35378 - protein, 230 aa, Arabidopsis thaliana
  peptide (1)..(230): Ceres Seq. ID no. 12396695
  misc_feature (1)..(230): Pfam Name: Cwf15/Cwc15 cell cycle control protein Pfam Description: Cwf15/Cwc15 cell cycle control protein
  misc_feature (1)..(230): Homolog of NCBI NO: 17564200 NR Description: Adrenal gland protein AD-002 like (26.1 kD)
  misc_feature (1)..(230): Homolog of NCBI NO: 27688663 NR Description: similar to RIKEN cDNA 0610040D20
  misc_feature (1)..(230): Homolog of NCBI NO: 7705475 NR Description: hypothetical protein HSPC148 [Homo sapiens]
  misc_feature (1)..(230): Homolog of NCBI NO: 27719369 NR Description: similar to RIKEN cDNA 0610040D20
  misc_feature (1)..(230): Homolog of NCBI NO: 6523797 NR Description: adrenal gland protein AD-002 [Homo sapiens]
  misc_feature (1)..(230): Homolog of NCBI NO: 12963537 NR Description: RIKEN cDNA 0610040D20 [Mus musculus]
  misc_feature (1)..(230): Homolog of NCBI NO: 34897750 NR Description: ESTs AU032852(S15362),AU070591(S5037) correspond a region of the predicted gene.~Similar to Caenorhabditis elegans
  misc_feature (1)..(230): Homolog of NCBI NO: 21592359 NR Description: unknown [Arabidopsis thaliana]
  misc_feature (1)..(230): Homolog of NCBI NO: 18399903 NR Description: expressed protein
  misc_feature (1)..(230): Homolog of NCBI NO: 15451186 NR Description: Unknown protein [Arabidopsis thaliana]
MTTAARPTWAPAKGGNEQGGARIFGPSQKYSSRDVAAHTTLKPRREGQHTQEELQKINLRDELEERERRHFSSKDKSYNDDRDRRRGSQLLLEDSKRDPEERIIPRSVDADDSDVDIKSDDDSDDESDDDDEDDTEALMAELDQIKKERVEERLRKEKEQQMEELNAKEEELLKGNPLLNTPASFSVKRRWDDDVVFKNQARGEMKAPKRFINDTIRNDFHRKFLHRYMK

SEQ ID NO: 35379 - DNA, 1817 bp, Arabidopsis thaliana
  misc_feature (1)..(1817): Ceres Seq. ID no. 13500174
  misc_feature: MA Experiment ID: 108435 Result: Up-regulated in Transcription
  misc_feature: MA Experiment 108435 PARAMETER Experiment Name: At_stm_Mutants_cDNA_P Parameter: Plant Line Value: wt Landsburg vs stm
  misc_feature: MA Experiment 108435 PARAMETER Experiment Name: At_stm_Mutants_cDNA_P Parameter: Tissue Value: Shoot Apical Meristem Region
accggaattttctcgcttttgtctactctcctccatctccgaggttctccaagctcagctcctcttcccatcattcatccgaccgccttatccggagaactacaaagaggaaaccaagattgttttgttttgttagactctaccccttttccgattcacatggtaaggacattgaggtagagaataatactaaaaagcaatgggagatgggagttccagtagatccaacagctcaaacagcactagtgagaaaccagagtggctgcaacagtacaatctcgttggtaagattggtgaaggcacttatggtcttgttttcttggctagaaccaagactccgcctaaaagacctattgctatcaagaagtttaagcagtccaaagatggagatggagtttccccgactgctatccgcgagatcatgttgcttagagagatttcccatgagaacgtcgtgaagcttgtgaatgtccacatcaattttgcagacatgtctctgtatcttgcctttgattatgccgagtacgatctctatgaaatcatcaggcaccacagagacaaagtcggccattcgttaaacacatacacagttaagtctttgctctggcagcttctcaacggattgaactatcttcacagtaattggattatacacagagatttgaaaccgtcgaatatcttggttatgggtgatgcagaagagcacggaatagtgaaaatagctgatttcgggctcgcaaggatatatcaagctccgttgaaaccactatcggataacggagttgtggtcacaatctggtaccgagcaccagagctgcttcttggttcgaagcactacacgagcgctgttgatatgtgggcagttgggtgtatattcgcggagttactaactcttaaaccgttgtttcaaggagcagaagcgaaatcgtctcaaaaccctttccagttagatcaacttgacaagatattcaagatcttaggccacccgacgatggataaatggccaacactagttaaccttccacactggcaaaatgatgttcaacacattcaagctcacaaatacgacagtgtgggtctccacaacgtggttcacctgaatcagaaaagtcctgcgtatgatctgttatccaaaatgctggaatatgatcctctaaagcggatcacggcttcacaagcactagaacacgagtatttccgaatggatcctctcccaggacggaacgcatttgtagccagccaaccgatggagaagaatgtgaattacccaactcgtccagtagatacaaacaccgatttcgaaggcacgacaagcatcaatccgcctcaagcagtagcagcaggaaacgtagcagggaacatggcaggagctcatggaatgggcagtagatcgatgccaagaccaatggttgcacataacatgcagaggatgcagcaatctcaaggcatgatggcttataatttcccggcacaggcagggcttaacccgagtgttccgctgcagcagcagcgcgggatggctcaaccgcaccagcagcaacagctaagaagggaagatcccggaatgggtatgtcaggttacgcacctcctaacaaatccagacgcctctaaaggtaaaatcgagatcatcagtctcgggttagaatctgtgtgtttgccgcagaagaaagcgttgcgatttgctttatagagtagagttagattgtaatgcagcatgtggaatgttgctattcatatggatggattggattctctgtagtttttgtataaacatcctctcaagtatttgttaattatattagatcatcatttctcc

SEQ ID NO: 35380 - protein, 470 aa, Arabidopsis thaliana
  peptide (1)..(470): Ceres Seq. ID no. 13500175
  misc_feature (25)..(333): Pfam Name: Protein kinase domain Pfam Description: Protein kinase domain
  misc_feature (17)..(381): Homolog of NCBI NO: 20521738 NR Description: KIAA1028 protein [Homo sapiens]
  misc_feature (17)..(377): Homolog of NCBI NO: 28972574 NR Description: mKIAA1028 protein [Mus musculus]
  misc_feature (25)..(368): Homolog of NCBI NO: 24661985 NR Description: Cyclin-dependent kinase 8 CG10572-PA [Drosophila
  misc_feature (13)..(359): Homolog of NCBI NO: 4502745 NR Description: cyclin-dependent kinase 8
  misc_feature (25)..(368): Homolog of NCBI NO: 1718193 NR Description: Cdk8
  misc_feature (2)..(362): Homolog of NCBI NO: 15778146 NR Description: cyclin-dependent kinase 8 [Dictyostelium
  misc_feature (56)..(470): Homolog of NCBI NO: 7488749 NR Description: probable cdc2-like protein kinase cdc2MsE -
  misc_feature (16)..(469): Homolog of NCBI NO: 37537198 NR Description: putative serine/threonine kinase
  misc_feature (1)..(470): Homolog of NCBI NO: 15242829 NR Description: protein kinase, putative [Arabidopsis thaliana]
  misc_feature (1)..(470): Homolog of NCBI NO: 28973682 NR Description: putative cyclin-dependent kinase E1 [Arabidopsis
MGDGSSSRSNSSNSTSEKPEWLQQYNLVGKIGEGTYGLVFLARTKTPPKRPIAIKKFKQSKDGDGVSPTAIREIMLLREISHENVVKLVNVHINFADMSLYLAFDYAEYDLYEIIRHHRDKVGHSLNTYTVKSLLWQLLNGLNYLHSNWIIHRDLKPSNILVMGDAEEHGIVKIADFGLARIYQAPLKPLSDNGVVVTIWYRAPELLLGSKHYTSAVDMWAVGCIFAELLTLKPLFQGAEAKSSQNPFQLDQLDKIFKILGHPTMDKWPTLVNLPHWQNDVQHIQAHKYDSVGLHNVVHLNQKSPAYDLLSKMLEYDPLKRITASQALEHEYFRMDPLPGRNAFVASQPMEKNVNYPTRPVDTNTDFEGTTSINPPQAVAAGNVAGNMAGAHGMGSRSMPRPMVAHNMQRMQQSQGMMAYNFPAQAGLNPSVPLQQQRGMAQPHQQQQLRREDPGMGMSGYAPPNKSRRL

SEQ ID NO: 35381 - protein, 396 aa, Arabidopsis thaliana
  peptide (1)..(396): Ceres Seq. ID no. 13500176
  misc_feature (1)..(259): Pfam Name: Protein kinase domain Pfam Description: Protein kinase domain
  misc_feature (1)..(307): Homolog of NCBI NO: 20521738 NR Description: KIAA1028 protein [Homo sapiens]
  misc_feature (1)..(303): Homolog of NCBI NO: 28972574 NR Description: mKIAA1028 protein [Mus musculus]
  misc_feature (1)..(294): Homolog of NCBI NO: 24661985 NR Description: Cyclin-dependent kinase 8 CG10572-PA [Drosophila
  misc_feature (1)..(285): Homolog of NCBI NO: 4502745 NR Description: cyclin-dependent kinase 8
  misc_feature (1)..(294): Homolog of NCBI NO: 1718193 NR Description: Cdk8
  misc_feature (1)..(288): Homolog of NCBI NO: 15778146 NR Description: cyclin-dependent kinase 8 [Dictyostelium
  misc_feature (1)..(396): Homolog of NCBI NO: 7488749 NR Description: probable cdc2-like protein kinase cdc2MsE -
  misc_feature (1)..(395): Homolog of NCBI NO: 37537198 NR Description: putative serine/threonine kinase
  misc_feature (1)..(396): Homolog of NCBI NO: 15242829 NR Description: protein kinase, putative [Arabidopsis thaliana]
  misc_feature (1)..(396): Homolog of NCBI NO: 28973682 NR Description: putative cyclin-dependent kinase E1 [Arabidopsis
MLLREISHENVVKLVNVHINFADMSLYLAFDYAEYDLYEIIRHHRDKVGHSLNTYTVKSLLWQLLNGLNYLHSNWIIHRDLKPSNILVMGDAEEHGIVKIADFGLARIYQAPLKPLSDNGVVVTIWYRAPELLLGSKHYTSAVDMWAVGCIFAELLTLKPLFQGAEAKSSQNPFQLDQLDKIFKILGHPTMDKWPTLVNLPHWQNDVQHIQAHKYDSVGLHNVVHLNQKSPAYDLLSKMLEYDPLKRITASQALEHEYFRMDPLPGRNAFVASQPMEKNVNYPTRPVDTNTDFEGTTSINPPQAVAAGNVAGNMAGAHGMGSRSMPRPMVAHNMQRMQQSQGMMAYNFPAQAGLNPSVPLQQQRGMAQPHQQQQLRREDPGMGMSGYAPPNKSRRL

SEQ ID NO: 35382 - protein, 373 aa, Arabidopsis thaliana
  peptide (1)..(373): Ceres Seq. ID no. 13500177
  misc_feature (1)..(236): Pfam Name: Protein kinase domain Pfam Description: Protein kinase domain
  misc_feature (1)..(284): Homolog of NCBI NO: 20521738 NR Description: KIAA1028 protein [Homo sapiens]
  misc_feature (1)..(280): Homolog of NCBI NO: 28972574 NR Description: mKIAA1028 protein [Mus musculus]
  misc_feature (1)..(271): Homolog of NCBI NO: 24661985 NR Description: Cyclin-dependent kinase 8 CG10572-PA [Drosophila
  misc_feature (1)..(262): Homolog of NCBI NO: 4502745 NR Description: cyclin-dependent kinase 8
  misc_feature (1)..(271): Homolog of NCBI NO: 1718193 NR Description: Cdk8
  misc_feature (1)..(265): Homolog of NCBI NO: 15778146 NR Description: cyclin-dependent kinase 8 [Dictyostelium
  misc_feature (1)..(373): Homolog of NCBI NO: 7488749 NR Description: probable cdc2-like protein kinase cdc2MsE -
  misc_feature (1)..(372): Homolog of NCBI NO: 37537198 NR Description: putative serine/threonine kinase
  misc_feature (1)..(373): Homolog of NCBI NO: 15242829 NR Description: protein kinase, putative [Arabidopsis thaliana]
  misc_feature (1)..(373): Homolog of NCBI NO: 28973682 NR Description: putative cyclin-dependent kinase E1 [Arabidopsis
MSLYLAFDYAEYDLYEIIRHHRDKVGHSLNTYTVKSLLWQLLNGLNYLHSNWIIHRDLKPSNILVMGDAEEHGIVKIADFGLARIYQAPLKPLSDNGVVVTIWYRAPELLLGSKHYTSAVDMWAVGCIFAELLTLKPLFQGAEAKSSQNPFQLDQLDKIFKILGHPTMDKWPTLVNLPHWQNDVQHIQAHKYDSVGLHNVVHLNQKSPAYDLLSKMLEYDPLKRITASQALEHEYFRMDPLPGRNAFVASQPMEKNVNYPTRPVDTNTDFEGTTSINPPQAVAAGNVAGNMAGAHGMGSRSMPRPMVAHNMQRMQQSQGMMAYNFPAQAGLNPSVPLQQQRGMAQPHQQQQLRREDPGMGMSGYAPPNKSRRL

SEQ ID NO: 35383 - DNA, 715 bp, Arabidopsis thaliana
  misc_feature (1)..(715): Ceres Seq. ID no. 12322680
  misc_feature: MA Experiment ID: 108434 Result: Up-regulated in Transcription
  misc_feature: MA Experiment 108434 PARAMETER Experiment Name: At_Root_Tips_cDNA_P Parameter: Tissue Value: Root Tips
  misc_feature: MA Experiment ID: 108462 Result: Down-regulated in Transcription
  misc_feature: MA Experiment 108462 PARAMETER Experiment Name: At_Germinating_Seeds_cDNA_P Parameter: Age (day) Value: 2 vs. 0
  misc_feature: MA Experiment 108462 PARAMETER Experiment Name: At_Germinating_Seeds_cDNA_P Parameter: Tissue Value: Germinating Seeds
  misc_feature: MA Experiment ID: 108463 Result: Down-regulated in Transcription
  misc_feature: MA Experiment 108463 PARAMETER Experiment Name: At_Germinating_Seeds_cDNA_P Parameter: Age (day) Value: 3 vs. 0
  misc_feature: MA Experiment 108463 PARAMETER Experiment Name: At_Germinating_Seeds_cDNA_P Parameter: Tissue Value: Germinating Seeds
  misc_feature: MA Experiment ID: 108488 Result: Up-regulated in Transcription
  misc_feature: MA Experiment ID: 108489 Result: Up-regulated in Transcription
  misc_feature: MA Experiment ID: 108573 Result: Down-regulated in Transcription
  misc_feature: MA Experiment 108573 PARAMETER Experiment Name: At_Drought_cDNA_P Parameter: Timepoint (hr) Value: 6
  misc_feature: MA Experiment 108573 PARAMETER Experiment Name: At_Drought_cDNA_P Parameter: Tissue Value: Aerial
  misc_feature: MA Experiment 108573 PARAMETER Experiment Name: At_Drought_cDNA_P Parameter: Treatment Value: Drought vs. No Drought
  misc_feature: MA Experiment ID: 108595 Result: Down-regulated in Transcription
  misc_feature: MA Experiment 108595 PARAMETER Experiment Name: At_Ler-pi_Ovule_cDNA_P Parameter: Plant Line Value: null
  misc_feature: MA Experiment ID: 20000227 Result: Up-regulated in Transcription
  misc_feature: MA Experiment 20000227 PARAMETER Experiment Name: At_Root-Tips-vs-Tops_P Parameter: Tissue Value: Root Tips vs. Root Tops
  misc_feature: MA Experiment ID: 20000437 Result: Down-regulated in Transcription
  misc_feature: MA Experiment 20000437 PARAMETER Experiment Name: At_Drought_P Parameter: Age (day) Value: 8
  misc_feature: MA Experiment 20000437 PARAMETER Experiment Name: At_Drought_P Parameter: Organism Value: A. thaliana
  misc_feature: MA Experiment 20000437 PARAMETER Experiment Name: At_Drought_P Parameter: Plant Line Value: WS
  misc_feature: MA Experiment 20000437 PARAMETER Experiment Name: At_Drought_P Parameter: Timepoint (hr) Value: 24
  misc_feature: MA Experiment 20000437 PARAMETER Experiment Name: At_Drought_P Parameter: Tissue Value: Whole Plant
  misc_feature: MA Experiment 20000437 PARAMETER Experiment Name: At_Drought_P Parameter: Treatment Value: Drought vs. No Drought
  misc_feature: MA Experiment ID: 20000573 Result: Down-regulated in Transcription
  misc_feature: MA Experiment 20000573 PARAMETER Experiment Name: At_100uM_ABA_Mutants__P Parameter: Organism Value: A. thaliana
  misc_feature: MA Experiment 20000573 PARAMETER Experiment Name: At_100uM_ABA_Mutants__P Parameter: Plant Line Value: CS22 vs. Ler wt
  misc_feature: MA Experiment 20000573 PARAMETER Experiment Name: At_100uM_ABA_Mutants__P Parameter: Timepoint (hr) Value: N/A
  misc_feature: MA Experiment 20000573 PARAMETER Experiment Name: At_100uM_ABA_Mutants__P Parameter: Tissue Value: Whole Plant
  misc_feature: MA Experiment 20000573 PARAMETER Experiment Name: At_100uM_ABA_Mutants__P Parameter: Treatment Value: None
  misc_feature: MA Experiment ID: 20000574 Result: Down-regulated in Transcription
  misc_feature: MA Experiment 20000574 PARAMETER Experiment Name: At_100uM_ABA_Mutants__P Parameter: Organism Value: A. thaliana
  misc_feature: MA Experiment 20000574 PARAMETER Experiment Name: At_100uM_ABA_Mutants__P Parameter: Plant Line Value: CS23 vs. Ler wt
  misc_feature: MA Experiment 20000574 PARAMETER Experiment Name: At_100uM_ABA_Mutants__P Parameter: Timepoint (hr) Value: N/A
  misc_feature: MA Experiment 20000574 PARAMETER Experiment Name: At_100uM_ABA_Mutants__P Parameter: Tissue Value: Whole Plant
  misc_feature: MA Experiment 20000574 PARAMETER Experiment Name: At_100uM_ABA_Mutants__P Parameter: Treatment Value: None
  misc_feature: MA Experiment ID: 20000794 Result: Down-regulated in Transcription
  misc_feature: MA Experiment 20000794 PARAMETER Experiment Name: At_Petals_P Parameter: Age (day) Value: 23-25 days
  misc_feature: MA Experiment 20000794 PARAMETER Experiment Name: At_Petals_P Parameter: Plant Line Value: WS
  misc_feature: MA Experiment 20000794 PARAMETER Experiment Name: At_Petals_P Parameter: Tissue Value: Petals vs. Whole plant
  misc_feature: MA Experiment ID: 20001557 Result: Up-regulated in Transcription
  misc_feature: MA Experiment 20001557 PARAMETER Experiment Name: At_Drought_Soil_Dry_P Parameter: Age (day) Value: 27
  misc_feature: MA Experiment 20001557 PARAMETER Experiment Name: At_Drought_Soil_Dry_P Parameter: Organism Value: A. thaliana
  misc_feature: MA Experiment 20001557 PARAMETER Experiment Name: At_Drought_Soil_Dry_P Parameter: Plant Line Value: WS
  misc_feature: MA Experiment 20001557 PARAMETER Experiment Name: At_Drought_Soil_Dry_P Parameter: Post Timepoint (hr) Value: 3
  misc_feature: MA Experiment 20001557 PARAMETER Experiment Name: At_Drought_Soil_Dry_P Parameter: Post-Treatment Value: Re-Water vs. No Drought
  misc_feature: MA Experiment 20001557 PARAMETER Experiment Name: At_Drought_Soil_Dry_P Parameter: Timepoint (day) Value: 13
  misc_feature: MA Experiment 20001557 PARAMETER Experiment Name: At_Drought_Soil_Dry_P Parameter: Treatment Value: Drought vs. No Drought
  misc_feature: MA Experiment ID: 20001558 Result: Up-regulated in Transcription
  misc_feature: MA Experiment 20001558 PARAMETER Experiment Name: At_Drought_Soil_Dry_P Parameter: Age (day) Value: 27
  misc_feature: MA Experiment 20001558 PARAMETER Experiment Name: At_Drought_Soil_Dry_P Parameter: Organism Value: A. thaliana
  misc_feature: MA Experiment 20001558 PARAMETER Experiment Name: At_Drought_Soil_Dry_P Parameter: Plant Line Value: WS
  misc_feature: MA Experiment 20001558 PARAMETER Experiment Name: At_Drought_Soil_Dry_P Parameter: Post Timepoint (hr) Value: 6
  misc_feature: MA Experiment 20001558 PARAMETER Experiment Name: At_Drought_Soil_Dry_P Parameter: Post-Treatment Value: Re-Water vs. No Drought
  misc_feature: MA Experiment 20001558 PARAMETER Experiment Name: At_Drought_Soil_Dry_P Parameter: Timepoint (day) Value: 13
  misc_feature: MA Experiment 20001558 PARAMETER Experiment Name: At_Drought_Soil_Dry_P Parameter: Treatment Value: Drought vs. No Drought
  misc_feature: MA Experiment ID: 20001560 Result: Up-regulated in Transcription
  misc_feature: MA Experiment 20001560 PARAMETER Experiment Name: At_Drought_Soil_Dry_P Parameter: Age (day) Value: 28
  misc_feature: MA Experiment 20001560 PARAMETER Experiment Name: At_Drought_Soil_Dry_P Parameter: Organism Value: A. thaliana
  misc_feature: MA Experiment 20001560 PARAMETER Experiment Name: At_Drought_Soil_Dry_P Parameter: Plant Line Value: WS
  misc_feature: MA Experiment 20001560 PARAMETER Experiment Name: At_Drought_Soil_Dry_P Parameter: Post Timepoint (hr) Value: None
  misc_feature: MA Experiment 20001560 PARAMETER Experiment Name: At_Drought_Soil_Dry_P Parameter: Post-Treatment Value: None
  misc_feature: MA Experiment 20001560 PARAMETER Experiment Name: At_Drought_Soil_Dry_P Parameter: Timepoint (day) Value: 14
  misc_feature: MA Experiment 20001560 PARAMETER Experiment Name: At_Drought_Soil_Dry_P Parameter: Treatment Value: Drought vs. No Drought
  misc_feature: MA Experiment ID: 20001757 Result: Up-regulated in Transcription
  misc_feature: MA Experiment 20001757 PARAMETER Experiment Name: At_50mM_NH4NO3_L-to-H_P Parameter: Timepoint (hr) Value: 6
  misc_feature: MA Experiment 20001757 PARAMETER Experiment Name: At_50mM_NH4NO3_L-to-H_P Parameter: Tissue Value: Leaf
  misc_feature: MA Experiment 20001757 PARAMETER Experiment Name: At_50mM_NH4NO3_L-to-H_P Parameter: Treatment Value: 50mM NH4NO3 vs 100mM Mannitol
tcctcatccccttaaaaaaccctaagagtagagactctctcaatcccggcggcgaagatgaagtacaacccaagagtgacctcttctcgcagaaagaacaggaaggctcatttcacagcttcctccagcgagaggcgtgtgataatgagctctcctctctccaccgatcttcgtcagaagtacaatgtcagatccatgccgatccgtaaagacgacgaggttcagatcgttcgtggtacttacaagggacgtgaaggcaaagttgttcaggtttaccgtcgcaaatgggtgattcacatcgagagaatcacgagggagaaggtgaatggaacaaccgtgaacgttgggattcagccgtcgaaagttgtgataacgaagcttcgtcttgataaagataggaaatcgcttttggagaggaaggctaagggacgtgctgctgctgataaggagaagggtactaagtttacgtctgaggatgttatgcagaacgttgattaagtaagaaggaagaagaaatcttcttgaaaggttttatcttttagagttatcttcaatcgctttttaattttcaagttttggatattttggaatgttgtcagtggatctttatggtgctagacatgagaacttatgttttgattttgagtatttgaagtttggttatggaagtttatctctttgtctcattctttataatgatgtgtttgtttggttg

SEQ ID NO: 35384 - protein, 146 aa, Arabidopsis thaliana
  peptide (1)..(146): Ceres Seq. ID no. 12322681
  misc_feature (1)..(141): Homolog of NCBI NO: 27729769 NR Description: similar to ribosomal protein L26 - mouse [Rattus
  misc_feature (1)..(139): Homolog of NCBI NO: 31207009 NR Description: ENSANGP00000022122 [Anopheles gambiae]
  misc_feature (1)..(139): Homolog of NCBI NO: 7705813 NR Description: ribosomal protein L26-like 1
  misc_feature (1)..(141): Homolog of NCBI NO: 4506621 NR Description: ribosomal protein L26; 60S ribosomal protein L26
  misc_feature (1)..(141): Homolog of NCBI NO: 132827 NR Description: 60S RIBOSOMAL PROTEIN L26
  misc_feature (1)..(119): Homolog of NCBI NO: 3747050 NR Description: ribosomal protein L26 [Zea mays]
  misc_feature (1)..(141): Homolog of NCBI NO: 34895672 NR Description: putative ribosomal protein L26
  misc_feature (1)..(146): Homolog of NCBI NO: 15240766 NR Description: 60S ribosomal protein L26
  misc_feature (1)..(145): Homolog of NCBI NO: 3914740 NR Description: 60S ribosomal protein L26
  misc_feature (1)..(146): Homolog of NCBI NO: 15229631 NR Description: 60S RIBOSOMAL PROTEIN - like
  misc_feature (1)..(141): Homolog of NCBI NO: 27729769 NR Description: similar to ribosomal protein L26 - mouse [Rattus
  misc_feature (1)..(139): Homolog of NCBI NO: 31207009 NR Description: ENSANGP00000022122 [Anopheles gambiae]
  misc_feature (1)..(139): Homolog of NCBI NO: 7705813 NR Description: ribosomal protein L26-like 1
  misc_feature (1)..(141): Homolog of NCBI NO: 4506621 NR Description: ribosomal protein L26; 60S ribosomal protein L26
  misc_feature (1)..(141): Homolog of NCBI NO: 132827 NR Description: 60S RIBOSOMAL PROTEIN L26
  misc_feature (1)..(119): Homolog of NCBI NO: 3747050 NR Description: ribosomal protein L26 [Zea mays]
  misc_feature (1)..(141): Homolog of NCBI NO: 34895672 NR Description: putative ribosomal protein L26
  misc_feature (1)..(146): Homolog of NCBI NO: 15240766 NR Description: 60S ribosomal protein L26
  misc_feature (1)..(145): Homolog of NCBI NO: 3914740 NR Description: 60S ribosomal protein L26
  misc_feature (1)..(146): Homolog of NCBI NO: 15229631 NR Description: 60S RIBOSOMAL PROTEIN - like
MKYNPRVTSSRRKNRKAHFTASSSERRVIMSSPLSTDLRQKYNVRSMPIRKDDEVQIVRGTYKGREGKVVQVYRRKWVIHIERITREKVNGTTVNVGIQPSKVVITKLRLDKDRKSLLERKAKGRAAADKEKGTKFTSEDVMQNVD

SEQ ID NO: 35385 - protein, 117 aa, Arabidopsis thaliana
  peptide (1)..(117): Ceres Seq. ID no. 12322682
  misc_feature (1)..(112): Homolog of NCBI NO: 27729769 NR Description: similar to ribosomal protein L26 - mouse [Rattus
  misc_feature (1)..(110): Homolog of NCBI NO: 31207009 NR Description: ENSANGP00000022122 [Anopheles gambiae]
  misc_feature (1)..(110): Homolog of NCBI NO: 7705813 NR Description: ribosomal protein L26-like 1
  misc_feature (1)..(112): Homolog of NCBI NO: 4506621 NR Description: ribosomal protein L26; 60S ribosomal protein L26
  misc_feature (1)..(112): Homolog of NCBI NO: 132827 NR Description: 60S RIBOSOMAL PROTEIN L26
  misc_feature (1)..(90): Homolog of NCBI NO: 3747050 NR Description: ribosomal protein L26 [Zea mays]
  misc_feature (1)..(112): Homolog of NCBI NO: 34895672 NR Description: putative ribosomal protein L26
  misc_feature (1)..(117): Homolog of NCBI NO: 15240766 NR Description: 60S ribosomal protein L26
  misc_feature (1)..(116): Homolog of NCBI NO: 3914740 NR Description: 60S ribosomal protein L26
  misc_feature (1)..(117): Homolog of NCBI NO: 15229631 NR Description: 60S RIBOSOMAL PROTEIN - like
  misc_feature (1)..(112): Homolog of NCBI NO: 27729769 NR Description: similar to ribosomal protein L26 - mouse [Rattus
  misc_feature (1)..(110): Homolog of NCBI NO: 31207009 NR Description: ENSANGP00000022122 [Anopheles gambiae]
  misc_feature (1)..(110): Homolog of NCBI NO: 7705813 NR Description: ribosomal protein L26-like 1
  misc_feature (1)..(112): Homolog of NCBI NO: 4506621 NR Description: ribosomal protein L26; 60S ribosomal protein L26
  misc_feature (1)..(112): Homolog of NCBI NO: 132827 NR Description: 60S RIBOSOMAL PROTEIN L26
  misc_feature (1)..(90): Homolog of NCBI NO: 3747050 NR Description: ribosomal protein L26 [Zea mays]
  misc_feature (1)..(112): Homolog of NCBI NO: 34895672 NR Description: putative ribosomal protein L26
  misc_feature (1)..(117): Homolog of NCBI NO: 15240766 NR Description: 60S ribosomal protein L26
  misc_feature (1)..(116): Homolog of NCBI NO: 3914740 NR Description: 60S ribosomal protein L26
  misc_feature (1)..(117): Homolog of NCBI NO: 15229631 NR Description: 60S RIBOSOMAL PROTEIN - like
MSSPLSTDLRQKYNVRSMPIRKDDEVQIVRGTYKGREGKVVQVYRRKWVIHIERITREKVNGTTVNVGIQPSKVVITKLRLDKDRKSLLERKAKGRAAADKEKGTKFTSEDVMQNVD

SEQ ID NO: 35386 - protein, 100 aa, Arabidopsis thaliana
  peptide (1)..(100): Ceres Seq. ID no. 12322683
  misc_feature (1)..(95): Homolog of NCBI NO: 27729769 NR Description: similar to ribosomal protein L26 - mouse [Rattus
  misc_feature (1)..(93): Homolog of NCBI NO: 31207009 NR Description: ENSANGP00000022122 [Anopheles gambiae]
  misc_feature (1)..(93): Homolog of NCBI NO: 7705813 NR Description: ribosomal protein L26-like 1
  misc_feature (1)..(95): Homolog of NCBI NO: 4506621 NR Description: ribosomal protein L26; 60S ribosomal protein L26
  misc_feature (1)..(95): Homolog of NCBI NO: 132827 NR Description: 60S RIBOSOMAL PROTEIN L26
  misc_feature (1)..(73): Homolog of NCBI NO: 3747050 NR Description: ribosomal protein L26 [Zea mays]
  misc_feature (1)..(95): Homolog of NCBI NO: 34895672 NR Description: putative ribosomal protein L26
  misc_feature (1)..(100): Homolog of NCBI NO: 15240766 NR Description: 60S ribosomal protein L26
  misc_feature (1)..(99): Homolog of NCBI NO: 3914740 NR Description: 60S ribosomal protein L26
  misc_feature (1)..(100): Homolog of NCBI NO: 15229631 NR Description: 60S RIBOSOMAL PROTEIN - like
  misc_feature (1)..(95): Homolog of NCBI NO: 27729769 NR Description: similar to ribosomal protein L26 - mouse [Rattus
  misc_feature (1)..(93): Homolog of NCBI NO: 31207009 NR Description: ENSANGP00000022122 [Anopheles gambiae]
  misc_feature (1)..(93): Homolog of NCBI NO: 7705813 NR Description: ribosomal protein L26-like 1
  misc_feature (1)..(95): Homolog of NCBI NO: 4506621 NR Description: ribosomal protein L26; 60S ribosomal protein L26
  misc_feature (1)..(95): Homolog of NCBI NO: 132827 NR Description: 60S RIBOSOMAL PROTEIN L26
  misc_feature (1)..(73): Homolog of NCBI NO: 3747050 NR Description: ribosomal protein L26 [Zea mays]
  misc_feature (1)..(95): Homolog of NCBI NO: 34895672 NR Description: putative ribosomal protein L26
  misc_feature (1)..(100): Homolog of NCBI NO: 15240766 NR Description: 60S ribosomal protein L26
  misc_feature (1)..(99): Homolog of NCBI NO: 3914740 NR Description: 60S ribosomal protein L26
  misc_feature (1)..(100): Homolog of NCBI NO: 15229631 NR Description: 60S RIBOSOMAL PROTEIN - like
MPIRKDDEVQIVRGTYKGREGKVVQVYRRKWVIHIERITREKVNGTTVNVGIQPSKVVITKLRLDKDRKSLLERKAKGRAAADKEKGTKFTSEDVMQNVD

SEQ ID NO: 35387 - DNA, 757 bp, Arabidopsis thaliana
  misc_feature (1)..(757): Ceres Seq. ID no. 13496766
  misc_feature: MA Experiment ID: 108461 Result: Up-regulated in Transcription
  misc_feature: MA Experiment 108461 PARAMETER Experiment Name: At_Germinating_Seeds_cDNA_P Parameter: Age (day) Value: 1 vs. 0
  misc_feature: MA Experiment 108461 PARAMETER Experiment Name: At_Germinating_Seeds_cDNA_P Parameter: Tissue Value: Germinating Seeds
  misc_feature: MA Experiment ID: 108579 Result: Down-regulated in Transcription
  misc_feature: MA Experiment 108579 PARAMETER Experiment Name: At_4deg_Cold_cDNA_P Parameter: Temperature (deg C) Value: 4 vs. 22
  misc_feature: MA Experiment 108579 PARAMETER Experiment Name: At_4deg_Cold_cDNA_P Parameter: Timepoint (hr) Value: 6
  misc_feature: MA Experiment 108579 PARAMETER Experiment Name: At_4deg_Cold_cDNA_P Parameter: Tissue Value: Aerial
  misc_feature: MA Experiment ID: 20000179 Result: Up-regulated in Transcription
  misc_feature: MA Experiment 20000179 PARAMETER Experiment Name: At_Germinating_Seeds_P Parameter: Age (hr) Value: 6 vs. 0
  misc_feature: MA Experiment 20000179 PARAMETER Experiment Name: At_Germinating_Seeds_P Parameter: Tissue Value: Germinating Seeds
  misc_feature: MA Experiment ID: 20000180 Result: Up-regulated in Transcription
  misc_feature: MA Experiment 20000180 PARAMETER Experiment Name: At_Germinating_Seeds_P Parameter: Age (hr) Value: 24 vs. 0
  misc_feature: MA Experiment 20000180 PARAMETER Experiment Name: At_Germinating_Seeds_P Parameter: Tissue Value: Germinating Seeds
gttgaggatcatcgattatcagtttctggatttcgctactacagatttgtcccgtcttgagttacgaaatcatgatacattttgtgcttctagttagccggcaaggaaaggtaaggctcaccaaatggtattctccttatgcacagaaggaaagatctaaggttatacgtgaactcagtggagtgattctgaatcgaggtccaaagctctgcaattttgttgaatggagaggatacaaagttgtttacaaaagatatgcaagtctctacttctgcatgtgcattgatcaggaggataacgagttagaggtccttgagatcattcatcactatgttgagattctcgatcgctattttggaagtgtgtgtgaactcgatttgatttttaacttccacaaggcatattacatattggatgagctcttgattgctggggagcttcaagagtcaagcaagaaaacagtagccaggattatatccgctcaggatcaactggtggaggttgcaaaagaggaggccagttcgataagtaatataatcgctcaggctactaatcgataagtagtcttattcatcatctatgcattcttatgcagttaaagtatgttccctgtctctggctacagtaattgttttgagaaatctttatccatttgatttttcttgcggagggattttcgtcttaaagcgtaacttggagagaagaaatatgttatgatttggttcataaacaagtaaagattatatcgtttgtaatc

SEQ ID NO: 35388 - protein, 162 aa, Arabidopsis thaliana
  peptide (1)..(162): Ceres Seq. ID no. 13496767
  misc_feature (1)..(142): Pfam Name: Clathrin adaptor complex small chain Pfam Description: Clathrin adaptor complex small chain
  misc_feature (2)..(147): Homolog of NCBI NO: 34880078 NR Description: similar to Adapter-related protein complex 1 subunit) (Golgi adaptor HA1/AP1 adaptin sigma-1B subunit)
  misc_feature (2)..(147): Homolog of NCBI NO: 21541960 NR Description: Adapter-related protein complex 1 sigma 1B (Sigma-adaptin 1B) (Adaptor protein complex AP-1 sigma-1B (Golgi adaptor HA1/AP1 adaptin sigma-1B subunit) (Clathrin
  misc_feature (1)..(156): Homolog of NCBI NO: 23480730 NR Description: clathrin assembly protein AP19, small subunit
  misc_feature (1)..(109): Homolog of NCBI NO: 30690340 NR Description: clathrin assembly protein AP19 homolog
  misc_feature (1)..(143): Homolog of NCBI NO: 23508378 NR Description: clathrin assembly protein AP19, putative
  misc_feature (1)..(160): Homolog of NCBI NO: 34897116 NR Description: putative clathrin assembly protein [Oryza sativa]
  misc_feature (1)..(160): Homolog of NCBI NO: 1762309 NR Description: AP-1 Golgi-related complex component
  misc_feature (1)..(160): Homolog of NCBI NO: 2231698 NR Description: clathrin assembly protein AP19 [Arabidopsis
  misc_feature (1)..(160): Homolog of NCBI NO: 18398407 NR Description: clathrin assembly protein AP19, small subunit
  misc_feature (1)..(162): Homolog of NCBI NO: 15237005 NR Description: clathrin assembly protein AP19 homolog
MIHFVLLVSRQGKVRLTKWYSPYAQKERSKVIRELSGVILNRGPKLCNFVEWRGYKVVYKRYASLYFCMCIDQEDNELEVLEIIHHYVEILDRYFGSVCELDLIFNFHKAYYILDELLIAGELQESSKKTVARIISAQDQLVEVAKEEASSISNIIAQATNR

SEQ ID NO: 35389 - protein, 94 aa, Arabidopsis thaliana
  peptide (1)..(94): Ceres Seq. ID no. 13496768
  misc_feature (1)..(74): Pfam Name: Clathrin adaptor complex small chain Pfam Description: Clathrin adaptor complex small chain
  misc_feature (1)..(79): Homolog of NCBI NO: 34880078 NR Description: similar to Adapter-related protein complex 1 subunit) (Golgi adaptor HA1/AP1 adaptin sigma-1B subunit)
  misc_feature (1)..(79): Homolog of NCBI NO: 21541960 NR Description: Adapter-related protein complex 1 sigma 1B (Sigma-adaptin 1B) (Adaptor protein complex AP-1 sigma-1B (Golgi adaptor HA1/AP1 adaptin sigma-1B subunit) (Clathrin
  misc_feature (1)..(88): Homolog of NCBI NO: 23480730 NR Description: clathrin assembly protein AP19, small subunit
  misc_feature (1)..(41): Homolog of NCBI NO: 30690340 NR Description: clathrin assembly protein AP19 homolog
  misc_feature (1)..(75): Homolog of NCBI NO: 23508378 NR Description: clathrin assembly protein AP19, putative
  misc_feature (1)..(92): Homolog of NCBI NO: 34897116 NR Description: putative clathrin assembly protein [Oryza sativa]
  misc_feature (1)..(92): Homolog of NCBI NO: 1762309 NR Description: AP-1 Golgi-related complex component
  misc_feature (1)..(92): Homolog of NCBI NO: 2231698 NR Description: clathrin assembly protein AP19 [Arabidopsis
  misc_feature (1)..(92): Homolog of NCBI NO: 18398407 NR Description: clathrin assembly protein AP19, small subunit
  misc_feature (1)..(94): Homolog of NCBI NO: 15237005 NR Description: clathrin assembly protein AP19 homolog
MCIDQEDNELEVLEIIHHYVEILDRYFGSVCELDLIFNFHKAYYILDELLIAGELQESSKKTVARIISAQDQLVEVAKEEASSISNIIAQATNR

SEQ ID NO: 35390 - DNA, 977 bp, Arabidopsis thaliana
  misc_feature (1)..(977): Ceres Seq. ID no. 12372086
  misc_feature: MA Experiment ID: 108461 Result: Down-regulated in Transcription
  misc_feature: MA Experiment 108461 PARAMETER Experiment Name: At_Germinating_Seeds_cDNA_P Parameter: Age (day) Value: 1 vs. 0
  misc_feature: MA Experiment 108461 PARAMETER Experiment Name: At_Germinating_Seeds_cDNA_P Parameter: Tissue Value: Germinating Seeds
  misc_feature: MA Experiment ID: 108462 Result: Down-regulated in Transcription
  misc_feature: MA Experiment 108462 PARAMETER Experiment Name: At_Germinating_Seeds_cDNA_P Parameter: Age (day) Value: 2 vs. 0
  misc_feature: MA Experiment 108462 PARAMETER Experiment Name: At_Germinating_Seeds_cDNA_P Parameter: Tissue Value: Germinating Seeds
  misc_feature: MA Experiment ID: 108463 Result: Down-regulated in Transcription
  misc_feature: MA Experiment 108463 PARAMETER Experiment Name: At_Germinating_Seeds_cDNA_P Parameter: Age (day) Value: 3 vs. 0
  misc_feature: MA Experiment 108463 PARAMETER Experiment Name: At_Germinating_Seeds_cDNA_P Parameter: Tissue Value: Germinating Seeds
  misc_feature: MA Experiment ID: 108573 Result: Up-regulated in Transcription
  misc_feature: MA Experiment 108573 PARAMETER Experiment Name: At_Drought_cDNA_P Parameter: Timepoint (hr) Value: 6
  misc_feature: MA Experiment 108573 PARAMETER Experiment Name: At_Drought_cDNA_P Parameter: Tissue Value: Aerial
  misc_feature: MA Experiment 108573 PARAMETER Experiment Name: At_Drought_cDNA_P Parameter: Treatment Value: Drought vs. No Drought
  misc_feature: MA Experiment ID: 108577 Result: Down-regulated in Transcription
  misc_feature: MA Experiment 108577 PARAMETER Experiment Name: At_42deg_Heat_cDNA_P Parameter: Temperature (deg C) Value: 42 vs. 22
  misc_feature: MA Experiment 108577 PARAMETER Experiment Name: At_42deg_Heat_cDNA_P Parameter: Timepoint (hr) Value: 6
  misc_feature: MA Experiment 108577 PARAMETER Experiment Name: At_42deg_Heat_cDNA_P Parameter: Tissue Value: Aerial
  misc_feature: MA Experiment ID: 108585 Result: Up-regulated in Transcription
  misc_feature: MA Experiment 108585 PARAMETER Experiment Name: At_5mM_NaNP_cDNA_P Parameter: Timepoint (hr) Value: 6
  misc_feature: MA Experiment 108585 PARAMETER Experiment Name: At_5mM_NaNP_cDNA_P Parameter: Tissue Value: Aerial
  misc_feature: MA Experiment 108585 PARAMETER Experiment Name: At_5mM_NaNP_cDNA_P Parameter: Treatment Value: null
  misc_feature: MA Experiment ID: 20000072 Result: Up-regulated in Transcription
  misc_feature: MA Experiment 20000072 PARAMETER Experiment Name: At_100uM_ABA_Mutants_cDNA_P Parameter: Plant Line Value: CS8105
  misc_feature: MA Experiment 20000072 PARAMETER Experiment Name: At_100uM_ABA_Mutants_cDNA_P Parameter: Timepoint (hr) Value: 6
  misc_feature: MA Experiment 20000072 PARAMETER Experiment Name: At_100uM_ABA_Mutants_cDNA_P Parameter: Tissue Value: Aerial
  misc_feature: MA Experiment 20000072 PARAMETER Experiment Name: At_100uM_ABA_Mutants_cDNA_P Parameter: Treatment Value: 100uM ABA vs. No Treatment
  misc_feature: MA Experiment ID: 20000086 Result: Up-regulated in Transcription
  misc_feature: MA Experiment 20000086 PARAMETER Experiment Name: At_100uM_ABA_Mutants_cDNA_P Parameter: Plant Line Value: CS22
  misc_feature: MA Experiment 20000086 PARAMETER Experiment Name: At_100uM_ABA_Mutants_cDNA_P Parameter: Timepoint (hr) Value: 6
  misc_feature: MA Experiment 20000086 PARAMETER Experiment Name: At_100uM_ABA_Mutants_cDNA_P Parameter: Tissue Value: Aerial
  misc_feature: MA Experiment 20000086 PARAMETER Experiment Name: At_100uM_ABA_Mutants_cDNA_P Parameter: Treatment Value: 100uM ABA vs. No Treatment
  misc_feature: MA Experiment ID: 20000111 Result: Down-regulated in Transcription
  misc_feature: MA Experiment 20000111 PARAMETER Experiment Name: At_42deg_Heat_cDNA_P Parameter: Temperature (deg C) Value: 42 vs. 22
  misc_feature: MA Experiment 20000111 PARAMETER Experiment Name: At_42deg_Heat_cDNA_P Parameter: Timepoint (hr) Value: 6
  misc_feature: MA Experiment 20000111 PARAMETER Experiment Name: At_42deg_Heat_cDNA_P Parameter: Tissue Value: Aerial
  misc_feature: MA Experiment ID: 20000173 Result: Down-regulated in Transcription
  misc_feature: MA Experiment 20000173 PARAMETER Experiment Name: At_42deg_Heat_P Parameter: Age (day) Value: 14
  misc_feature: MA Experiment 20000173 PARAMETER Experiment Name: At_42deg_Heat_P Parameter: Organism Value: A. thaliana
  misc_feature: MA Experiment 20000173 PARAMETER Experiment Name: At_42deg_Heat_P Parameter: Plant Line Value: WS
  misc_feature: MA Experiment 20000173 PARAMETER Experiment Name: At_42deg_Heat_P Parameter: Temperature (deg C) Value: 42 vs. 22
  misc_feature: MA Experiment 20000173 PARAMETER Experiment Name: At_42deg_Heat_P Parameter: Timepoint (hr) Value: 6
  misc_feature: MA Experiment 20000173 PARAMETER Experiment Name: At_42deg_Heat_P Parameter: Tissue Value: Aerial
  misc_feature: MA Experiment ID: 20000227 Result: Down-regulated in Transcription
  misc_feature: MA Experiment 20000227 PARAMETER Experiment Name: At_Root-Tips-vs-Tops_P Parameter: Tissue Value: Root Tips vs. Root Tops
  misc_feature: MA Experiment ID: 20000234 Result: Down-regulated in Transcription
  misc_feature: MA Experiment 20000234 PARAMETER Experiment Name: At_Siliques_P Parameter: Age (day) Value: 21
  misc_feature: MA Experiment 20000234 PARAMETER Experiment Name: At_Siliques_P Parameter: Organism Value: A. thaliana
  misc_feature: MA Experiment 20000234 PARAMETER Experiment Name: At_Siliques_P Parameter: Plant Line Value: WS
  misc_feature: MA Experiment 20000234 PARAMETER Experiment Name: At_Siliques_P Parameter: Tissue Value: Less Than 5mm Siliques vs. Whole Plant
  misc_feature: MA Experiment ID: 20000235 Result: Down-regulated in Transcription
  misc_feature: MA Experiment 20000235 PARAMETER Experiment Name: At_Siliques_P Parameter: Age (day) Value: 21
  misc_feature: MA Experiment 20000235 PARAMETER Experiment Name: At_Siliques_P Parameter: Organism Value: A. thaliana
  misc_feature: MA Experiment 20000235 PARAMETER Experiment Name: At_Siliques_P Parameter: Plant Line Value: WS
  misc_feature: MA Experiment 20000235 PARAMETER Experiment Name: At_Siliques_P Parameter: Tissue Value: 5-10mm Siliques vs. Whole Plant
  misc_feature: MA Experiment ID: 20000437 Result: Up-regulated in Transcription
  misc_feature: MA Experiment 20000437 PARAMETER Experiment Name: At_Drought_P Parameter: Age (day) Value: 8
  misc_feature: MA Experiment 20000437 PARAMETER Experiment Name: At_Drought_P Parameter: Organism Value: A. thaliana
  misc_feature: MA Experiment 20000437 PARAMETER Experiment Name: At_Drought_P Parameter: Plant Line Value: WS
  misc_feature: MA Experiment 20000437 PARAMETER Experiment Name: At_Drought_P Parameter: Timepoint (hr) Value: 24
  misc_feature: MA Experiment 20000437 PARAMETER Experiment Name: At_Drought_P Parameter: Tissue Value: Whole Plant
  misc_feature: MA Experiment 20000437 PARAMETER Experiment Name: At_Drought_P Parameter: Treatment Value: Drought vs. No Drought
  misc_feature: MA Experiment ID: 20001557 Result: Up-regulated in Transcription
  misc_feature: MA Experiment 20001557 PARAMETER Experiment Name: At_Drought_Soil_Dry_P Parameter: Age (day) Value: 27
  misc_feature: MA Experiment 20001557 PARAMETER Experiment Name: At_Drought_Soil_Dry_P Parameter: Organism Value: A. thaliana
  misc_feature: MA Experiment 20001557 PARAMETER Experiment Name: At_Drought_Soil_Dry_P Parameter: Plant Line Value: WS
  misc_feature: MA Experiment 20001557 PARAMETER Experiment Name: At_Drought_Soil_Dry_P Parameter: Post Timepoint (hr) Value: 3
  misc_feature: MA Experiment 20001557 PARAMETER Experiment Name: At_Drought_Soil_Dry_P Parameter: Post-Treatment Value: Re-Water vs. No Drought
  misc_feature: MA Experiment 20001557 PARAMETER Experiment Name: At_Drought_Soil_Dry_P Parameter: Timepoint (day) Value: 13
  misc_feature: MA Experiment 20001557 PARAMETER Experiment Name: At_Drought_Soil_Dry_P Parameter: Treatment Value: Drought vs. No Drought
  misc_feature: MA Experiment ID: 20001558 Result: Up-regulated in Transcription
  misc_feature: MA Experiment 20001558 PARAMETER Experiment Name: At_Drought_Soil_Dry_P Parameter: Age (day) Value: 27
  misc_feature: MA Experiment 20001558 PARAMETER Experiment Name: At_Drought_Soil_Dry_P Parameter: Organism Value: A. thaliana
  misc_feature: MA Experiment 20001558 PARAMETER Experiment Name: At_Drought_Soil_Dry_P Parameter: Plant Line Value: WS
  misc_feature: MA Experiment 20001558 PARAMETER Experiment Name: At_Drought_Soil_Dry_P Parameter: Post Timepoint (hr) Value: 6
  misc_feature: MA Experiment 20001558 PARAMETER Experiment Name: At_Drought_Soil_Dry_P Parameter: Post-Treatment Value: Re-Water vs. No Drought
  misc_feature: MA Experiment 20001558 PARAMETER Experiment Name: At_Drought_Soil_Dry_P Parameter: Timepoint (day) Value: 13
  misc_feature: MA Experiment 20001558 PARAMETER Experiment Name: At_Drought_Soil_Dry_P Parameter: Treatment Value: Drought vs. No Drought
  misc_feature: MA Experiment ID: 20001560 Result: Up-regulated in Transcription
  misc_feature: MA Experiment 20001560 PARAMETER Experiment Name: At_Drought_Soil_Dry_P Parameter: Age (day) Value: 28
  misc_feature: MA Experiment 20001560 PARAMETER Experiment Name: At_Drought_Soil_Dry_P Parameter: Organism Value: A. thaliana
  misc_feature: MA Experiment 20001560 PARAMETER Experiment Name: At_Drought_Soil_Dry_P Parameter: Plant Line Value: WS
  misc_feature: MA Experiment 20001560 PARAMETER Experiment Name: At_Drought_Soil_Dry_P Parameter: Post Timepoint (hr) Value: None
  misc_feature: MA Experiment 20001560 PARAMETER Experiment Name: At_Drought_Soil_Dry_P Parameter: Post-Treatment Value: None
  misc_feature: MA Experiment 20001560 PARAMETER Experiment Name: At_Drought_Soil_Dry_P Parameter: Timepoint (day) Value: 14
  misc_feature: MA Experiment 20001560 PARAMETER Experiment Name: At_Drought_Soil_Dry_P Parameter: Treatment Value: Drought vs. No Drought
  misc_feature: MA Experiment ID: 20001905 Result: Up-regulated in Transcription
  misc_feature: MA Experiment 20001905 PARAMETER Experiment Name: At_Drought_Reproduction_P Parameter: Age (day) Value: 40
  misc_feature: MA Experiment 20001905 PARAMETER Experiment Name: At_Drought_Reproduction_P Parameter: Organism Value: A. thaliana
  misc_feature: MA Experiment 20001905 PARAMETER Experiment Name: At_Drought_Reproduction_P Parameter: Plant Line Value: WS
  misc_feature: MA Experiment 20001905 PARAMETER Experiment Name: At_Drought_Reproduction_P Parameter: Timepoint (day) Value: 10
  misc_feature: MA Experiment 20001905 PARAMETER Experiment Name: At_Drought_Reproduction_P Parameter: Tissue Value: Rosettes
  misc_feature: MA Experiment 20001905 PARAMETER Experiment Name: At_Drought_Reproduction_P Parameter: Treatment Value: Drought vs. No Drought
accaacaatcacattcttctcccataagaaaaaaaaaataatcaaatcctcctcctctgcttcaccaccaaaaagcatattcttctctcgtcttctccggttaatcaaaatctctccgtgtgaatcgtttgtgaatggtggaaactaatccgatcggtggtaagtttacgctctccctttccatcaaaagggcgagcttttctcttcctctctcgacatcctctgttttcgctttcggatcttgcaaagaaggctggtactttcgctgccttggcctcgacccgtgaacgattcgcccctaaaattcacaacccggaaccctaatttcctaaaaagtggttctttttttattgattctgttacttgtgagatttgctctgttttttgttctctcgatttcgaagatgttgctctacaacaagcagaagaagaaccaaaacgctaaagggaataggattctcattagcgttacggttttgggtagtgccggtccgatccggtttgttgcttatgaggatgatcttgttgcctctgttatcgatactgctcttaaaggttacgctcgtgaaggtcgtcttcctcttcttggatctgatttcaatgattttcttctctattgtcctatggttggacctgaagctttaagcacatgggatgcaattggatctcttggagcgaggaactttatgctctgtaggaaaccagaggagaagaaggttgaggaaagtaatggaagatctgactctaccattaatggtgcaagaaaaggtggaagcttgaaggcttggatcaacaaatccttcaatctcaaagtctcaagccattaagattaattttcttctcttttttatgaaataataagaccaatctttgttttatcatcattatgttctttgtttttggttttgattccaaagtttgttattttcatctttcattcatgaataaaagtgtcaaattcttctggattttgcact

SEQ ID NO: 35391 - protein, 140 aa, Arabidopsis thaliana
  peptide (1)..(140): Ceres Seq. ID no. 12372087
  misc_feature (11)..(129): Homolog of NCBI NO: 10279678 NR Description: hypothetical protein [Catharanthus roseus]
  misc_feature (9)..(103): Homolog of NCBI NO: 9757983 NR Description: gb|AAC00605.1~gene_id:K12B20.21~similar to
  misc_feature (9)..(114): Homolog of NCBI NO: 21553538 NR Description: unknown [Arabidopsis thaliana]
  misc_feature (9)..(114): Homolog of NCBI NO: 15240321 NR Description: putative protein
  misc_feature (1)..(140): Homolog of NCBI NO: 13359433 NR Description: putative senescence-associated protein [Pisum
  misc_feature (1)..(140): Homolog of NCBI NO: 25372856 NR Description: T26J12.8 protein - Arabidopsis thaliana
  misc_feature (1)..(140): Homolog of NCBI NO: 15220659 NR Description: unknown protein; protein id: At1g23150.1
  misc_feature (1)..(140): Homolog of NCBI NO: 18409673 NR Description: expressed protein
  misc_feature (1)..(126): Homolog of NCBI NO: 16226338 NR Description: At1g70780/F5A18_4 [Arabidopsis thaliana]
MLLYNKQKKNQNAKGNRILISVTVLGSAGPIRFVAYEDDLVASVIDTALKGYAREGRLPLLGSDFNDFLLYCPMVGPEALSTWDAIGSLGARNFMLCRKPEEKKVEESNGRSDSTINGARKGGSLKAWINKSFNLKVSSH

SEQ ID NO: 35392 - DNA, 973 bp, Arabidopsis thaliana
  misc_feature (1)..(973): Ceres Seq. ID no. 12385644
  misc_feature: MA Experiment ID: 108434 Result: Up-regulated in Transcription
  misc_feature: MA Experiment 108434 PARAMETER Experiment Name: At_Root_Tips_cDNA_P Parameter: Tissue Value: Root Tips
  misc_feature: MA Experiment ID: 108577 Result: Up-regulated in Transcription
  misc_feature: MA Experiment 108577 PARAMETER Experiment Name: At_42deg_Heat_cDNA_P Parameter: Temperature (deg C) Value: 42 vs. 22
  misc_feature: MA Experiment 108577 PARAMETER Experiment Name: At_42deg_Heat_cDNA_P Parameter: Timepoint (hr) Value: 6
  misc_feature: MA Experiment 108577 PARAMETER Experiment Name: At_42deg_Heat_cDNA_P Parameter: Tissue Value: Aerial
  misc_feature: MA Experiment ID: 108595 Result: Down-regulated in Transcription
  misc_feature: MA Experiment 108595 PARAMETER Experiment Name: At_Ler-pi_Ovule_cDNA_P Parameter: Plant Line Value: null
  misc_feature: MA Experiment ID: 20000070 Result: Down-regulated in Transcription
  misc_feature: MA Experiment 20000070 PARAMETER Experiment Name: At_100uM_ABA_Mutants_cDNA_P Parameter: Plant Line Value: CS24
  misc_feature: MA Experiment 20000070 PARAMETER Experiment Name: At_100uM_ABA_Mutants_cDNA_P Parameter: Timepoint (hr) Value: 6
  misc_feature: MA Experiment 20000070 PARAMETER Experiment Name: At_100uM_ABA_Mutants_cDNA_P Parameter: Tissue Value: Aerial
  misc_feature: MA Experiment 20000070 PARAMETER Experiment Name: At_100uM_ABA_Mutants_cDNA_P Parameter: Treatment Value: 100uM ABA vs. No Treatment
  misc_feature: MA Experiment ID: 20000071 Result: Down-regulated in Transcription
  misc_feature: MA Experiment 20000071 PARAMETER Experiment Name: At_100uM_ABA_Mutants_cDNA_P Parameter: Plant Line Value: CS8104
  misc_feature: MA Experiment 20000071 PARAMETER Experiment Name: At_100uM_ABA_Mutants_cDNA_P Parameter: Timepoint (hr) Value: 6
  misc_feature: MA Experiment 20000071 PARAMETER Experiment Name: At_100uM_ABA_Mutants_cDNA_P Parameter: Tissue Value: Aerial
  misc_feature: MA Experiment 20000071 PARAMETER Experiment Name: At_100uM_ABA_Mutants_cDNA_P Parameter: Treatment Value: 100uM ABA vs. No Treatment
  misc_feature: MA Experiment ID: 20000072 Result: Down-regulated in Transcription
  misc_feature: MA Experiment 20000072 PARAMETER Experiment Name: At_100uM_ABA_Mutants_cDNA_P Parameter: Plant Line Value: CS8105
  misc_feature: MA Experiment 20000072 PARAMETER Experiment Name: At_100uM_ABA_Mutants_cDNA_P Parameter: Timepoint (hr) Value: 6
  misc_feature: MA Experiment 20000072 PARAMETER Experiment Name: At_100uM_ABA_Mutants_cDNA_P Parameter: Tissue Value: Aerial
  misc_feature: MA Experiment 20000072 PARAMETER Experiment Name: At_100uM_ABA_Mutants_cDNA_P Parameter: Treatment Value: 100uM ABA vs. No Treatment
  misc_feature: MA Experiment ID: 20000086 Result: Down-regulated in Transcription
  misc_feature: MA Experiment 20000086 PARAMETER Experiment Name: At_100uM_ABA_Mutants_cDNA_P Parameter: Plant Line Value: CS22
  misc_feature: MA Experiment 20000086 PARAMETER Experiment Name: At_100uM_ABA_Mutants_cDNA_P Parameter: Timepoint (hr) Value: 6
  misc_feature: MA Experiment 20000086 PARAMETER Experiment Name: At_100uM_ABA_Mutants_cDNA_P Parameter: Tissue Value: Aerial
  misc_feature: MA Experiment 20000086 PARAMETER Experiment Name: At_100uM_ABA_Mutants_cDNA_P Parameter: Treatment Value: 100uM ABA vs. No Treatment
  misc_feature: MA Experiment ID: 20000087 Result: Down-regulated in Transcription
  misc_feature: MA Experiment 20000087 PARAMETER Experiment Name: At_100uM_ABA_Mutants_cDNA_P Parameter: Plant Line Value: WS
  misc_feature: MA Experiment 20000087 PARAMETER Experiment Name: At_100uM_ABA_Mutants_cDNA_P Parameter: Timepoint (hr) Value: 6
  misc_feature: MA Experiment 20000087 PARAMETER Experiment Name: At_100uM_ABA_Mutants_cDNA_P Parameter: Tissue Value: Aerial
  misc_feature: MA Experiment 20000087 PARAMETER Experiment Name: At_100uM_ABA_Mutants_cDNA_P Parameter: Treatment Value: 100uM ABA vs. No Treatment
  misc_feature: MA Experiment ID: 20000088 Result: Down-regulated in Transcription
  misc_feature: MA Experiment 20000088 PARAMETER Experiment Name: At_100uM_ABA_Mutants_cDNA_P Parameter: Plant Line Value: Landsberg
  misc_feature: MA Experiment 20000088 PARAMETER Experiment Name: At_100uM_ABA_Mutants_cDNA_P Parameter: Timepoint (hr) Value: 6
  misc_feature: MA Experiment 20000088 PARAMETER Experiment Name: At_100uM_ABA_Mutants_cDNA_P Parameter: Tissue Value: Aerial
  misc_feature: MA Experiment 20000088 PARAMETER Experiment Name: At_100uM_ABA_Mutants_cDNA_P Parameter: Treatment Value: 100uM ABA vs. No Treatment
  misc_feature: MA Experiment ID: 20000113 Result: Up-regulated in Transcription
  misc_feature: MA Experiment 20000113 PARAMETER Experiment Name: At_42deg_Heat_cDNA_P Parameter: Temperature (deg C) Value: 42 vs. 22
  misc_feature: MA Experiment 20000113 PARAMETER Experiment Name: At_42deg_Heat_cDNA_P Parameter: Timepoint (hr) Value: 8
  misc_feature: MA Experiment 20000113 PARAMETER Experiment Name: At_42deg_Heat_cDNA_P Parameter: Tissue Value: Aerial
  misc_feature: MA Experiment ID: 20000117 Result: Down-regulated in Transcription
  misc_feature: MA Experiment 20000117 PARAMETER Experiment Name: At_100uM_ABA_Mutants_cDNA_P Parameter: Plant Line Value: Columbia
  misc_feature: MA Experiment 20000117 PARAMETER Experiment Name: At_100uM_ABA_Mutants_cDNA_P Parameter: Timepoint (hr) Value: 6
  misc_feature: MA Experiment 20000117 PARAMETER Experiment Name: At_100uM_ABA_Mutants_cDNA_P Parameter: Tissue Value: Aerial
  misc_feature: MA Experiment 20000117 PARAMETER Experiment Name: At_100uM_ABA_Mutants_cDNA_P Parameter: Treatment Value: 100uM ABA vs. No Treatment
  misc_feature: MA Experiment ID: 20000185 Result: Down-regulated in Transcription
  misc_feature: MA Experiment 20000185 PARAMETER Experiment Name: At_Roots__P Parameter: Age (day) Value: 7 vs. 21
  misc_feature: MA Experiment 20000185 PARAMETER Experiment Name: At_Roots__P Parameter: Organism Value: A. thaliana
  misc_feature: MA Experiment 20000185 PARAMETER Experiment Name: At_Roots__P Parameter: Tissue Value: Roots vs. Whole Plant
  misc_feature: MA Experiment ID: 20000234 Result: Up-regulated in Transcription
  misc_feature: MA Experiment 20000234 PARAMETER Experiment Name: At_Siliques_P Parameter: Age (day) Value: 21
  misc_feature: MA Experiment 20000234 PARAMETER Experiment Name: At_Siliques_P Parameter: Organism Value: A. thaliana
  misc_feature: MA Experiment 20000234 PARAMETER Experiment Name: At_Siliques_P Parameter: Plant Line Value: WS
  misc_feature: MA Experiment 20000234 PARAMETER Experiment Name: At_Siliques_P Parameter: Tissue Value: Less Than 5mm Siliques vs. Whole Plant
  misc_feature: MA Experiment ID: 20000437 Result: Down-regulated in Transcription
  misc_feature: MA Experiment 20000437 PARAMETER Experiment Name: At_Drought_P Parameter: Age (day) Value: 8
  misc_feature: MA Experiment 20000437 PARAMETER Experiment Name: At_Drought_P Parameter: Organism Value: A. thaliana
  misc_feature: MA Experiment 20000437 PARAMETER Experiment Name: At_Drought_P Parameter: Plant Line Value: WS
  misc_feature: MA Experiment 20000437 PARAMETER Experiment Name: At_Drought_P Parameter: Timepoint (hr) Value: 24
  misc_feature: MA Experiment 20000437 PARAMETER Experiment Name: At_Drought_P Parameter: Tissue Value: Whole Plant
  misc_feature: MA Experiment 20000437 PARAMETER Experiment Name: At_Drought_P Parameter: Treatment Value: Drought vs. No Drought
  misc_feature: MA Experiment ID: 20000439 Result: Down-regulated in Transcription
  misc_feature: MA Experiment 20000439 PARAMETER Experiment Name: At_Roots__P Parameter: Age (day) Value: 14 vs. 21
  misc_feature: MA Experiment 20000439 PARAMETER Experiment Name: At_Roots__P Parameter: Organism Value: A. thaliana
  misc_feature: MA Experiment 20000439 PARAMETER Experiment Name: At_Roots__P Parameter: Tissue Value: Roots vs. Whole Plant
  misc_feature: MA Experiment ID: 20000794 Result: Down-regulated in Transcription
  misc_feature: MA Experiment 20000794 PARAMETER Experiment Name: At_Petals_P Parameter: Age (day) Value: 23-25 days
  misc_feature: MA Experiment 20000794 PARAMETER Experiment Name: At_Petals_P Parameter: Plant Line Value: WS
  misc_feature: MA Experiment 20000794 PARAMETER Experiment Name: At_Petals_P Parameter: Tissue Value: Petals vs. Whole plant
  misc_feature: MA Experiment ID: 20001757 Result: Up-regulated in Transcription
  misc_feature: MA Experiment 20001757 PARAMETER Experiment Name: At_50mM_NH4NO3_L-to-H_P Parameter: Timepoint (hr) Value: 6
  misc_feature: MA Experiment 20001757 PARAMETER Experiment Name: At_50mM_NH4NO3_L-to-H_P Parameter: Tissue Value: Leaf
  misc_feature: MA Experiment 20001757 PARAMETER Experiment Name: At_50mM_NH4NO3_L-to-H_P Parameter: Treatment Value: 50mM NH4NO3 vs 100mM Mannitol
  misc_feature: MA Experiment ID: 20001905 Result: Down-regulated in Transcription
  misc_feature: MA Experiment 20001905 PARAMETER Experiment Name: At_Drought_Reproduction_P Parameter: Age (day) Value: 40
  misc_feature: MA Experiment 20001905 PARAMETER Experiment Name: At_Drought_Reproduction_P Parameter: Organism Value: A. thaliana
  misc_feature: MA Experiment 20001905 PARAMETER Experiment Name: At_Drought_Reproduction_P Parameter: Plant Line Value: WS
  misc_feature: MA Experiment 20001905 PARAMETER Experiment Name: At_Drought_Reproduction_P Parameter: Timepoint (day) Value: 10
  misc_feature: MA Experiment 20001905 PARAMETER Experiment Name: At_Drought_Reproduction_P Parameter: Tissue Value: Rosettes
  misc_feature: MA Experiment 20001905 PARAMETER Experiment Name: At_Drought_Reproduction_P Parameter: Treatment Value: Drought vs. No Drought
  misc_feature: MA Experiment ID: 20001906 Result: Down-regulated in Transcription
  misc_feature: MA Experiment 20001906 PARAMETER Experiment Name: At_Drought_Reproduction_P Parameter: Age (day) Value: 35
  misc_feature: MA Experiment 20001906 PARAMETER Experiment Name: At_Drought_Reproduction_P Parameter: Organism Value: A. thaliana
  misc_feature: MA Experiment 20001906 PARAMETER Experiment Name: At_Drought_Reproduction_P Parameter: Plant Line Value: WS
  misc_feature: MA Experiment 20001906 PARAMETER Experiment Name: At_Drought_Reproduction_P Parameter: Timepoint (day) Value: 5
  misc_feature: MA Experiment 20001906 PARAMETER Experiment Name: At_Drought_Reproduction_P Parameter: Tissue Value: Siliques
  misc_feature: MA Experiment 20001906 PARAMETER Experiment Name: At_Drought_Reproduction_P Parameter: Treatment Value: Drought vs. No Drought
  misc_feature: MA Experiment ID: 20001908 Result: Down-regulated in Transcription
  misc_feature: MA Experiment 20001908 PARAMETER Experiment Name: At_Drought_Reproduction_P Parameter: Age (day) Value: 40
  misc_feature: MA Experiment 20001908 PARAMETER Experiment Name: At_Drought_Reproduction_P Parameter: Organism Value: A. thaliana
  misc_feature: MA Experiment 20001908 PARAMETER Experiment Name: At_Drought_Reproduction_P Parameter: Plant Line Value: WS
  misc_feature: MA Experiment 20001908 PARAMETER Experiment Name: At_Drought_Reproduction_P Parameter: Timepoint (day) Value: 10
  misc_feature: MA Experiment 20001908 PARAMETER Experiment Name: At_Drought_Reproduction_P Parameter: Tissue Value: Siliques
  misc_feature: MA Experiment 20001908 PARAMETER Experiment Name: At_Drought_Reproduction_P Parameter: Treatment Value: Drought vs. No Drought
  misc_feature: MA Experiment ID: 20001911 Result: Down-regulated in Transcription
  misc_feature: MA Experiment 20001911 PARAMETER Experiment Name: At_Drought_Reproduction_P Parameter: Age (day) Value: 40
  misc_feature: MA Experiment 20001911 PARAMETER Experiment Name: At_Drought_Reproduction_P Parameter: Organism Value: A. thaliana
  misc_feature: MA Experiment 20001911 PARAMETER Experiment Name: At_Drought_Reproduction_P Parameter: Plant Line Value: WS
  misc_feature: MA Experiment 20001911 PARAMETER Experiment Name: At_Drought_Reproduction_P Parameter: Timepoint (day) Value: 10
  misc_feature: MA Experiment 20001911 PARAMETER Experiment Name: At_Drought_Reproduction_P Parameter: Tissue Value: Flowers
  misc_feature: MA Experiment 20001911 PARAMETER Experiment Name: At_Drought_Reproduction_P Parameter: Treatment Value: Drought vs. No Drought
aacaacgaacgccgagagctctcacttcacactttatccacttggagcttcgacaatggcgtctccttcgcttctgcagtcttccgcttcttcgtttcacggacgtttctcaccattagcggctccatcctccgcacgaatgctctctccgccgctcagaaacgtggtgaaagtctcggcgtctggaactgtactggtcgagaaatctgaagccgagaaaactcaacgcctcaaaaccgcttacctcgagaggattatccctgcgctcaaagaagagttcaagtacgttaatattcaccaggttccaaaggtacagaagattgtagtgaattgtggtattggagatgcggcgcagaacgacaagggtttggaggctgcgatgaaggatatcgcgcttatcacagggcagaaacctattaagacacgagctagagcttccattgctactttcaagatcagggaagatcaacctcttgggattgctgtcactctcagaggagatgtaatgtactccttcttggatcgtcttatcaacttagcccttccgagaactcgagatttccaaggtgtgagtcccagtagctttgatgggaacggaaactacagtattggtgtgaaagaccaaggtgtattccctgaaatcaggtttgatgccgttggaaaaacgagaggaatggatgtatgcatcagcacaacggctaaaagcgatcaagaaggacagaaactattggctctaatgggaatgcctttcagggaaggaggtggtggcagcacaggcgcgatagtgcggaagaagaaactaaagtctcatcactttgatgctaaaggaaaaggaaagagatgatgaacatagctgcctattgtatgtatcgtcttctgtaaccaaccatttcatgtttcagaaaaaccatctccttttgtaatgctttatgagtcaatttgaaaataatatcagggatcttgttgttatggt

SEQ ID NO: 35393 - protein, 280 aa, Arabidopsis thaliana
  peptide (1)..(280): Ceres Seq. ID no. 12385645
  misc_feature (157)..(251): Pfam Name: ribosomal L5P family C-terminus Pfam Description: ribosomal L5P family C-terminus
  misc_feature (77)..(251): Homolog of NCBI NO: 23042780 NR Description: hypothetical protein [Trichodesmium erythraeum
  misc_feature (74)..(252): Homolog of NCBI NO: 23124116 NR Description: hypothetical protein [Nostoc punctiforme]
  misc_feature (74)..(252): Homolog of NCBI NO: 22297637 NR Description: 50S ribosomal protein L5 [Thermosynechococcus
  misc_feature (74)..(252): Homolog of NCBI NO: 17231695 NR Description: 50S ribosomal protein L5 [Nostoc sp. PCC 7120]
  misc_feature (75)..(252): Homolog of NCBI NO: 11466362 NR Description: ribosomal protein L5 [Mesostigma viride]
  misc_feature (74)..(251): Homolog of NCBI NO: 16329929 NR Description: 50S ribosomal protein L5 [Synechocystis sp. PCC
  misc_feature (74)..(251): Homolog of NCBI NO: 3123273 NR Description: 50S RIBOSOMAL PROTEIN L5
  misc_feature (39)..(280): Homolog of NCBI NO: 3777600 NR Description: 50S ribosomal protein L5 [Oryza sativa]
  misc_feature (72)..(280): Homolog of NCBI NO: 7582405 NR Description: plastid ribosomal protein PRPL5 [Spinacia
  misc_feature (19)..(280): Homolog of NCBI NO: 15234136 NR Description: putative L5 ribosomal protein
TTNAESSHFTLYPLGASTMASPSLLQSSASSFHGRFSPLAAPSSARMLSPPLRNVVKVSASGTVLVEKSEAEKTQRLKTAYLERIIPALKEEFKYVNIHQVPKVQKIVVNCGIGDAAQNDKGLEAAMKDIALITGQKPIKTRARASIATFKIREDQPLGIAVTLRGDVMYSFLDRLINLALPRTRDFQGVSPSSFDGNGNYSIGVKDQGVFPEIRFDAVGKTRGMDVCISTTAKSDQEGQKLLALMGMPFREGGGGSTGAIVRKKKLKSHHFDAKGKGKR

SEQ ID NO: 35394 - protein, 262 aa, Arabidopsis thaliana
  peptide (1)..(262): Ceres Seq. ID no. 12385646
  misc_feature (139)..(233): Pfam Name: ribosomal L5P family C-terminus Pfam Description: ribosomal L5P family C-terminus
  misc_feature (59)..(233): Homolog of NCBI NO: 23042780 NR Description: hypothetical protein [Trichodesmium erythraeum
  misc_feature (56)..(234): Homolog of NCBI NO: 23124116 NR Description: hypothetical protein [Nostoc punctiforme]
  misc_feature (56)..(234): Homolog of NCBI NO: 22297637 NR Description: 50S ribosomal protein L5 [Thermosynechococcus
  misc_feature (56)..(234): Homolog of NCBI NO: 17231695 NR Description: 50S ribosomal protein L5 [Nostoc sp. PCC 7120]
  misc_feature (57)..(234): Homolog of NCBI NO: 11466362 NR Description: ribosomal protein L5 [Mesostigma viride]
  misc_feature (56)..(233): Homolog of NCBI NO: 16329929 NR Description: 50S ribosomal protein L5 [Synechocystis sp. PCC
  misc_feature (56)..(233): Homolog of NCBI NO: 3123273 NR Description: 50S RIBOSOMAL PROTEIN L5
  misc_feature (21)..(262): Homolog of NCBI NO: 3777600 NR Description: 50S ribosomal protein L5 [Oryza sativa]
  misc_feature (54)..(262): Homolog of NCBI NO: 7582405 NR Description: plastid ribosomal protein PRPL5 [Spinacia
  misc_feature (1)..(262): Homolog of NCBI NO: 15234136 NR Description: putative L5 ribosomal protein
MASPSLLQSSASSFHGRFSPLAAPSSARMLSPPLRNVVKVSASGTVLVEKSEAEKTQRLKTAYLERIIPALKEEFKYVNIHQVPKVQKIVVNCGIGDAAQNDKGLEAAMKDIALITGQKPIKTRARASIATFKIREDQPLGIAVTLRGDVMYSFLDRLINLALPRTRDFQGVSPSSFDGNGNYSIGVKDQGVFPEIRFDAVGKTRGMDVCISTTAKSDQEGQKLLALMGMPFREGGGGSTGAIVRKKKLKSHHFDAKGKGKR

SEQ ID NO: 35395 - protein, 234 aa, Arabidopsis thaliana
  peptide (1)..(234): Ceres Seq. ID no. 12385647
  misc_feature (111)..(205): Pfam Name: ribosomal L5P family C-terminus Pfam Description: ribosomal L5P family C-terminus
  misc_feature (31)..(205): Homolog of NCBI NO: 23042780 NR Description: hypothetical protein [Trichodesmium erythraeum
  misc_feature (28)..(206): Homolog of NCBI NO: 23124116 NR Description: hypothetical protein [Nostoc punctiforme]
  misc_feature (28)..(206): Homolog of NCBI NO: 22297637 NR Description: 50S ribosomal protein L5 [Thermosynechococcus
  misc_feature (28)..(206): Homolog of NCBI NO: 17231695 NR Description: 50S ribosomal protein L5 [Nostoc sp. PCC 7120]
  misc_feature (29)..(206): Homolog of NCBI NO: 11466362 NR Description: ribosomal protein L5 [Mesostigma viride]
  misc_feature (28)..(205): Homolog of NCBI NO: 16329929 NR Description: 50S ribosomal protein L5 [Synechocystis sp. PCC
  misc_feature (28)..(205): Homolog of NCBI NO: 3123273 NR Description: 50S RIBOSOMAL PROTEIN L5
  misc_feature (1)..(234): Homolog of NCBI NO: 3777600 NR Description: 50S ribosomal protein L5 [Oryza sativa]
  misc_feature (26)..(234): Homolog of NCBI NO: 7582405 NR Description: plastid ribosomal protein PRPL5 [Spinacia
  misc_feature (1)..(234): Homolog of NCBI NO: 15234136 NR Description: putative L5 ribosomal protein
MLSPPLRNVVKVSASGTVLVEKSEAEKTQRLKTAYLERIIPALKEEFKYVNIHQVPKVQKIVVNCGIGDAAQNDKGLEAAMKDIALITGQKPIKTRARASIATFKIREDQPLGIAVTLRGDVMYSFLDRLINLALPRTRDFQGVSPSSFDGNGNYSIGVKDQGVFPEIRFDAVGKTRGMDVCISTTAKSDQEGQKLLALMGMPFREGGGGSTGAIVRKKKLKSHHFDAKGKGKR

SEQ ID NO: 35396 - DNA, 1944 bp, Arabidopsis thaliana; identical to SEQ ID NO: 24461
  misc_feature (1)..(1944): Ceres Seq. ID no. 12336460
  misc_feature: MA Experiment ID: 108462 Result: Down-regulated in Transcription
  misc_feature: MA Experiment 108462 PARAMETER Experiment Name: At_Germinating_Seeds_cDNA_P Parameter: Age (day) Value: 2 vs. 0
  misc_feature: MA Experiment 108462 PARAMETER Experiment Name: At_Germinating_Seeds_cDNA_P Parameter: Tissue Value: Germinating Seeds
  misc_feature: MA Experiment ID: 108463 Result: Down-regulated in Transcription
  misc_feature: MA Experiment 108463 PARAMETER Experiment Name: At_Germinating_Seeds_cDNA_P Parameter: Age (day) Value: 3 vs. 0
  misc_feature: MA Experiment 108463 PARAMETER Experiment Name: At_Germinating_Seeds_cDNA_P Parameter: Tissue Value: Germinating Seeds
  misc_feature: MA Experiment ID: 108488 Result: Up-regulated in Transcription
  misc_feature: MA Experiment ID: 108489 Result: Up-regulated in Transcription
  misc_feature: MA Experiment ID: 108501 Result: Up-regulated in Transcription
  misc_feature: MA Experiment 108501 PARAMETER Experiment Name: At_ap2_floral_buds_cDNA_P Parameter: Plant Line Value: ap2 (Ler.)
  misc_feature: MA Experiment 108501 PARAMETER Experiment Name: At_ap2_floral_buds_cDNA_P Parameter: Tissue Value: Closed Flower
  misc_feature: MA Experiment ID: 108607 Result: Down-regulated in Transcription
  misc_feature: MA Experiment 108607 PARAMETER Experiment Name: At_100uM_ABA_cDNA_P Parameter: Timepoint (hr) Value: 4
  misc_feature: MA Experiment 108607 PARAMETER Experiment Name: At_100uM_ABA_cDNA_P Parameter: Tissue Value: Aerial
  misc_feature: MA Experiment 108607 PARAMETER Experiment Name: At_100uM_ABA_cDNA_P Parameter: Treatment Value: 100uM ABA vs. No Treatment
  misc_feature: MA Experiment ID: 20000089 Result: Up-regulated in Transcription
  misc_feature: MA Experiment ID: 20000090 Result: Up-regulated in Transcription
  misc_feature: MA Experiment ID: 20000173 Result: Down-regulated in Transcription
  misc_feature: MA Experiment 20000173 PARAMETER Experiment Name: At_42deg_Heat_P Parameter: Age (day) Value: 14
  misc_feature: MA Experiment 20000173 PARAMETER Experiment Name: At_42deg_Heat_P Parameter: Organism Value: A. thaliana
  misc_feature: MA Experiment 20000173 PARAMETER Experiment Name: At_42deg_Heat_P Parameter: Plant Line Value: WS
  misc_feature: MA Experiment 20000173 PARAMETER Experiment Name: At_42deg_Heat_P Parameter: Temperature (deg C) Value: 42 vs. 22
  misc_feature: MA Experiment 20000173 PARAMETER Experiment Name: At_42deg_Heat_P Parameter: Timepoint (hr) Value: 6
  misc_feature: MA Experiment 20000173 PARAMETER Experiment Name: At_42deg_Heat_P Parameter: Tissue Value: Aerial
  misc_feature: MA Experiment ID: 20000179 Result: Down-regulated in Transcription
  misc_feature: MA Experiment 20000179 PARAMETER Experiment Name: At_Germinating_Seeds_P Parameter: Age (hr) Value: 6 vs. 0
  misc_feature: MA Experiment 20000179 PARAMETER Experiment Name: At_Germinating_Seeds_P Parameter: Tissue Value: Germinating Seeds
  misc_feature: MA Experiment ID: 20000180 Result: Down-regulated in Transcription
  misc_feature: MA Experiment 20000180 PARAMETER Experiment Name: At_Germinating_Seeds_P Parameter: Age (hr) Value: 24 vs. 0
  misc_feature: MA Experiment 20000180 PARAMETER Experiment Name: At_Germinating_Seeds_P Parameter: Tissue Value: Germinating Seeds
  misc_feature: MA Experiment ID: 20000214 Result: Up-regulated in Transcription
  misc_feature: MA Experiment 20000214 PARAMETER Experiment Name: At_4deg_Cold_P Parameter: Timepoint (hr) Value: 6
  misc_feature: MA Experiment ID: 20001247 Result: Down-regulated in Transcription
  misc_feature: MA Experiment 20001247 PARAMETER Experiment Name: At_Far-red-induction_P Parameter: Age (day) Value: 7
  misc_feature: MA Experiment 20001247 PARAMETER Experiment Name: At_Far-red-induction_P Parameter: Light Value: Far-red vs. White
  misc_feature: MA Experiment 20001247 PARAMETER Experiment Name: At_Far-red-induction_P Parameter: Organism Value: A. thaliana
  misc_feature: MA Experiment 20001247 PARAMETER Experiment Name: At_Far-red-induction_P Parameter: Plant Line Value: Columbia
  misc_feature: MA Experiment 20001247 PARAMETER Experiment Name: At_Far-red-induction_P Parameter: Timepoint (hr) Value: 1
  misc_feature: MA Experiment 20001247 PARAMETER Experiment Name: At_Far-red-induction_P Parameter: Tissue Value: Whole Plant
  misc_feature: MA Experiment ID: 20001248 Result: Up-regulated in Transcription
  misc_feature: MA Experiment 20001248 PARAMETER Experiment Name: At_Far-red-induction_P Parameter: Age (day) Value: 7
  misc_feature: MA Experiment 20001248 PARAMETER Experiment Name: At_Far-red-induction_P Parameter: Light Value: Far-red vs. White
  misc_feature: MA Experiment 20001248 PARAMETER Experiment Name: At_Far-red-induction_P Parameter: Organism Value: A. thaliana
  misc_feature: MA Experiment 20001248 PARAMETER Experiment Name: At_Far-red-induction_P Parameter: Plant Line Value: Columbia
  misc_feature: MA Experiment 20001248 PARAMETER Experiment Name: At_Far-red-induction_P Parameter: Timepoint (hr) Value: 4
  misc_feature: MA Experiment 20001248 PARAMETER Experiment Name: At_Far-red-induction_P Parameter: Tissue Value: Whole Plant
  misc_feature: MA Experiment ID: 20001458 Result: Up-regulated in Transcription
  misc_feature: MA Experiment 20001458 PARAMETER Experiment Name: At_50mM_NH4NO3_L-to-H_P Parameter: Age (day) Value: Undefined
  misc_feature: MA Experiment 20001458 PARAMETER Experiment Name: At_50mM_NH4NO3_L-to-H_P Parameter: Organism Value: Undefined
  misc_feature: MA Experiment 20001458 PARAMETER Experiment Name: At_50mM_NH4NO3_L-to-H_P Parameter: Plant Line Value: Undefined
  misc_feature: MA Experiment 20001458 PARAMETER Experiment Name: At_50mM_NH4NO3_L-to-H_P Parameter: Timepoint (hr) Value: 2
  misc_feature: MA Experiment 20001458 PARAMETER Experiment Name: At_50mM_NH4NO3_L-to-H_P Parameter: Tissue Value: Siliques
  misc_feature: MA Experiment 20001458 PARAMETER Experiment Name: At_50mM_NH4NO3_L-to-H_P Parameter: Treatment Value: 50mM NH4NO3 vs. 100mM Manitol
  misc_feature: MA Experiment ID: 20001557 Result: Up-regulated in Transcription
  misc_feature: MA Experiment 20001557 PARAMETER Experiment Name: At_Drought_Soil_Dry_P Parameter: Age (day) Value: 27
  misc_feature: MA Experiment 20001557 PARAMETER Experiment Name: At_Drought_Soil_Dry_P Parameter: Organism Value: A. thaliana
  misc_feature: MA Experiment 20001557 PARAMETER Experiment Name: At_Drought_Soil_Dry_P Parameter: Plant Line Value: WS
  misc_feature: MA Experiment 20001557 PARAMETER Experiment Name: At_Drought_Soil_Dry_P Parameter: Post Timepoint (hr) Value: 3
  misc_feature: MA Experiment 20001557 PARAMETER Experiment Name: At_Drought_Soil_Dry_P Parameter: Post-Treatment Value: Re-Water vs. No Drought
  misc_feature: MA Experiment 20001557 PARAMETER Experiment Name: At_Drought_Soil_Dry_P Parameter: Timepoint (day) Value: 13
  misc_feature: MA Experiment 20001557 PARAMETER Experiment Name: At_Drought_Soil_Dry_P Parameter: Treatment Value: Drought vs. No Drought
  misc_feature: MA Experiment ID: 20001558 Result: Up-regulated in Transcription
  misc_feature: MA Experiment 20001558 PARAMETER Experiment Name: At_Drought_Soil_Dry_P Parameter: Age (day) Value: 27
  misc_feature: MA Experiment 20001558 PARAMETER Experiment Name: At_Drought_Soil_Dry_P Parameter: Organism Value: A. thaliana
  misc_feature: MA Experiment 20001558 PARAMETER Experiment Name: At_Drought_Soil_Dry_P Parameter: Plant Line Value: WS
  misc_feature: MA Experiment 20001558 PARAMETER Experiment Name: At_Drought_Soil_Dry_P Parameter: Post Timepoint (hr) Value: 6
  misc_feature: MA Experiment 20001558 PARAMETER Experiment Name: At_Drought_Soil_Dry_P Parameter: Post-Treatment Value: Re-Water vs. No Drought
  misc_feature: MA Experiment 20001558 PARAMETER Experiment Name: At_Drought_Soil_Dry_P Parameter: Timepoint (day) Value: 13
  misc_feature: MA Experiment 20001558 PARAMETER Experiment Name: At_Drought_Soil_Dry_P Parameter: Treatment Value: Drought vs. No Drought
  misc_feature: MA Experiment ID: 20001559 Result: Up-regulated in Transcription
  misc_feature: MA Experiment 20001559 PARAMETER Experiment Name: At_Drought_Soil_Dry_P Parameter: Age (day) Value: 28
  misc_feature: MA Experiment 20001559 PARAMETER Experiment Name: At_Drought_Soil_Dry_P Parameter: Organism Value: A. thaliana
  misc_feature: MA Experiment 20001559 PARAMETER Experiment Name: At_Drought_Soil_Dry_P Parameter: Plant Line Value: WS
  misc_feature: MA Experiment 20001559 PARAMETER Experiment Name: At_Drought_Soil_Dry_P Parameter: Post Timepoint (hr) Value: 29
  misc_feature: MA Experiment 20001559 PARAMETER Experiment Name: At_Drought_Soil_Dry_P Parameter: Post-Treatment Value: Re-Water vs. No Drought
  misc_feature: MA Experiment 20001559 PARAMETER Experiment Name: At_Drought_Soil_Dry_P Parameter: Timepoint (day) Value: 14
  misc_feature: MA Experiment 20001559 PARAMETER Experiment Name: At_Drought_Soil_Dry_P Parameter: Treatment Value: Drought vs. No Drought
  misc_feature: MA Experiment ID: 20001560 Result: Up-regulated in Transcription
  misc_feature: MA Experiment 20001560 PARAMETER Experiment Name: At_Drought_Soil_Dry_P Parameter: Age (day) Value: 28
  misc_feature: MA Experiment 20001560 PARAMETER Experiment Name: At_Drought_Soil_Dry_P Parameter: Organism Value: A. thaliana
  misc_feature: MA Experiment 20001560 PARAMETER Experiment Name: At_Drought_Soil_Dry_P Parameter: Plant Line Value: WS
  misc_feature: MA Experiment 20001560 PARAMETER Experiment Name: At_Drought_Soil_Dry_P Parameter: Post Timepoint (hr) Value: None
  misc_feature: MA Experiment 20001560 PARAMETER Experiment Name: At_Drought_Soil_Dry_P Parameter: Post-Treatment Value: None
  misc_feature: MA Experiment 20001560 PARAMETER Experiment Name: At_Drought_Soil_Dry_P Parameter: Timepoint (day) Value: 14
  misc_feature: MA Experiment 20001560 PARAMETER Experiment Name: At_Drought_Soil_Dry_P Parameter: Treatment Value: Drought vs. No Drought

SEQ ID NO: 35397 - protein, 556 aa, Arabidopsis thaliana; identical to SEQ ID NO: 24462
  peptide (1)..(556): Ceres Seq. ID no. 12336461
  misc_feature (402)..(475): Pfam Name: RNA recognition motif. (a.k.a. RRM, RBD, or RNP domain) Pfam Description: RNA recognition motif. (a.k.a. RRM, RBD, or RNP
  misc_feature (402)..(475): Pfam Name: RNA recognition motif. (a.k.a. RRM, RBD, or RNP domain) Pfam Description: RNA recognition motif. (a.k.a. RRM, RBD, or RNP
  misc_feature (14)..(553): Homolog of NCBI NO: 40741753 NR Description: hypothetical protein AN4865.2 [Aspergillus
  misc_feature (5)..(556): Homolog of NCBI NO: 7440063 NR Description: nucleolin homolog nuM1 - alfalfa
  misc_feature (1)..(556): Homolog of NCBI NO: 38344339 NR Description: OSJNBa0058K23.21 [Oryza sativa (japonica
  misc_feature (389)..(548): Homolog of NCBI NO: 7770338 NR Description: F27J15.29 [Arabidopsis thaliana]
  misc_feature (1)..(556): Homolog of NCBI NO: 7440062 NR Description: nucleolin homolog - garden pea
  misc_feature (14)..(553): Homolog of NCBI NO: 40741753 NR Description: hypothetical protein AN4865.2 [Aspergillus
  misc_feature (1)..(556): Homolog of NCBI NO: 38344339 NR Description: OSJNBa0058K23.21 [Oryza sativa (japonica
  misc_feature (1)..(556): Homolog of NCBI NO: 7440062 NR Description: nucleolin homolog - garden pea
  misc_feature (1)..(556): Homolog of NCBI NO: 15222009 NR Description: nucleolin, putative; protein id: At1g48920.1
  misc_feature (4)..(556): Homolog of NCBI NO: 9294322 NR Description: contains similarity to nucleolin, protein
  misc_feature (4)..(556): Homolog of NCBI NO: 15229678 NR Description: nucleolin, putative; protein id: At3g18610.1
  misc_feature (1)..(556): Homolog of NCBI NO: 21700195 NR Description: tobacco nucleolin [Nicotiana tabacum]
  misc_feature (3)..(556): Homolog of NCBI NO: 40253662 NR Description: putative nucleolin [Oryza sativa (japonica
  misc_feature (389)..(548): Homolog of NCBI NO: 7770338 NR Description: F27J15.29 [Arabidopsis thaliana]
  misc_feature (5)..(556): Homolog of NCBI NO: 7440063 NR Description: nucleolin homolog nuM1 - alfalfa
  misc_feature (3)..(556): Homolog of NCBI NO: 40253662 NR Description: putative nucleolin [Oryza sativa (japonica
  misc_feature (1)..(556): Homolog of NCBI NO: 21700195 NR Description: tobacco nucleolin [Nicotiana tabacum]
  misc_feature (4)..(556): Homolog of NCBI NO: 15229678 NR Description: nucleolin, putative; protein id: At3g18610.1
  misc_feature (4)..(556): Homolog of NCBI NO: 9294322 NR Description: contains similarity to nucleolin, protein
  misc_feature (1)..(556): Homolog of NCBI NO: 15222009 NR Description: nucleolin, putative; protein id: At1g48920.1

SEQ ID NO: 35398 - protein, 284 aa, Arabidopsis thaliana; identical to SEQ ID NO: 24463
  peptide (1)..(284): Ceres Seq. ID no. 12336462
  misc_feature (130)..(203): Pfam Name: RNA recognition motif. (a.k.a. RRM, RBD, or RNP domain) Pfam Description: RNA recognition motif. (a.k.a. RRM, RBD, or RNP
  misc_feature (130)..(203): Pfam Name: RNA recognition motif. (a.k.a. RRM, RBD, or RNP domain) Pfam Description: RNA recognition motif. (a.k.a. RRM, RBD, or RNP
  misc_feature (1)..(281): Homolog of NCBI NO: 40741753 NR Description: hypothetical protein AN4865.2 [Aspergillus
  misc_feature (1)..(284): Homolog of NCBI NO: 7440063 NR Description: nucleolin homolog nuM1 - alfalfa
  misc_feature (1)..(284): Homolog of NCBI NO: 38344339 NR Description: OSJNBa0058K23.21 [Oryza sativa (japonica
  misc_feature (117)..(276): Homolog of NCBI NO: 7770338 NR Description: F27J15.29 [Arabidopsis thaliana]
  misc_feature (1)..(284): Homolog of NCBI NO: 7440062 NR Description: nucleolin homolog - garden pea
  misc_feature (1)..(281): Homolog of NCBI NO: 40741753 NR Description: hypothetical protein AN4865.2 [Aspergillus
  misc_feature (1)..(284): Homolog of NCBI NO: 38344339 NR Description: OSJNBa0058K23.21 [Oryza sativa (japonica
  misc_feature (1)..(284): Homolog of NCBI NO: 7440062 NR Description: nucleolin homolog - garden pea
  misc_feature (1)..(284): Homolog of NCBI NO: 15222009 NR Description: nucleolin, putative; protein id: At1g48920.1
  misc_feature (1)..(284): Homolog of NCBI NO: 9294322 NR Description: contains similarity to nucleolin, protein
  misc_feature (1)..(284): Homolog of NCBI NO: 15229678 NR Description: nucleolin, putative; protein id: At3g18610.1
  misc_feature (1)..(284): Homolog of NCBI NO: 21700195 NR Description: tobacco nucleolin [Nicotiana tabacum]
  misc_feature (1)..(284): Homolog of NCBI NO: 40253662 NR Description: putative nucleolin [Oryza sativa (japonica
  misc_feature (117)..(276): Homolog of NCBI NO: 7770338 NR Description: F27J15.29 [Arabidopsis thaliana]
  misc_feature (1)..(284): Homolog of NCBI NO: 7440063 NR Description: nucleolin homolog nuM1 - alfalfa
  misc_feature (1)..(284): Homolog of NCBI NO: 40253662 NR Description: putative nucleolin [Oryza sativa (japonica
  misc_feature (1)..(284): Homolog of NCBI NO: 21700195 NR Description: tobacco nucleolin [Nicotiana tabacum]
  misc_feature (1)..(284): Homolog of NCBI NO: 15229678 NR Description: nucleolin, putative; protein id: At3g18610.1
  misc_feature (1)..(284): Homolog of NCBI NO: 9294322 NR Description: contains similarity to nucleolin, protein
  misc_feature (1)..(284): Homolog of NCBI NO: 15222009 NR Description: nucleolin, putative; protein id: At1g48920.1

SEQ ID NO: 35399 - DNA, 2127 bp, Arabidopsis thaliana
  misc_feature (1)..(2127): Ceres Seq. ID no. 13576329
  misc_feature: MA Experiment ID: 108434 Result: Up-regulated in Transcription
  misc_feature: MA Experiment 108434 PARAMETER Experiment Name: At_Root_Tips_cDNA_P Parameter: Tissue Value: Root Tips
attattaagacctttaaaaaaaaatgatgggaagcatattattgttactattattcttttctctggtccaatcacgttcagacacgtcatattcaaaaattcaacttcccggcgattctctgaccctctccgttaccgatttcggtgctaccggcgatggtatcaactacgatacttctgcgattcagtcaaccattgacgcctgcaatcgtcactacacatctttttcttccatctgccgcgtcgttttcccttccggcaactatttgaccgctaagctccatctccgatctggcgtcattctcgatgtgacggagaacgccgtgcttctcggtggaccgagaatcgaggattattatccggcggagacttcgtcggattggtacgtggtggtggcgaataacgctacggatgttggaatcactggcggaggagcgattgatggccaaggatcgaagttcgtggtcagattcgacgagaagaagaacgtgatggtgagctggaaccaaaccggagcttgcttgggtgatgagtgtagacccaggcttgttggattcgttgattctataaacgttgagatctggaacatcacactacgagagcctgcgtattggtgtttgcacattgtgagatgtgagaacacatcagtccatgatgtatcgatccttggggacttcaatactccaaataacgatggaatcgacattgaagattccaacaacactgttataactcggtgtcatatcgatactggagatgatgcaatctgtcccaagacttacactggtccactttacaacttaaccgctacagactgttggatccggaccaaatcctcagccattaaactcggtagtgcgagctggtttgatttcaaaggtcttgtctttgataacatcactatttttgaatctcacagaggacttggcatgcaaatacgcgatggaggaaatgtgagtgacgttacattttcaaacataaacattagtacaagatactacgatccttcttggtggggaagagcagaaccaatctatataacaacttgccctcgtgactcatctgcaaaggaaggctcaatctcgaatctcctattcgtaaacataacaatcgattccgaaaacggagtctttttatcaggttcaccaaacggactactctcagatataaagttcaagaacatgaaccttactttcagaagatggagtaattacagtgcagggcttgtggactatagacctggatgtcaaggtctagtgaaccatagagccacgtctggaatcattatggagcatgtgaacgggtttcgcgttgagaatgttgacctgaaatggtcagatgatgatgatgtgaatgctgcttggaatgttcctctcgaatttagaccttccactgtgaataatgtctcgtttgttggtttcacttctggtctttacacgaaattgtttgagtctgattacgttatgagtttatttacgtctaatcatcaatatatcactgagagtgaaatcggaatcacaaaaatggcgtcgacgaagccattgattgtcgcagcgaagacgctccgaaaccggatccacttccgatctggatccacatctactggtccaagccggtgggcgacaccgggtcacgaagaacgacccaaaggatatttcatgaaccggactccgccgcctccaggacagtcgcgcaagtgggaagattgggagcttccatgttacatcacaagcttcctcacgattgtaatcctcggagtgggtctcaatgccaaacctgatctttcaatcgagacctgggctcaccagaaagctcttgagcgcctcgagatggagaagcttgcatctgccggagattcatctggttaatcccaaaacttgggagatatgattcaatggttgatctggtatgtatgtgttttgtttgtttttccggggatttgaggagattttcccatttatgatgatgatcacgaatactagtgacctagggtttcgttttgttcctcctctcctcttcgttagtgtcgataaatatgttcatgaaataagcgatctttaactcttgacgatggttttatgtaactcaccttaatttttgatcatgtttcaaagctctcttgcctcc

SEQ ID NO: 35400 - protein, 614 aa, Arabidopsis thaliana
  peptide (1)..(614): Ceres Seq. ID no. 13576330
  misc_feature (69)..(417): Pfam Name: Glycosyl hydrolases family 28 Pfam Description: Glycosyl hydrolases family 28
  misc_feature (69)..(417): Pfam Name: Glycosyl hydrolases family 28 Pfam Description: Glycosyl hydrolases family 28
  misc_feature (35)..(319): Homolog of NCBI NO: 15238207 NR Description: polygalacturonase, putative [Arabidopsis
  misc_feature (45)..(389): Homolog of NCBI NO: 36958630 NR Description: possible polygalacturonase [Rhizobium sp. NGR234]
  misc_feature (501)..(604): Homolog of NCBI NO: 9858777 NR Description: BAC19.9 [Lycopersicon esculentum]
  misc_feature (39)..(406): Homolog of NCBI NO: 17938249 NR Description: polygalacturonase
  misc_feature (39)..(406): Homolog of NCBI NO: 15890426 NR Description: AGR_L_619p [Agrobacterium tumefaciens]
  misc_feature (35)..(319): Homolog of NCBI NO: 15238207 NR Description: polygalacturonase, putative [Arabidopsis
  misc_feature (501)..(604): Homolog of NCBI NO: 9858777 NR Description: BAC19.9 [Lycopersicon esculentum]
  misc_feature (39)..(406): Homolog of NCBI NO: 15890426 NR Description: AGR_L_619p [Agrobacterium tumefaciens]
  misc_feature (1)..(481): Homolog of NCBI NO: 18410809 NR Description: polygalacturonase, putative [Arabidopsis thaliana]
  misc_feature (1)..(309): Homolog of NCBI NO: 17473561 NR Description: putative protein [Arabidopsis thaliana]
  misc_feature (2)..(193): Homolog of NCBI NO: 24417492 NR Description: unknown [Arabidopsis thaliana]
  misc_feature (501)..(614): Homolog of NCBI NO: 18410807 NR Description: expressed protein [Arabidopsis thaliana]
  misc_feature (501)..(613): Homolog of NCBI NO: 15227917 NR Description: expressed protein [Arabidopsis thaliana]
  misc_feature (39)..(406): Homolog of NCBI NO: 17938249 NR Description: polygalacturonase
  misc_feature (45)..(389): Homolog of NCBI NO: 36958630 NR Description: possible polygalacturonase [Rhizobium sp. NGR234]
  misc_feature (501)..(613): Homolog of NCBI NO: 15227917 NR Description: expressed protein [Arabidopsis thaliana]
  misc_feature (501)..(614): Homolog of NCBI NO: 18410807 NR Description: expressed protein [Arabidopsis thaliana]
  misc_feature (2)..(193): Homolog of NCBI NO: 24417492 NR Description: unknown [Arabidopsis thaliana]
  misc_feature (1)..(309): Homolog of NCBI NO: 17473561 NR Description: putative protein [Arabidopsis thaliana]
  misc_feature (1)..(481): Homolog of NCBI NO: 18410809 NR Description: polygalacturonase, putative [Arabidopsis thaliana]
MMGSILLLLLFFSLVQSRSDTSYSKIQLPGDSLTLSVTDFGATGDGINYDTSAIQSTIDACNRHYTSFSSICRVVFPSGNYLTAKLHLRSGVILDVTENAVLLGGPRIEDYYPAETSSDWYVVVANNATDVGITGGGAIDGQGSKFVVRFDEKKNVMVSWNQTGACLGDECRPRLVGFVDSINVEIWNITLREPAYWCLHIVRCENTSVHDVSILGDFNTPNNDGIDIEDSNNTVITRCHIDTGDDAICPKTYTGPLYNLTATDCWIRTKSSAIKLGSASWFDFKGLVFDNITIFESHRGLGMQIRDGGNVSDVTFSNINISTRYYDPSWWGRAEPIYITTCPRDSSAKEGSISNLLFVNITIDSENGVFLSGSPNGLLSDIKFKNMNLTFRRWSNYSAGLVDYRPGCQGLVNHRATSGIIMEHVNGFRVENVDLKWSDDDDVNAAWNVPLEFRPSTVNNVSFVGFTSGLYTKLFESDYVMSLFTSNHQYITESEIGITKMASTKPLIVAAKTLRNRIHFRSGSTSTGPSRWATPGHEERPKGYFMNRTPPPPGQSRKWEDWELPCYITSFLTIVILGVGLNAKPDLSIETWAHQKALERLEMEKLASAGDSSG

SEQ ID NO: 35401 - protein, 613 aa, Arabidopsis thaliana
  peptide (1)..(613): Ceres Seq. ID no. 13576331
  misc_feature (68)..(416): Pfam Name: Glycosyl hydrolases family 28 Pfam Description: Glycosyl hydrolases family 28
  misc_feature (68)..(416): Pfam Name: Glycosyl hydrolases family 28 Pfam Description: Glycosyl hydrolases family 28
  misc_feature (34)..(318): Homolog of NCBI NO: 15238207 NR Description: polygalacturonase, putative [Arabidopsis
  misc_feature (44)..(388): Homolog of NCBI NO: 36958630 NR Description: possible polygalacturonase [Rhizobium sp. NGR234]
  misc_feature (500)..(603): Homolog of NCBI NO: 9858777 NR Description: BAC19.9 [Lycopersicon esculentum]
  misc_feature (38)..(405): Homolog of NCBI NO: 17938249 NR Description: polygalacturonase
  misc_feature (38)..(405): Homolog of NCBI NO: 15890426 NR Description: AGR_L_619p [Agrobacterium tumefaciens]
  misc_feature (34)..(318): Homolog of NCBI NO: 15238207 NR Description: polygalacturonase, putative [Arabidopsis
  misc_feature (500)..(603): Homolog of NCBI NO: 9858777 NR Description: BAC19.9 [Lycopersicon esculentum]
  misc_feature (38)..(405): Homolog of NCBI NO: 15890426 NR Description: AGR_L_619p [Agrobacterium tumefaciens]
  misc_feature (1)..(480): Homolog of NCBI NO: 18410809 NR Description: polygalacturonase, putative [Arabidopsis thaliana]
  misc_feature (1)..(308): Homolog of NCBI NO: 17473561 NR Description: putative protein [Arabidopsis thaliana]
  misc_feature (1)..(192): Homolog of NCBI NO: 24417492 NR Description: unknown [Arabidopsis thaliana]
  misc_feature (500)..(613): Homolog of NCBI NO: 18410807 NR Description: expressed protein [Arabidopsis thaliana]
  misc_feature (500)..(612): Homolog of NCBI NO: 15227917 NR Description: expressed protein [Arabidopsis thaliana]
  misc_feature (38)..(405): Homolog of NCBI NO: 17938249 NR Description: polygalacturonase
  misc_feature (44)..(388): Homolog of NCBI NO: 36958630 NR Description: possible polygalacturonase [Rhizobium sp. NGR234]
  misc_feature (500)..(612): Homolog of NCBI NO: 15227917 NR Description: expressed protein [Arabidopsis thaliana]
  misc_feature (500)..(613): Homolog of NCBI NO: 18410807 NR Description: expressed protein [Arabidopsis thaliana]
  misc_feature (1)..(192): Homolog of NCBI NO: 24417492 NR Description: unknown [Arabidopsis thaliana]
  misc_feature (1)..(308): Homolog of NCBI NO: 17473561 NR Description: putative protein [Arabidopsis thaliana]
  misc_feature (1)..(480): Homolog of NCBI NO: 18410809 NR Description: polygalacturonase, putative [Arabidopsis thaliana]
MGSILLLLLFFSLVQSRSDTSYSKIQLPGDSLTLSVTDFGATGDGINYDTSAIQSTIDACNRHYTSFSSICRVVFPSGNYLTAKLHLRSGVILDVTENAVLLGGPRIEDYYPAETSSDWYVVVANNATDVGITGGGAIDGQGSKFVVRFDEKKNVMVSWNQTGACLGDECRPRLVGFVDSINVEIWNITLREPAYWCLHIVRCENTSVHDVSILGDFNTPNNDGIDIEDSNNTVITRCHIDTGDDAICPKTYTGPLYNLTATDCWIRTKSSAIKLGSASWFDFKGLVFDNITIFESHRGLGMQIRDGGNVSDVTFSNINISTRYYDPSWWGRAEPIYITTCPRDSSAKEGSISNLLFVNITIDSENGVFLSGSPNGLLSDIKFKNMNLTFRRWSNYSAGLVDYRPGCQGLVNHRATSGIIMEHVNGFRVENVDLKWSDDDDVNAAWNVPLEFRPSTVNNVSFVGFTSGLYTKLFESDYVMSLFTSNHQYITESEIGITKMASTKPLIVAAKTLRNRIHFRSGSTSTGPSRWATPGHEERPKGYFMNRTPPPPGQSRKWEDWELPCYITSFLTIVILGVGLNAKPDLSIETWAHQKALERLEMEKLASAGDSSG

SEQ ID NO: 35402 - protein, 458 aa, Arabidopsis thaliana
  peptide (1)..(458): Ceres Seq. ID no. 13576332
  misc_feature (1)..(261): Pfam Name: Glycosyl hydrolases family 28 Pfam Description: Glycosyl hydrolases family 28
  misc_feature (1)..(261): Pfam Name: Glycosyl hydrolases family 28 Pfam Description: Glycosyl hydrolases family 28
  misc_feature (1)..(163): Homolog of NCBI NO: 15238207 NR Description: polygalacturonase, putative [Arabidopsis
  misc_feature (1)..(233): Homolog of NCBI NO: 36958630 NR Description: possible polygalacturonase [Rhizobium sp. NGR234]
  misc_feature (345)..(448): Homolog of NCBI NO: 9858777 NR Description: BAC19.9 [Lycopersicon esculentum]
  misc_feature (1)..(250): Homolog of NCBI NO: 17938249 NR Description: polygalacturonase
  misc_feature (1)..(250): Homolog of NCBI NO: 15890426 NR Description: AGR_L_619p [Agrobacterium tumefaciens]
  misc_feature (1)..(163): Homolog of NCBI NO: 15238207 NR Description: polygalacturonase, putative [Arabidopsis
  misc_feature (345)..(448): Homolog of NCBI NO: 9858777 NR Description: BAC19.9 [Lycopersicon esculentum]
  misc_feature (1)..(250): Homolog of NCBI NO: 15890426 NR Description: AGR_L_619p [Agrobacterium tumefaciens]
  misc_feature (1)..(325): Homolog of NCBI NO: 18410809 NR Description: polygalacturonase, putative [Arabidopsis thaliana]
  misc_feature (1)..(153): Homolog of NCBI NO: 17473561 NR Description: putative protein [Arabidopsis thaliana]
  misc_feature (1)..(37): Homolog of NCBI NO: 24417492 NR Description: unknown [Arabidopsis thaliana]
  misc_feature (345)..(458): Homolog of NCBI NO: 18410807 NR Description: expressed protein [Arabidopsis thaliana]
  misc_feature (345)..(457): Homolog of NCBI NO: 15227917 NR Description: expressed protein [Arabidopsis thaliana]
  misc_feature (1)..(250): Homolog of NCBI NO: 17938249 NR Description: polygalacturonase
  misc_feature (1)..(233): Homolog of NCBI NO: 36958630 NR Description: possible polygalacturonase [Rhizobium sp. NGR234]
  misc_feature (345)..(457): Homolog of NCBI NO: 15227917 NR Description: expressed protein [Arabidopsis thaliana]
  misc_feature (345)..(458): Homolog of NCBI NO: 18410807 NR Description: expressed protein [Arabidopsis thaliana]
  misc_feature (1)..(37): Homolog of NCBI NO: 24417492 NR Description: unknown [Arabidopsis thaliana]
  misc_feature (1)..(153): Homolog of NCBI NO: 17473561 NR Description: putative protein [Arabidopsis thaliana]
  misc_feature (1)..(325): Homolog of NCBI NO: 18410809 NR Description: polygalacturonase, putative [Arabidopsis thaliana]
MVSWNQTGACLGDECRPRLVGFVDSINVEIWNITLREPAYWCLHIVRCENTSVHDVSILGDFNTPNNDGIDIEDSNNTVITRCHIDTGDDAICPKTYTGPLYNLTATDCWIRTKSSAIKLGSASWFDFKGLVFDNITIFESHRGLGMQIRDGGNVSDVTFSNINISTRYYDPSWWGRAEPIYITTCPRDSSAKEGSISNLLFVNITIDSENGVFLSGSPNGLLSDIKFKNMNLTFRRWSNYSAGLVDYRPGCQGLVNHRATSGIIMEHVNGFRVENVDLKWSDDDDVNAAWNVPLEFRPSTVNNVSFVGFTSGLYTKLFESDYVMSLFTSNHQYITESEIGITKMASTKPLIVAAKTLRNRIHFRSGSTSTGPSRWATPGHEERPKGYFMNRTPPPPGQSRKWEDWELPCYITSFLTIVILGVGLNAKPDLSIETWAHQKALERLEMEKLASAGDSSG

SEQ ID NO: 35403 - DNA, 1752 bp, Arabidopsis thaliana
  misc_feature (1)..(1752): Ceres Seq. ID no. 12322647
  misc_feature: MA Experiment ID: 108434 Result: Up-regulated in Transcription
  misc_feature: MA Experiment 108434 PARAMETER Experiment Name: At_Root_Tips_cDNA_P Parameter: Tissue Value: Root Tips
  misc_feature: MA Experiment ID: 20001557 Result: Up-regulated in Transcription
  misc_feature: MA Experiment 20001557 PARAMETER Experiment Name: At_Drought_Soil_Dry_P Parameter: Age (day) Value: 27
  misc_feature: MA Experiment 20001557 PARAMETER Experiment Name: At_Drought_Soil_Dry_P Parameter: Organism Value: A. thaliana
  misc_feature: MA Experiment 20001557 PARAMETER Experiment Name: At_Drought_Soil_Dry_P Parameter: Plant Line Value: WS
  misc_feature: MA Experiment 20001557 PARAMETER Experiment Name: At_Drought_Soil_Dry_P Parameter: Post Timepoint (hr) Value: 3
  misc_feature: MA Experiment 20001557 PARAMETER Experiment Name: At_Drought_Soil_Dry_P Parameter: Post-Treatment Value: Re-Water vs. No Drought
  misc_feature: MA Experiment 20001557 PARAMETER Experiment Name: At_Drought_Soil_Dry_P Parameter: Timepoint (day) Value: 13
  misc_feature: MA Experiment 20001557 PARAMETER Experiment Name: At_Drought_Soil_Dry_P Parameter: Treatment Value: Drought vs. No Drought
caacacatataatttgaccaaagtcactcgcatctcacggtgagatgagttcttcgtagctccaatggtggtggcttcacaatgtcgacttcttcttctttccctcgaaccatcgtctcctacactgtgacaacttcgctcttcatcgttatcttcctatgcagcgtcttcttcttgactagacgcactctcgaaccttctctctctccttaccacaccgccgacatccctctctccgccgtcgatctaccacctcctacgcctctcctccctcaaatcgaacctcacgatggtgacgtcaccgtggaaacgaatcaaaaggaggtagaagattcgcgccgcggaggcgatgacgtcgcggtagagactgagctgaaactgaaagatgtggaagattcgcacacggagaaaaccgaggaggaggaagaaggtagaggagaatcgcccggtgaagtttccgtagaatctgtggaacatgcggtgattgagaagatgagaggctgtgatttgtacaggggatcgtgggttaaggacgatgatgagtatccattgtatcagcctggatcgtgtccttatgtggacgatgcttttgattgccagaggaatgggaggcgtgattctgactatcttaattggagatggaagcctgacggttgtgatcttccacggtttaatgctacagacttcttggtgaagctacgaggtaaaagtttgatgttggttggagattcaatgaatcgtaaccagtttgaatcaatgctttgcgttctacgagaaggtttatcggataagagtagaatgtatgaggttcatggccataatataacaaaagggagaggctactttgtattcaagtttgaagattataattgcacagtagagtttgtgaggtctcattttcttgtgagggaaggagttagagcaaatgctcaaggaaatactaatccgaccctttccattgatcgcattgacaagtcacatgctaaatggaagcgagctgacattcttgtctttaacactggacattggtgggttcatggaaagaccgccagagggaaaaactactacaaagaaggtgactacatctacccgaaatttgatgctactgaagcatacagaaggtcgttgaagacttgggcaaaatggatcgatcagaatgtaaatcccaaaaagcagcttgtattttatcgcggatactcctctgcccattttcggggaggtgagtgggactcgggagggtcatgcaacggggaggtagaacctgtgaagaagggttcaatcatcgattcctatcctttgaaaatgaagatagtccaggaagccataaaggagatgcaagttcctgtgattcttctaaacgtgacaaagctgactaatttccgcaaagacggacatccatcaatctacggtaagaccaacacggatggtaagaaagtgtcgacaaggcgacaggattgcagccactggtgcctgccgggagttcccgatgtttggaaccatcttatctacgcatctttgctccttcaaccacattcttaaagttgagctcatacatcaacaaaattagatagaaagagaagagcagaaacaaatgaccagtccagtcttcactgttgtagtagtgatgtcaaattttgtgtaatttattgcccttggagctgataagtagttttttgttactttcatgtagaggtgtgaacaaacggaatcaggatgaaattttcagggttttttaatggcatacaatttttc

SEQ ID NO: 35404 - protein, 485 aa, Arabidopsis thaliana
  peptide (1)..(485): Ceres Seq. ID no. 12322648
  misc_feature (317)..(479): Pfam Name: Arabidopsis proteins of unknown function Pfam Description: Arabidopsis proteins of unknown function
  misc_feature (136)..(480): Homolog of NCBI NO: 15239660 NR Description: putative protein; protein id: At5g19160.1
  misc_feature (136)..(482): Homolog of NCBI NO: 6862912 NR Description: unknown protein [Arabidopsis thaliana]
  misc_feature (167)..(482): Homolog of NCBI NO: 21618305 NR Description: unknown [Arabidopsis thaliana]
  misc_feature (121)..(481): Homolog of NCBI NO: 15239856 NR Description: putative protein; protein id: At5g49340.1
  misc_feature (94)..(482): Homolog of NCBI NO: 9759298 NR Description: emb|CAB82953.1~gene_id:MPH15.5~strong similarity
  misc_feature (134)..(482): Homolog of NCBI NO: 15229945 NR Description: hypothetical protein; protein id: At3g12060.1
  misc_feature (1)..(480): Homolog of NCBI NO: 15228743 NR Description: putative protein
  misc_feature (117)..(480): Homolog of NCBI NO: 22330347 NR Description: hypothetical protein
  misc_feature (1)..(485): Homolog of NCBI NO: 15242021 NR Description: putative protein
  misc_feature (1)..(485): Homolog of NCBI NO: 21592371 NR Description: unknown [Arabidopsis thaliana]
MSTSSSFPRTIVSYTVTTSLFIVIFLCSVFFLTRRTLEPSLSPYHTADIPLSAVDLPPPTPLLPQIEPHDGDVTVETNQKEVEDSRRGGDDVAVETELKLKDVEDSHTEKTEEEEEGRGESPGEVSVESVEHAVIEKMRGCDLYRGSWVKDDDEYPLYQPGSCPYVDDAFDCQRNGRRDSDYLNWRWKPDGCDLPRFNATDFLVKLRGKSLMLVGDSMNRNQFESMLCVLREGLSDKSRMYEVHGHNITKGRGYFVFKFEDYNCTVEFVRSHFLVREGVRANAQGNTNPTLSIDRIDKSHAKWKRADILVFNTGHWWVHGKTARGKNYYKEGDYIYPKFDATEAYRRSLKTWAKWIDQNVNPKKQLVFYRGYSSAHFRGGEWDSGGSCNGEVEPVKKGSIIDSYPLKMKIVQEAIKEMQVPVILLNVTKLTNFRKDGHPSIYGKTNTDGKKVSTRRQDCSHWCLPGVPDVWNHLIYASLLLQPHS

SEQ ID NO: 35405 - protein, 348 aa, Arabidopsis thaliana
  peptide (1)..(348): Ceres Seq. ID no. 12322649
  misc_feature (180)..(342): Pfam Name: Arabidopsis proteins of unknown function Pfam Description: Arabidopsis proteins of unknown function
  misc_feature (1)..(343): Homolog of NCBI NO: 15239660 NR Description: putative protein; protein id: At5g19160.1
  misc_feature (1)..(345): Homolog of NCBI NO: 6862912 NR Description: unknown protein [Arabidopsis thaliana]
  misc_feature (30)..(345): Homolog of NCBI NO: 21618305 NR Description: unknown [Arabidopsis thaliana]
  misc_feature (1)..(344): Homolog of NCBI NO: 15239856 NR Description: putative protein; protein id: At5g49340.1
  misc_feature (1)..(345): Homolog of NCBI NO: 9759298 NR Description: emb|CAB82953.1~gene_id:MPH15.5~strong similarity
  misc_feature (1)..(345): Homolog of NCBI NO: 15229945 NR Description: hypothetical protein; protein id: At3g12060.1
  misc_feature (1)..(343): Homolog of NCBI NO: 15228743 NR Description: putative protein
  misc_feature (1)..(343): Homolog of NCBI NO: 22330347 NR Description: hypothetical protein
  misc_feature (1)..(348): Homolog of NCBI NO: 15242021 NR Description: putative protein
  misc_feature (1)..(348): Homolog of NCBI NO: 21592371 NR Description: unknown [Arabidopsis thaliana]
MRGCDLYRGSWVKDDDEYPLYQPGSCPYVDDAFDCQRNGRRDSDYLNWRWKPDGCDLPRFNATDFLVKLRGKSLMLVGDSMNRNQFESMLCVLREGLSDKSRMYEVHGHNITKGRGYFVFKFEDYNCTVEFVRSHFLVREGVRANAQGNTNPTLSIDRIDKSHAKWKRADILVFNTGHWWVHGKTARGKNYYKEGDYIYPKFDATEAYRRSLKTWAKWIDQNVNPKKQLVFYRGYSSAHFRGGEWDSGGSCNGEVEPVKKGSIIDSYPLKMKIVQEAIKEMQVPVILLNVTKLTNFRKDGHPSIYGKTNTDGKKVSTRRQDCSHWCLPGVPDVWNHLIYASLLLQPHS

SEQ ID NO: 35406 - protein, 274 aa, Arabidopsis thaliana
  peptide (1)..(274): Ceres Seq. ID no. 12322650
  misc_feature (106)..(268): Pfam Name: Arabidopsis proteins of unknown function Pfam Description: Arabidopsis proteins of unknown function
  misc_feature (1)..(269): Homolog of NCBI NO: 15239660 NR Description: putative protein; protein id: At5g19160.1
  misc_feature (1)..(271): Homolog of NCBI NO: 6862912 NR Description: unknown protein [Arabidopsis thaliana]
  misc_feature (1)..(271): Homolog of NCBI NO: 21618305 NR Description: unknown [Arabidopsis thaliana]
  misc_feature (1)..(270): Homolog of NCBI NO: 15239856 NR Description: putative protein; protein id: At5g49340.1
  misc_feature (1)..(271): Homolog of NCBI NO: 9759298 NR Description: emb|CAB82953.1~gene_id:MPH15.5~strong similarity
  misc_feature (1)..(271): Homolog of NCBI NO: 15229945 NR Description: hypothetical protein; protein id: At3g12060.1
  misc_feature (1)..(269): Homolog of NCBI NO: 15228743 NR Description: putative protein
  misc_feature (1)..(269): Homolog of NCBI NO: 22330347 NR Description: hypothetical protein
  misc_feature (1)..(274): Homolog of NCBI NO: 15242021 NR Description: putative protein
  misc_feature (1)..(274): Homolog of NCBI NO: 21592371 NR Description: unknown [Arabidopsis thaliana]
MLVGDSMNRNQFESMLCVLREGLSDKSRMYEVHGHNITKGRGYFVFKFEDYNCTVEFVRSHFLVREGVRANAQGNTNPTLSIDRIDKSHAKWKRADILVFNTGHWWVHGKTARGKNYYKEGDYIYPKFDATEAYRRSLKTWAKWIDQNVNPKKQLVFYRGYSSAHFRGGEWDSGGSCNGEVEPVKKGSIIDSYPLKMKIVQEAIKEMQVPVILLNVTKLTNFRKDGHPSIYGKTNTDGKKVSTRRQDCSHWCLPGVPDVWNHLIYASLLLQPHS

SEQ ID NO: 35407 - DNA, 1446 bp, Arabidopsis thaliana
  misc_feature (1)..(1446): Ceres Seq. ID no. 12324353
  misc_feature: MA Experiment ID: 20000235 Result: Down-regulated in Transcription
  misc_feature: MA Experiment 20000235 PARAMETER Experiment Name: At_Siliques_P Parameter: Age (day) Value: 21
  misc_feature: MA Experiment 20000235 PARAMETER Experiment Name: At_Siliques_P Parameter: Organism Value: A. thaliana
  misc_feature: MA Experiment 20000235 PARAMETER Experiment Name: At_Siliques_P Parameter: Plant Line Value: WS
  misc_feature: MA Experiment 20000235 PARAMETER Experiment Name: At_Siliques_P Parameter: Tissue Value: 5-10mm Siliques vs. Whole Plant
  misc_feature: MA Experiment ID: 20000264 Result: Up-regulated in Transcription
  misc_feature: MA Experiment 20000264 PARAMETER Experiment Name: At_Open_Flower_P Parameter: Age (day) Value: 21
  misc_feature: MA Experiment 20000264 PARAMETER Experiment Name: At_Open_Flower_P Parameter: Plant Line Value: WS
  misc_feature: MA Experiment 20000264 PARAMETER Experiment Name: At_Open_Flower_P Parameter: Tissue Value: Open Flower vs. Whole Plant
  misc_feature: MA Experiment ID: 20000265 Result: Up-regulated in Transcription
  misc_feature: MA Experiment 20000265 PARAMETER Experiment Name: At_Open_Flower_P Parameter: Age (day) Value: 21
  misc_feature: MA Experiment 20000265 PARAMETER Experiment Name: At_Open_Flower_P Parameter: Plant Line Value: WS
  misc_feature: MA Experiment 20000265 PARAMETER Experiment Name: At_Open_Flower_P Parameter: Tissue Value: Closed Flower vs. Whole Plant
  misc_feature: MA Experiment ID: 20000286 Result: Up-regulated in Transcription
  misc_feature: MA Experiment 20000286 PARAMETER Experiment Name: At_Open_Flower_P Parameter: Age (day) Value: 21
  misc_feature: MA Experiment 20000286 PARAMETER Experiment Name: At_Open_Flower_P Parameter: Plant Line Value: WS
  misc_feature: MA Experiment 20000286 PARAMETER Experiment Name: At_Open_Flower_P Parameter: Tissue Value: Half Open vs. Whole Plant
  misc_feature: MA Experiment ID: 20000437 Result: Up-regulated in Transcription
  misc_feature: MA Experiment 20000437 PARAMETER Experiment Name: At_Drought_P Parameter: Age (day) Value: 8
  misc_feature: MA Experiment 20000437 PARAMETER Experiment Name: At_Drought_P Parameter: Organism Value: A. thaliana
  misc_feature: MA Experiment 20000437 PARAMETER Experiment Name: At_Drought_P Parameter: Plant Line Value: WS
  misc_feature: MA Experiment 20000437 PARAMETER Experiment Name: At_Drought_P Parameter: Timepoint (hr) Value: 24
  misc_feature: MA Experiment 20000437 PARAMETER Experiment Name: At_Drought_P Parameter: Tissue Value: Whole Plant
  misc_feature: MA Experiment 20000437 PARAMETER Experiment Name: At_Drought_P Parameter: Treatment Value: Drought vs. No Drought
  misc_feature: MA Experiment ID: 20001910 Result: Down-regulated in Transcription
  misc_feature: MA Experiment 20001910 PARAMETER Experiment Name: At_Drought_Reproduction_P Parameter: Age (day) Value: 37
  misc_feature: MA Experiment 20001910 PARAMETER Experiment Name: At_Drought_Reproduction_P Parameter: Organism Value: A. thaliana
  misc_feature: MA Experiment 20001910 PARAMETER Experiment Name: At_Drought_Reproduction_P Parameter: Plant Line Value: WS
  misc_feature: MA Experiment 20001910 PARAMETER Experiment Name: At_Drought_Reproduction_P Parameter: Timepoint (day) Value: 7
  misc_feature: MA Experiment 20001910 PARAMETER Experiment Name: At_Drought_Reproduction_P Parameter: Tissue Value: Flowers
  misc_feature: MA Experiment 20001910 PARAMETER Experiment Name: At_Drought_Reproduction_P Parameter: Treatment Value: Drought vs. No Drought
actttttttctttctttctgagtgaaaaacactttagtctcccactctttatattttgtagcttcacagcaaaaattctctttaacttatcagacagataagatcatatagcaaatatgttgcaagatagagtttcttgttctttgtctagttcgaaaatatctcgatgtgttttgtttctctcactcttttgtttcttcctcttgacgatgcatgcttcagcaaaccgcttacagcgagttccaaatccagggccttccccggcaccagagcctaagccatgtccgagtccagggccaaaccccgcaccagcgacaactaagaggacacataacactacgtttccggcgatcttcgcctttggggattcgatcttagacacaggaaataacgattatattttgaccttgatcaaagctaattttcttccatatggcatgaattttccagataaagttcccaccggcagattttgcaacggcaaaatcccttcggactttatcgcggattatataggagtaaaaccagttgtaccggcatatttgagaccgggactgacccaggaagatttgctcactggtgtatcctttgcttcgggtggttctggctatgatcctttgacaccaatcgtagtaagtgcgataccgatgtcaaaacaattgacatactttcaagaatacatagagaaagtgaaaggctttgtgggaaaagagaaagccgagcacataatatccaaaggcctagccattgtggtagcgggcagcgacgatctggccaatacctactatggtgaacacttagaggaattcttgtatgacatagatacatatacctcttttatggctagctctgctgcaagttttgctatgcaactatatgaatcaggagcaaaaaaaataggatttattggtgtttctccgatcgggtgtataccgatacagagaaccacaagaggaggacttaaaagaaaatgtgctgatgaactcaactttgcagctcagctttttaattccagactctccacaagtttgaacgaattggctaaaaccatgaaaaataccacattggtgtatattgacatctactcttctttcaatgatatgattcaaaaccccaaaaaatatggatttgatgagattgatagaggatgttgcgggacggggctactcgaattaggtccgctttgcaacaaatatacatcactgctttgcaagaatgtgtcttcttttatgttttgggactcttaccatccaacggaaagagcttataaaatcttaagccaaaagtttgtagagaatgacatgggccctttctatgacaattcaatgtaaaatttaagatgacacatttgagatgaaatttggctaaataaaagctgtatctcatttggattagtgtcttcaaaaacatgtttattgtattatacatataaattgacatggagcg

SEQ ID NO: 35408 - protein, 404 aa, Arabidopsis thaliana
  peptide (1)..(404): Ceres Seq. ID no. 12324354
  misc_feature (79)..(260): Pfam Name: GDSL-like Lipase/Acylhydrolase Pfam Description: GDSL-like Lipase/Acylhydrolase
  misc_feature (43)..(65): Homolog of NCBI NO: 21431729 NR Description: Anter-specific proline-rich protein APG precursor
  misc_feature (43)..(65): Homolog of NCBI NO: 99694 NR Description: proline-rich protein APG - Arabidopsis thaliana
  misc_feature (43)..(65): Homolog of NCBI NO: 21431729 NR Description: Anter-specific proline-rich protein APG precursor
  misc_feature (43)..(65): Homolog of NCBI NO: 99694 NR Description: proline-rich protein APG - Arabidopsis thaliana
  misc_feature (42)..(393): Homolog of NCBI NO: 21431729 NR Description: Anter-specific proline-rich protein APG precursor
  misc_feature (42)..(393): Homolog of NCBI NO: 99694 NR Description: proline-rich protein APG - Arabidopsis thaliana
  misc_feature (276)..(402): Homolog of NCBI NO: 25513734 NR Description: T20H2.10 protein - Arabidopsis thaliana
  misc_feature (36)..(260): Homolog of NCBI NO: 25513734 NR Description: T20H2.10 protein - Arabidopsis thaliana
  misc_feature (1)..(402): Homolog of NCBI NO: 18394825 NR Description: anter-specific proline-rich protein APG
  misc_feature (1)..(404): Homolog of NCBI NO: 21592372 NR Description: anter-specific proline-rich protein APG
MLQDRVSCSLSSSKISRCVLFLSLFCFFLLTMHASANRLQRVPNPGPSPAPEPKPCPSPGPNPAPATTKRTHNTTFPAIFAFGDSILDTGNNDYILTLIKANFLPYGMNFPDKVPTGRFCNGKIPSDFIADYIGVKPVVPAYLRPGLTQEDLLTGVSFASGGSGYDPLTPIVVSAIPMSKQLTYFQEYIEKVKGFVGKEKAEHIISKGLAIVVAGSDDLANTYYGEHLEEFLYDIDTYTSFMASSAASFAMQLYESGAKKIGFIGVSPIGCIPIQRTTRGGLKRKCADELNFAAQLFNSRLSTSLNELAKTMKNTTLVYIDIYSSFNDMIQNPKKYGFDEIDRGCCGTGLLELGPLCNKYTSLLCKNVSSFMFWDSYHPTERAYKILSQKFVENDMGPFYDNSM

SEQ ID NO: 35409 - protein, 373 aa, Arabidopsis thaliana
  peptide (1)..(373): Ceres Seq. ID no. 12324355
  misc_feature (48)..(229): Pfam Name: GDSL-like Lipase/Acylhydrolase Pfam Description: GDSL-like Lipase/Acylhydrolase
  misc_feature (12)..(34): Homolog of NCBI NO: 21431729 NR Description: Anter-specific proline-rich protein APG precursor
  misc_feature (12)..(34): Homolog of NCBI NO: 99694 NR Description: proline-rich protein APG - Arabidopsis thaliana
  misc_feature (12)..(34): Homolog of NCBI NO: 21431729 NR Description: Anter-specific proline-rich protein APG precursor
  misc_feature (12)..(34): Homolog of NCBI NO: 99694 NR Description: proline-rich protein APG - Arabidopsis thaliana
  misc_feature (11)..(362): Homolog of NCBI NO: 21431729 NR Description: Anter-specific proline-rich protein APG precursor
  misc_feature (11)..(362): Homolog of NCBI NO: 99694 NR Description: proline-rich protein APG - Arabidopsis thaliana
  misc_feature (245)..(371): Homolog of NCBI NO: 25513734 NR Description: T20H2.10 protein - Arabidopsis thaliana
  misc_feature (5)..(229): Homolog of NCBI NO: 25513734 NR Description: T20H2.10 protein - Arabidopsis thaliana
  misc_feature (1)..(371): Homolog of NCBI NO: 18394825 NR Description: anter-specific proline-rich protein APG
  misc_feature (1)..(373): Homolog of NCBI NO: 21592372 NR Description: anter-specific proline-rich protein APG
MHASANRLQRVPNPGPSPAPEPKPCPSPGPNPAPATTKRTHNTTFPAIFAFGDSILDTGNNDYILTLIKANFLPYGMNFPDKVPTGRFCNGKIPSDFIADYIGVKPVVPAYLRPGLTQEDLLTGVSFASGGSGYDPLTPIVVSAIPMSKQLTYFQEYIEKVKGFVGKEKAEHIISKGLAIVVAGSDDLANTYYGEHLEEFLYDIDTYTSFMASSAASFAMQLYESGAKKIGFIGVSPIGCIPIQRTTRGGLKRKCADELNFAAQLFNSRLSTSLNELAKTMKNTTLVYIDIYSSFNDMIQNPKKYGFDEIDRGCCGTGLLELGPLCNKYTSLLCKNVSSFMFWDSYHPTERAYKILSQKFVENDMGPFYDNSM

SEQ ID NO: 35410 - protein, 297 aa, Arabidopsis thaliana
  peptide (1)..(297): Ceres Seq. ID no. 12324356
  misc_feature (1)..(153): Pfam Name: GDSL-like Lipase/Acylhydrolase Pfam Description: GDSL-like Lipase/Acylhydrolase
  misc_feature (1)..(286): Homolog of NCBI NO: 728868 NR Description: ANTER-SPECIFIC PROLINE-RICH PROTEIN APG (PROTEIN
  misc_feature (1)..(268): Homolog of NCBI NO: 25511649 NR Description: T20H2.9 protein - Arabidopsis thaliana
  misc_feature (1)..(268): Homolog of NCBI NO: 15223790 NR Description: anter-specific proline-rich protein APG precursor
  misc_feature (1)..(286): Homolog of NCBI NO: 18266041 NR Description: anther-specific proline-rich protein [Brassica
  misc_feature (1)..(286): Homolog of NCBI NO: 21431729 NR Description: Anter-specific proline-rich protein APG precursor
  misc_feature (1)..(286): Homolog of NCBI NO: 99694 NR Description: proline-rich protein APG - Arabidopsis thaliana
  misc_feature (169)..(295): Homolog of NCBI NO: 25513734 NR Description: T20H2.10 protein - Arabidopsis thaliana
  misc_feature (1)..(153): Homolog of NCBI NO: 25513734 NR Description: T20H2.10 protein - Arabidopsis thaliana
  misc_feature (1)..(295): Homolog of NCBI NO: 18394825 NR Description: anter-specific proline-rich protein APG
  misc_feature (1)..(297): Homolog of NCBI NO: 21592372 NR Description: anter-specific proline-rich protein APG
MNFPDKVPTGRFCNGKIPSDFIADYIGVKPVVPAYLRPGLTQEDLLTGVSFASGGSGYDPLTPIVVSAIPMSKQLTYFQEYIEKVKGFVGKEKAEHIISKGLAIVVAGSDDLANTYYGEHLEEFLYDIDTYTSFMASSAASFAMQLYESGAKKIGFIGVSPIGCIPIQRTTRGGLKRKCADELNFAAQLFNSRLSTSLNELAKTMKNTTLVYIDIYSSFNDMIQNPKKYGFDEIDRGCCGTGLLELGPLCNKYTSLLCKNVSSFMFWDSYHPTERAYKILSQKFVENDMGPFYDNSM

SEQ ID NO: 35411 - DNA, 1191 bp, Arabidopsis thaliana
  misc_feature (1)..(1191): Ceres Seq. ID no. 13487174
  misc_feature: MA Experiment ID: 108435 Result: Up-regulated in Transcription
  misc_feature: MA Experiment 108435 PARAMETER Experiment Name: At_stm_Mutants_cDNA_P Parameter: Plant Line Value: wt Landsburg vs stm
  misc_feature: MA Experiment 108435 PARAMETER Experiment Name: At_stm_Mutants_cDNA_P Parameter: Tissue Value: Shoot Apical Meristem Region
  misc_feature: MA Experiment ID: 108461 Result: Up-regulated in Transcription
  misc_feature: MA Experiment 108461 PARAMETER Experiment Name: At_Germinating_Seeds_cDNA_P Parameter: Age (day) Value: 1 vs. 0
  misc_feature: MA Experiment 108461 PARAMETER Experiment Name: At_Germinating_Seeds_cDNA_P Parameter: Tissue Value: Germinating Seeds
  misc_feature: MA Experiment ID: 108462 Result: Up-regulated in Transcription
  misc_feature: MA Experiment 108462 PARAMETER Experiment Name: At_Germinating_Seeds_cDNA_P Parameter: Age (day) Value: 2 vs. 0
  misc_feature: MA Experiment 108462 PARAMETER Experiment Name: At_Germinating_Seeds_cDNA_P Parameter: Tissue Value: Germinating Seeds
  misc_feature: MA Experiment ID: 108463 Result: Up-regulated in Transcription
  misc_feature: MA Experiment 108463 PARAMETER Experiment Name: At_Germinating_Seeds_cDNA_P Parameter: Age (day) Value: 3 vs. 0
  misc_feature: MA Experiment 108463 PARAMETER Experiment Name: At_Germinating_Seeds_cDNA_P Parameter: Tissue Value: Germinating Seeds
  misc_feature: MA Experiment ID: 108488 Result: Up-regulated in Transcription
  misc_feature: MA Experiment ID: 108595 Result: Up-regulated in Transcription
  misc_feature: MA Experiment 108595 PARAMETER Experiment Name: At_Ler-pi_Ovule_cDNA_P Parameter: Plant Line Value: null
  misc_feature: MA Experiment ID: 20000111 Result: Down-regulated in Transcription
  misc_feature: MA Experiment 20000111 PARAMETER Experiment Name: At_42deg_Heat_cDNA_P Parameter: Temperature (deg C) Value: 42 vs. 22
  misc_feature: MA Experiment 20000111 PARAMETER Experiment Name: At_42deg_Heat_cDNA_P Parameter: Timepoint (hr) Value: 6
  misc_feature: MA Experiment 20000111 PARAMETER Experiment Name: At_42deg_Heat_cDNA_P Parameter: Tissue Value: Aerial
  misc_feature: MA Experiment ID: 20000113 Result: Down-regulated in Transcription
  misc_feature: MA Experiment 20000113 PARAMETER Experiment Name: At_42deg_Heat_cDNA_P Parameter: Temperature (deg C) Value: 42 vs. 22
  misc_feature: MA Experiment 20000113 PARAMETER Experiment Name: At_42deg_Heat_cDNA_P Parameter: Timepoint (hr) Value: 8
  misc_feature: MA Experiment 20000113 PARAMETER Experiment Name: At_42deg_Heat_cDNA_P Parameter: Tissue Value: Aerial
  misc_feature: MA Experiment ID: 20000180 Result: Up-regulated in Transcription
  misc_feature: MA Experiment 20000180 PARAMETER Experiment Name: At_Germinating_Seeds_P Parameter: Age (hr) Value: 24 vs. 0
  misc_feature: MA Experiment 20000180 PARAMETER Experiment Name: At_Germinating_Seeds_P Parameter: Tissue Value: Germinating Seeds
  misc_feature: MA Experiment ID: 20000234 Result: Up-regulated in Transcription
  misc_feature: MA Experiment 20000234 PARAMETER Experiment Name: At_Siliques_P Parameter: Age (day) Value: 21
  misc_feature: MA Experiment 20000234 PARAMETER Experiment Name: At_Siliques_P Parameter: Organism Value: A. thaliana
  misc_feature: MA Experiment 20000234 PARAMETER Experiment Name: At_Siliques_P Parameter: Plant Line Value: WS
  misc_feature: MA Experiment 20000234 PARAMETER Experiment Name: At_Siliques_P Parameter: Tissue Value: Less Than 5mm Siliques vs. Whole Plant
  misc_feature: MA Experiment ID: 20000264 Result: Up-regulated in Transcription
  misc_feature: MA Experiment 20000264 PARAMETER Experiment Name: At_Open_Flower_P Parameter: Age (day) Value: 21
  misc_feature: MA Experiment 20000264 PARAMETER Experiment Name: At_Open_Flower_P Parameter: Plant Line Value: WS
  misc_feature: MA Experiment 20000264 PARAMETER Experiment Name: At_Open_Flower_P Parameter: Tissue Value: Open Flower vs. Whole Plant
  misc_feature: MA Experiment ID: 20000265 Result: Up-regulated in Transcription
  misc_feature: MA Experiment 20000265 PARAMETER Experiment Name: At_Open_Flower_P Parameter: Age (day) Value: 21
  misc_feature: MA Experiment 20000265 PARAMETER Experiment Name: At_Open_Flower_P Parameter: Plant Line Value: WS
  misc_feature: MA Experiment 20000265 PARAMETER Experiment Name: At_Open_Flower_P Parameter: Tissue Value: Closed Flower vs. Whole Plant
  misc_feature: MA Experiment ID: 20001557 Result: Down-regulated in Transcription
  misc_feature: MA Experiment 20001557 PARAMETER Experiment Name: At_Drought_Soil_Dry_P Parameter: Age (day) Value: 27
  misc_feature: MA Experiment 20001557 PARAMETER Experiment Name: At_Drought_Soil_Dry_P Parameter: Organism Value: A. thaliana
  misc_feature: MA Experiment 20001557 PARAMETER Experiment Name: At_Drought_Soil_Dry_P Parameter: Plant Line Value: WS
  misc_feature: MA Experiment 20001557 PARAMETER Experiment Name: At_Drought_Soil_Dry_P Parameter: Post Timepoint (hr) Value: 3
  misc_feature: MA Experiment 20001557 PARAMETER Experiment Name: At_Drought_Soil_Dry_P Parameter: Post-Treatment Value: Re-Water vs. No Drought
  misc_feature: MA Experiment 20001557 PARAMETER Experiment Name: At_Drought_Soil_Dry_P Parameter: Timepoint (day) Value: 13
  misc_feature: MA Experiment 20001557 PARAMETER Experiment Name: At_Drought_Soil_Dry_P Parameter: Treatment Value: Drought vs. No Drought
  misc_feature: MA Experiment ID: 20001558 Result: Down-regulated in Transcription
  misc_feature: MA Experiment 20001558 PARAMETER Experiment Name: At_Drought_Soil_Dry_P Parameter: Age (day) Value: 27
  misc_feature: MA Experiment 20001558 PARAMETER Experiment Name: At_Drought_Soil_Dry_P Parameter: Organism Value: A. thaliana
  misc_feature: MA Experiment 20001558 PARAMETER Experiment Name: At_Drought_Soil_Dry_P Parameter: Plant Line Value: WS
  misc_feature: MA Experiment 20001558 PARAMETER Experiment Name: At_Drought_Soil_Dry_P Parameter: Post Timepoint (hr) Value: 6
  misc_feature: MA Experiment 20001558 PARAMETER Experiment Name: At_Drought_Soil_Dry_P Parameter: Post-Treatment Value: Re-Water vs. No Drought
  misc_feature: MA Experiment 20001558 PARAMETER Experiment Name: At_Drought_Soil_Dry_P Parameter: Timepoint (day) Value: 13
  misc_feature: MA Experiment 20001558 PARAMETER Experiment Name: At_Drought_Soil_Dry_P Parameter: Treatment Value: Drought vs. No Drought
aacatgcctcctcatcattcatcatcacgatcaaaaatgccatagtacataaagtatccattaaaacgtagatctagtctcttcacaacacttcaactaataacgcaaaaatcagtttctctttgagtaagtgtttattacaattaaactaactcaggcaagtctatgatcatggcttcttctgctgctgcatcgatctctatgataactctaaggaacctctctcgcaatcatcaatctcaccaaagcacttttctcggtttctctagatccttccataaccaaaggatctcatctaacagtccaggtctctccacacgagcaagatccaccacttcctccactggaggtttcttcagaaccatttgcagcagcagtagcaatgactactccagaccaactaagatccaagagcttaacgtctacgagttcaacgaaggtgatcgaaacagtccagcggttttaaaactagggaaaaaaccagatcagctttgtctcggagatcttgtccccttcacaaacaaactctacacaggagatctcacaaaacgcataggaatcaccgcaggtctctgcgttttgatccaacatgttccagagaagaaaggtgatcgctttgaagcttcttacagtttctacttcggagattatggtcacatatcagttcaaggaccttatctcacttacgaggacacgtttcttgctatcaccggtggctccggtgtgtttgaaggagcttatggacaggtcaagcttcgtcagcttgtgtatcctacgaagctgttttacactttctacttgaaaggtgttgctgctgatttacctgtggagcttaccggaaaacatgttgagccgtcgaaggaagtgaaaccggcggctgaagctcaggcgactcagcccggcgctacgatcgctaactttactaattgaaatctaaatctttgtgggtgtctttgtcatggatcttattgggctgttgttcattgtgtttacattttaataatgggcctaaataatgagcctttgtattgggccgttctcgtaagcgtaatgtgtcccgtccctataagctggatttaagcgcgtgaactccaccttccgatatttttttttgatagattatatcaaatccatggatactttctatatttggaaagtttggcttagtaggctcgtggccatgtttgagct

SEQ ID NO: 35412 - protein, 254 aa, Arabidopsis thaliana
  peptide (1)..(254): Ceres Seq. ID no. 13487175
  misc_feature (74)..(254): Pfam Name: Allene oxide cyclase Pfam Description: Allene oxide cyclase
  misc_feature (43)..(254): Homolog of NCBI NO: 21727906 NR Description: allene oxide cyclase [Oryza sativa (japonica
  misc_feature (3)..(254): Homolog of NCBI NO: 40644130 NR Description: allene oxide cyclase [Nicotiana tabacum]
  misc_feature (1)..(254): Homolog of NCBI NO: 16416376 NR Description: mangrin [Bruguiera sexangula]
  misc_feature (6)..(254): Homolog of NCBI NO: 40644132 NR Description: allene oxide cyclase [Medicago truncatula]
  misc_feature (10)..(254): Homolog of NCBI NO: 15320414 NR Description: ERD12 protein [Arabidopsis thaliana]
  misc_feature (3)..(254): Homolog of NCBI NO: 15230874 NR Description: allene oxide cyclase family [Arabidopsis
  misc_feature (3)..(254): Homolog of NCBI NO: 18404656 NR Description: allene oxide cyclase family [Arabidopsis
  misc_feature (78)..(254): Homolog of NCBI NO: 25518012 NR Description: T6J4.4 protein - Arabidopsis thaliana
  misc_feature (3)..(254): Homolog of NCBI NO: 18404658 NR Description: allene oxide cyclase family [Arabidopsis
  misc_feature (1)..(254): Homolog of NCBI NO: 15222241 NR Description: allene oxide cyclase family [Arabidopsis
MIMASSAAASISMITLRNLSRNHQSHQSTFLGFSRSFHNQRISSNSPGLSTRARSTTSSTGGFFRTICSSSSNDYSRPTKIQELNVYEFNEGDRNSPAVLKLGKKPDQLCLGDLVPFTNKLYTGDLTKRIGITAGLCVLIQHVPEKKGDRFEASYSFYFGDYGHISVQGPYLTYEDTFLAITGGSGVFEGAYGQVKLRQLVYPTKLFYTFYLKGVAADLPVELTGKHVEPSKEVKPAAEAQATQPGATIANFTN

SEQ ID NO: 35413 - protein, 252 aa, Arabidopsis thaliana
  peptide (1)..(252): Ceres Seq. ID no. 13487176
  misc_feature (72)..(252): Pfam Name: Allene oxide cyclase Pfam Description: Allene oxide cyclase
  misc_feature (41)..(252): Homolog of NCBI NO: 21727906 NR Description: allene oxide cyclase [Oryza sativa (japonica
  misc_feature (1)..(252): Homolog of NCBI NO: 40644130 NR Description: allene oxide cyclase [Nicotiana tabacum]
  misc_feature (1)..(252): Homolog of NCBI NO: 16416376 NR Description: mangrin [Bruguiera sexangula]
  misc_feature (4)..(252): Homolog of NCBI NO: 40644132 NR Description: allene oxide cyclase [Medicago truncatula]
  misc_feature (8)..(252): Homolog of NCBI NO: 15320414 NR Description: ERD12 protein [Arabidopsis thaliana]
  misc_feature (1)..(252): Homolog of NCBI NO: 15230874 NR Description: allene oxide cyclase family [Arabidopsis
  misc_feature (1)..(252): Homolog of NCBI NO: 18404656 NR Description: allene oxide cyclase family [Arabidopsis
  misc_feature (76)..(252): Homolog of NCBI NO: 25518012 NR Description: T6J4.4 protein - Arabidopsis thaliana
  misc_feature (1)..(252): Homolog of NCBI NO: 18404658 NR Description: allene oxide cyclase family [Arabidopsis
  misc_feature (1)..(252): Homolog of NCBI NO: 15222241 NR Description: allene oxide cyclase family [Arabidopsis
MASSAAASISMITLRNLSRNHQSHQSTFLGFSRSFHNQRISSNSPGLSTRARSTTSSTGGFFRTICSSSSNDYSRPTKIQELNVYEFNEGDRNSPAVLKLGKKPDQLCLGDLVPFTNKLYTGDLTKRIGITAGLCVLIQHVPEKKGDRFEASYSFYFGDYGHISVQGPYLTYEDTFLAITGGSGVFEGAYGQVKLRQLVYPTKLFYTFYLKGVAADLPVELTGKHVEPSKEVKPAAEAQATQPGATIANFTN

SEQ ID NO: 35414 - protein, 242 aa, Arabidopsis thaliana
  peptide (1)..(242): Ceres Seq. ID no. 13487177
  misc_feature (62)..(242): Pfam Name: Allene oxide cyclase Pfam Description: Allene oxide cyclase
  misc_feature (31)..(242): Homolog of NCBI NO: 21727906 NR Description: allene oxide cyclase [Oryza sativa (japonica
  misc_feature (1)..(242): Homolog of NCBI NO: 40644130 NR Description: allene oxide cyclase [Nicotiana tabacum]
  misc_feature (1)..(242): Homolog of NCBI NO: 16416376 NR Description: mangrin [Bruguiera sexangula]
  misc_feature (1)..(242): Homolog of NCBI NO: 40644132 NR Description: allene oxide cyclase [Medicago truncatula]
  misc_feature (1)..(242): Homolog of NCBI NO: 15320414 NR Description: ERD12 protein [Arabidopsis thaliana]
  misc_feature (1)..(242): Homolog of NCBI NO: 15230874 NR Description: allene oxide cyclase family [Arabidopsis
  misc_feature (1)..(242): Homolog of NCBI NO: 18404656 NR Description: allene oxide cyclase family [Arabidopsis
  misc_feature (66)..(242): Homolog of NCBI NO: 25518012 NR Description: T6J4.4 protein - Arabidopsis thaliana
  misc_feature (1)..(242): Homolog of NCBI NO: 18404658 NR Description: allene oxide cyclase family [Arabidopsis
  misc_feature (1)..(242): Homolog of NCBI NO: 15222241 NR Description: allene oxide cyclase family [Arabidopsis
MITLRNLSRNHQSHQSTFLGFSRSFHNQRISSNSPGLSTRARSTTSSTGGFFRTICSSSSNDYSRPTKIQELNVYEFNEGDRNSPAVLKLGKKPDQLCLGDLVPFTNKLYTGDLTKRIGITAGLCVLIQHVPEKKGDRFEASYSFYFGDYGHISVQGPYLTYEDTFLAITGGSGVFEGAYGQVKLRQLVYPTKLFYTFYLKGVAADLPVELTGKHVEPSKEVKPAAEAQATQPGATIANFTN

SEQ ID NO: 35415 - DNA, 1082 bp, Arabidopsis thaliana
  misc_feature (1)..(1082): Ceres Seq. ID no. 12396690
  misc_feature: MA Experiment ID: 108461 Result: Up-regulated in Transcription
  misc_feature: MA Experiment 108461 PARAMETER Experiment Name: At_Germinating_Seeds_cDNA_P Parameter: Age (day) Value: 1 vs. 0
  misc_feature: MA Experiment 108461 PARAMETER Experiment Name: At_Germinating_Seeds_cDNA_P Parameter: Tissue Value: Germinating Seeds
  misc_feature: MA Experiment ID: 108462 Result: Up-regulated in Transcription
  misc_feature: MA Experiment 108462 PARAMETER Experiment Name: At_Germinating_Seeds_cDNA_P Parameter: Age (day) Value: 2 vs. 0
  misc_feature: MA Experiment 108462 PARAMETER Experiment Name: At_Germinating_Seeds_cDNA_P Parameter: Tissue Value: Germinating Seeds
  misc_feature: MA Experiment ID: 108463 Result: Up-regulated in Transcription
  misc_feature: MA Experiment 108463 PARAMETER Experiment Name: At_Germinating_Seeds_cDNA_P Parameter: Age (day) Value: 3 vs. 0
  misc_feature: MA Experiment 108463 PARAMETER Experiment Name: At_Germinating_Seeds_cDNA_P Parameter: Tissue Value: Germinating Seeds
  misc_feature: MA Experiment ID: 108464 Result: Up-regulated in Transcription
  misc_feature: MA Experiment 108464 PARAMETER Experiment Name: At_Germinating_Seeds_cDNA_P Parameter: Age (day) Value: 4 vs. 0
  misc_feature: MA Experiment 108464 PARAMETER Experiment Name: At_Germinating_Seeds_cDNA_P Parameter: Tissue Value: Germinating Seeds
  misc_feature: MA Experiment ID: 108579 Result: Up-regulated in Transcription
  misc_feature: MA Experiment 108579 PARAMETER Experiment Name: At_4deg_Cold_cDNA_P Parameter: Temperature (deg C) Value: 4 vs. 22
  misc_feature: MA Experiment 108579 PARAMETER Experiment Name: At_4deg_Cold_cDNA_P Parameter: Timepoint (hr) Value: 6
  misc_feature: MA Experiment 108579 PARAMETER Experiment Name: At_4deg_Cold_cDNA_P Parameter: Tissue Value: Aerial
  misc_feature: MA Experiment ID: 20000086 Result: Down-regulated in Transcription
  misc_feature: MA Experiment 20000086 PARAMETER Experiment Name: At_100uM_ABA_Mutants_cDNA_P Parameter: Plant Line Value: CS22
  misc_feature: MA Experiment 20000086 PARAMETER Experiment Name: At_100uM_ABA_Mutants_cDNA_P Parameter: Timepoint (hr) Value: 6
  misc_feature: MA Experiment 20000086 PARAMETER Experiment Name: At_100uM_ABA_Mutants_cDNA_P Parameter: Tissue Value: Aerial
  misc_feature: MA Experiment 20000086 PARAMETER Experiment Name: At_100uM_ABA_Mutants_cDNA_P Parameter: Treatment Value: 100uM ABA vs. No Treatment
  misc_feature: MA Experiment ID: 20000090 Result: Down-regulated in Transcription
  misc_feature: MA Experiment ID: 20000180 Result: Up-regulated in Transcription
  misc_feature: MA Experiment 20000180 PARAMETER Experiment Name: At_Germinating_Seeds_P Parameter: Age (hr) Value: 24 vs. 0
  misc_feature: MA Experiment 20000180 PARAMETER Experiment Name: At_Germinating_Seeds_P Parameter: Tissue Value: Germinating Seeds
  misc_feature: MA Experiment ID: 20000184 Result: Up-regulated in Transcription
  misc_feature: MA Experiment 20000184 PARAMETER Experiment Name: At_Shoots__P Parameter: Age (day) Value: 7
  misc_feature: MA Experiment 20000184 PARAMETER Experiment Name: At_Shoots__P Parameter: Tissue Value: Shoots vs. Whole Plant
  misc_feature: MA Experiment ID: 20000185 Result: Up-regulated in Transcription
  misc_feature: MA Experiment 20000185 PARAMETER Experiment Name: At_Roots__P Parameter: Age (day) Value: 7 vs. 21
  misc_feature: MA Experiment 20000185 PARAMETER Experiment Name: At_Roots__P Parameter: Organism Value: A. thaliana
  misc_feature: MA Experiment 20000185 PARAMETER Experiment Name: At_Roots__P Parameter: Tissue Value: Roots vs. Whole Plant
  misc_feature: MA Experiment ID: 20000438 Result: Up-regulated in Transcription
  misc_feature: MA Experiment 20000438 PARAMETER Experiment Name: At_Shoots__P Parameter: Age (day) Value: 14
  misc_feature: MA Experiment 20000438 PARAMETER Experiment Name: At_Shoots__P Parameter: Tissue Value: Shoots vs. Whole Plant
  misc_feature: MA Experiment ID: 20001248 Result: Down-regulated in Transcription
  misc_feature: MA Experiment 20001248 PARAMETER Experiment Name: At_Far-red-induction_P Parameter: Age (day) Value: 7
  misc_feature: MA Experiment 20001248 PARAMETER Experiment Name: At_Far-red-induction_P Parameter: Light Value: Far-red vs. White
  misc_feature: MA Experiment 20001248 PARAMETER Experiment Name: At_Far-red-induction_P Parameter: Organism Value: A. thaliana
  misc_feature: MA Experiment 20001248 PARAMETER Experiment Name: At_Far-red-induction_P Parameter: Plant Line Value: Columbia
  misc_feature: MA Experiment 20001248 PARAMETER Experiment Name: At_Far-red-induction_P Parameter: Timepoint (hr) Value: 4
  misc_feature: MA Experiment 20001248 PARAMETER Experiment Name: At_Far-red-induction_P Parameter: Tissue Value: Whole Plant
aagtttcaattcatcttcattccgggagaaaaagtctctagtcgcgatacttgagctactcagctttagggtttaacatgttaaggtctctgatttggaaacgatcacaggcatattcttcagtcgtcacgatgtcttcaatcagtcagagaggaaatgaaaggcttttgtctgaagtcgctggttcacattcaagagataataagatattggttttgggaggaaatggttatgtaggttcacacatatgtaaggaggcactgagacaaggtttctctgtatctagtcttagcaggtctggaagatcttctcttcacgattcgtgggtcgatgatgtaacctggcatcaaggtgatttgctttcacccgattctctgaagcctgcactagaaggaattacatctgtgatttcatgtgttggtggttttggttccaactcacaaatggtcagaattaacggtactgcaaacatcaatgctgttaaagctgcagcagaacaaggtgtgaagagatttgtgtatatatcagctgcggattttggtgtcataaataacttgattcgaggatatttcgaagggaagagagcaaccgaagctgagattttggataaatttggaaacagaggttcggttttaaggccaggattcatacatgggactcgtcaggtcggtagcataaagctgccacttagtctcattggagctcctctcgaaatggttttgaagctgttgccaaaagaggtgacgaaaattcctgtgatcgggccacttttaatacctccggtcaatgtcaaatccgttgcagcaacagcggtaaaagctgcagttgatcccgagtttgcttctggagtcatcgatgtgtaccggattcttcaacatggtcactgaaaacaacacctgtcttaacaaagttctcctcaatacggttttaaatgtcaaattcaaatgtaaccaataaccatcgtctctggtcttctgctaccaaataaactatgactttcgcatattacacaataggagaacaaataatgaaatctttttgaaactggaaccaataaccatcgtcattagagattcaacttc

SEQ ID NO: 35416 - protein, 269 aa, Arabidopsis thaliana
  peptide (1)..(269): Ceres Seq. ID no. 12396691
  misc_feature (43)..(204): Pfam Name: Isoflavone reductase Pfam Description: Isoflavone reductase
  misc_feature (43)..(239): Homolog of NCBI NO: 22536918 NR Description: conserved domain protein [Streptococcus
  misc_feature (43)..(232): Homolog of NCBI NO: 23037289 NR Description: hypothetical protein [Oenococcus oeni MCW]
  misc_feature (108)..(264): Homolog of NCBI NO: 8744993 NR Description: hypothetical protein P1295.07 [Leishmania major]
  misc_feature (40)..(264): Homolog of NCBI NO: 18398333 NR Description: expressed protein
  misc_feature (40)..(264): Homolog of NCBI NO: 38346147 NR Description: OSJNBb0118P14.7 [Oryza sativa (japonica
  misc_feature (123)..(269): Homolog of NCBI NO: 11346175 NR Description: hypothetical protein F1N13_50 - Arabidopsis
  misc_feature (43)..(269): Homolog of NCBI NO: 10129651 NR Description: putative protein [Arabidopsis thaliana]
  misc_feature (43)..(269): Homolog of NCBI NO: 18416362 NR Description: putative protein
  misc_feature (19)..(269): Homolog of NCBI NO: 21592373 NR Description: unknown [Arabidopsis thaliana]
  misc_feature (1)..(269): Homolog of NCBI NO: 18417824 NR Description: putative protein
MLRSLIWKRSQAYSSVVTMSSISQRGNERLLSEVAGSHSRDNKILVLGGNGYVGSHICKEALRQGFSVSSLSRSGRSSLHDSWVDDVTWHQGDLLSPDSLKPALEGITSVISCVGGFGSNSQMVRINGTANINAVKAAAEQGVKRFVYISAADFGVINNLIRGYFEGKRATEAEILDKFGNRGSVLRPGFIHGTRQVGSIKLPLSLIGAPLEMVLKLLPKEVTKIPVIGPLLIPPVNVKSVAATAVKAAVDPEFASGVIDVYRILQHGH

SEQ ID NO: 35417 - protein, 251 aa, Arabidopsis thaliana
  peptide (1)..(251): Ceres Seq. ID no. 12396692
  misc_feature (25)..(186): Pfam Name: Isoflavone reductase Pfam Description: Isoflavone reductase
  misc_feature (25)..(221): Homolog of NCBI NO: 22536918 NR Description: conserved domain protein [Streptococcus
  misc_feature (25)..(214): Homolog of NCBI NO: 23037289 NR Description: hypothetical protein [Oenococcus oeni MCW]
  misc_feature (90)..(246): Homolog of NCBI NO: 8744993 NR Description: hypothetical protein P1295.07 [Leishmania major]
  misc_feature (22)..(246): Homolog of NCBI NO: 18398333 NR Description: expressed protein
  misc_feature (22)..(246): Homolog of NCBI NO: 38346147 NR Description: OSJNBb0118P14.7 [Oryza sativa (japonica
  misc_feature (105)..(251): Homolog of NCBI NO: 11346175 NR Description: hypothetical protein F1N13_50 - Arabidopsis
  misc_feature (25)..(251): Homolog of NCBI NO: 10129651 NR Description: putative protein [Arabidopsis thaliana]
  misc_feature (25)..(251): Homolog of NCBI NO: 18416362 NR Description: putative protein
  misc_feature (1)..(251): Homolog of NCBI NO: 21592373 NR Description: unknown [Arabidopsis thaliana]
  misc_feature (1)..(251): Homolog of NCBI NO: 18417824 NR Description: putative protein
MSSISQRGNERLLSEVAGSHSRDNKILVLGGNGYVGSHICKEALRQGFSVSSLSRSGRSSLHDSWVDDVTWHQGDLLSPDSLKPALEGITSVISCVGGFGSNSQMVRINGTANINAVKAAAEQGVKRFVYISAADFGVINNLIRGYFEGKRATEAEILDKFGNRGSVLRPGFIHGTRQVGSIKLPLSLIGAPLEMVLKLLPKEVTKIPVIGPLLIPPVNVKSVAATAVKAAVDPEFASGVIDVYRILQHGH

SEQ ID NO: 35418 - protein, 147 aa, Arabidopsis thaliana
  peptide (1)..(147): Ceres Seq. ID no. 12396693
  misc_feature (1)..(82): Pfam Name: Isoflavone reductase Pfam Description: Isoflavone reductase
  misc_feature (1)..(117): Homolog of NCBI NO: 22536918 NR Description: conserved domain protein [Streptococcus
  misc_feature (1)..(110): Homolog of NCBI NO: 23037289 NR Description: hypothetical protein [Oenococcus oeni MCW]
  misc_feature (1)..(142): Homolog of NCBI NO: 8744993 NR Description: hypothetical protein P1295.07 [Leishmania major]
  misc_feature (1)..(142): Homolog of NCBI NO: 18398333 NR Description: expressed protein
  misc_feature (1)..(142): Homolog of NCBI NO: 38346147 NR Description: OSJNBb0118P14.7 [Oryza sativa (japonica
  misc_feature (1)..(147): Homolog of NCBI NO: 11346175 NR Description: hypothetical protein F1N13_50 - Arabidopsis
  misc_feature (1)..(147): Homolog of NCBI NO: 10129651 NR Description: putative protein [Arabidopsis thaliana]
  misc_feature (1)..(147): Homolog of NCBI NO: 18416362 NR Description: putative protein
  misc_feature (1)..(147): Homolog of NCBI NO: 21592373 NR Description: unknown [Arabidopsis thaliana]
  misc_feature (1)..(147): Homolog of NCBI NO: 18417824 NR Description: putative protein
MVRINGTANINAVKAAAEQGVKRFVYISAADFGVINNLIRGYFEGKRATEAEILDKFGNRGSVLRPGFIHGTRQVGSIKLPLSLIGAPLEMVLKLLPKEVTKIPVIGPLLIPPVNVKSVAATAVKAAVDPEFASGVIDVYRILQHGH

SEQ ID NO: 35419 - DNA, 1199 bp, Arabidopsis thaliana
  misc_feature (1)..(1199): Ceres Seq. ID no. 12371573
  misc_feature: MA Experiment ID: 108434 Result: Down-regulated in Transcription
  misc_feature: MA Experiment 108434 PARAMETER Experiment Name: At_Root_Tips_cDNA_P Parameter: Tissue Value: Root Tips
  misc_feature: MA Experiment ID: 108488 Result: Down-regulated in Transcription
  misc_feature: MA Experiment ID: 108574 Result: Up-regulated in Transcription
  misc_feature: MA Experiment 108574 PARAMETER Experiment Name: At_Wounding__cDNA_P Parameter: Timepoint (hr) Value: 1
  misc_feature: MA Experiment 108574 PARAMETER Experiment Name: At_Wounding__cDNA_P Parameter: Tissue Value: Aerial
  misc_feature: MA Experiment 108574 PARAMETER Experiment Name: At_Wounding__cDNA_P Parameter: Treatment Value: Wounding vs. No Wounding
  misc_feature: MA Experiment ID: 108576 Result: Up-regulated in Transcription
  misc_feature: MA Experiment 108576 PARAMETER Experiment Name: At_42deg_Heat_cDNA_P Parameter: Temperature (deg C) Value: 42 vs. 22
  misc_feature: MA Experiment 108576 PARAMETER Experiment Name: At_42deg_Heat_cDNA_P Parameter: Timepoint (hr) Value: 1
  misc_feature: MA Experiment 108576 PARAMETER Experiment Name: At_42deg_Heat_cDNA_P Parameter: Tissue Value: Aerial
  misc_feature: MA Experiment ID: 108579 Result: Up-regulated in Transcription
  misc_feature: MA Experiment 108579 PARAMETER Experiment Name: At_4deg_Cold_cDNA_P Parameter: Temperature (deg C) Value: 4 vs. 22
  misc_feature: MA Experiment 108579 PARAMETER Experiment Name: At_4deg_Cold_cDNA_P Parameter: Timepoint (hr) Value: 6
  misc_feature: MA Experiment 108579 PARAMETER Experiment Name: At_4deg_Cold_cDNA_P Parameter: Tissue Value: Aerial
  misc_feature: MA Experiment ID: 108585 Result: Up-regulated in Transcription
  misc_feature: MA Experiment 108585 PARAMETER Experiment Name: At_5mM_NaNP_cDNA_P Parameter: Timepoint (hr) Value: 6
  misc_feature: MA Experiment 108585 PARAMETER Experiment Name: At_5mM_NaNP_cDNA_P Parameter: Tissue Value: Aerial
  misc_feature: MA Experiment 108585 PARAMETER Experiment Name: At_5mM_NaNP_cDNA_P Parameter: Treatment Value: null
  misc_feature: MA Experiment ID: 108595 Result: Up-regulated in Transcription
  misc_feature: MA Experiment 108595 PARAMETER Experiment Name: At_Ler-pi_Ovule_cDNA_P Parameter: Plant Line Value: null
  misc_feature: MA Experiment ID: 108667 Result: Up-regulated in Transcription
  misc_feature: MA Experiment 108667 PARAMETER Experiment Name: At_2mM_SA_cDNA_P Parameter: Plant Line Value: WS
  misc_feature: MA Experiment 108667 PARAMETER Experiment Name: At_2mM_SA_cDNA_P Parameter: Timepoint (hr) Value: 1
  misc_feature: MA Experiment 108667 PARAMETER Experiment Name: At_2mM_SA_cDNA_P Parameter: Treatment Value: 2mM SA vs. No Treatment
  misc_feature: MA Experiment ID: 108668 Result: Up-regulated in Transcription
  misc_feature: MA Experiment 108668 PARAMETER Experiment Name: At_2mM_SA_cDNA_P Parameter: Plant Line Value: WS
  misc_feature: MA Experiment 108668 PARAMETER Experiment Name: At_2mM_SA_cDNA_P Parameter: Timepoint (hr) Value: 6
  misc_feature: MA Experiment 108668 PARAMETER Experiment Name: At_2mM_SA_cDNA_P Parameter: Treatment Value: 2mM SA vs. No Treatment
  misc_feature: MA Experiment ID: 20000093 Result: Up-regulated in Transcription
  misc_feature: MA Experiment 20000093 PARAMETER Experiment Name: At_42deg_Heat_cDNA_P Parameter: Temperature (deg C) Value: 42 vs. 22
  misc_feature: MA Experiment 20000093 PARAMETER Experiment Name: At_42deg_Heat_cDNA_P Parameter: Timepoint (hr) Value: 0.5
  misc_feature: MA Experiment 20000093 PARAMETER Experiment Name: At_42deg_Heat_cDNA_P Parameter: Tissue Value: Aerial
  misc_feature: MA Experiment ID: 20000171 Result: Up-regulated in Transcription
  misc_feature: MA Experiment 20000171 PARAMETER Experiment Name: At_42deg_Heat_P Parameter: Age (day) Value: 14
  misc_feature: MA Experiment 20000171 PARAMETER Experiment Name: At_42deg_Heat_P Parameter: Organism Value: A. thaliana
  misc_feature: MA Experiment 20000171 PARAMETER Experiment Name: At_42deg_Heat_P Parameter: Plant Line Value: WS
  misc_feature: MA Experiment 20000171 PARAMETER Experiment Name: At_42deg_Heat_P Parameter: Temperature (deg C) Value: 42 vs. 22
  misc_feature: MA Experiment 20000171 PARAMETER Experiment Name: At_42deg_Heat_P Parameter: Timepoint (hr) Value: 1
  misc_feature: MA Experiment 20000171 PARAMETER Experiment Name: At_42deg_Heat_P Parameter: Tissue Value: Aerial
  misc_feature: MA Experiment ID: 20000182 Result: Up-regulated in Transcription
  misc_feature: MA Experiment 20000182 PARAMETER Experiment Name: At_2mM_SA_P Parameter: Age (day) Value: 14
  misc_feature: MA Experiment 20000182 PARAMETER Experiment Name: At_2mM_SA_P Parameter: Organism Value: A. thaliana
  misc_feature: MA Experiment 20000182 PARAMETER Experiment Name: At_2mM_SA_P Parameter: Plant Line Value: WS
  misc_feature: MA Experiment 20000182 PARAMETER Experiment Name: At_2mM_SA_P Parameter: Timepoint (hr) Value: 6
  misc_feature: MA Experiment 20000182 PARAMETER Experiment Name: At_2mM_SA_P Parameter: Tissue Value: Aerial
  misc_feature: MA Experiment 20000182 PARAMETER Experiment Name: At_2mM_SA_P Parameter: Treatment Value: 2mM SA vs. No Treatment
  misc_feature: MA Experiment ID: 20000184 Result: Down-regulated in Transcription
  misc_feature: MA Experiment 20000184 PARAMETER Experiment Name: At_Shoots__P Parameter: Age (day) Value: 7
  misc_feature: MA Experiment 20000184 PARAMETER Experiment Name: At_Shoots__P Parameter: Tissue Value: Shoots vs. Whole Plant
  misc_feature: MA Experiment ID: 20000234 Result: Down-regulated in Transcription
  misc_feature: MA Experiment 20000234 PARAMETER Experiment Name: At_Siliques_P Parameter: Age (day) Value: 21
  misc_feature: MA Experiment 20000234 PARAMETER Experiment Name: At_Siliques_P Parameter: Organism Value: A. thaliana
  misc_feature: MA Experiment 20000234 PARAMETER Experiment Name: At_Siliques_P Parameter: Plant Line Value: WS
  misc_feature: MA Experiment 20000234 PARAMETER Experiment Name: At_Siliques_P Parameter: Tissue Value: Less Than 5mm Siliques vs. Whole Plant
  misc_feature: MA Experiment ID: 20000235 Result: Down-regulated in Transcription
  misc_feature: MA Experiment 20000235 PARAMETER Experiment Name: At_Siliques_P Parameter: Age (day) Value: 21
  misc_feature: MA Experiment 20000235 PARAMETER Experiment Name: At_Siliques_P Parameter: Organism Value: A. thaliana
  misc_feature: MA Experiment 20000235 PARAMETER Experiment Name: At_Siliques_P Parameter: Plant Line Value: WS
  misc_feature: MA Experiment 20000235 PARAMETER Experiment Name: At_Siliques_P Parameter: Tissue Value: 5-10mm Siliques vs. Whole Plant
  misc_feature: MA Experiment ID: 20000438 Result: Down-regulated in Transcription
  misc_feature: MA Experiment 20000438 PARAMETER Experiment Name: At_Shoots__P Parameter: Age (day) Value: 14
  misc_feature: MA Experiment 20000438 PARAMETER Experiment Name: At_Shoots__P Parameter: Tissue Value: Shoots vs. Whole Plant
  misc_feature: MA Experiment ID: 20000495 Result: Down-regulated in Transcription
  misc_feature: MA Experiment 20000495 PARAMETER Experiment Name: At_Guard_Cells_P Parameter: Harvest Date Value: 8/2/2002
  misc_feature: MA Experiment 20000495 PARAMETER Experiment Name: At_Guard_Cells_P Parameter: Organism Value: A. thaliana
  misc_feature: MA Experiment 20000495 PARAMETER Experiment Name: At_Guard_Cells_P Parameter: Tissue Value: Guard Cells vs. Leaves
  misc_feature: MA Experiment ID: 20000527 Result: Down-regulated in Transcription
  misc_feature: MA Experiment 20000527 PARAMETER Experiment Name: At_10percent_PEG_P Parameter: Age (day) Value: 20
  misc_feature: MA Experiment 20000527 PARAMETER Experiment Name: At_10percent_PEG_P Parameter: Organism Value: A. thaliana
  misc_feature: MA Experiment 20000527 PARAMETER Experiment Name: At_10percent_PEG_P Parameter: Plant Line Value: WS
  misc_feature: MA Experiment 20000527 PARAMETER Experiment Name: At_10percent_PEG_P Parameter: Timepoint (day) Value: 20
  misc_feature: MA Experiment 20000527 PARAMETER Experiment Name: At_10percent_PEG_P Parameter: Tissue Value: Whole Plant
  misc_feature: MA Experiment 20000527 PARAMETER Experiment Name: At_10percent_PEG_P Parameter: Treatment Value: 10percent PEG vs. No Treatment
  misc_feature: MA Experiment ID: 20000573 Result: Down-regulated in Transcription
  misc_feature: MA Experiment 20000573 PARAMETER Experiment Name: At_100uM_ABA_Mutants__P Parameter: Organism Value: A. thaliana
  misc_feature: MA Experiment 20000573 PARAMETER Experiment Name: At_100uM_ABA_Mutants__P Parameter: Plant Line Value: CS22 vs. Ler wt
  misc_feature: MA Experiment 20000573 PARAMETER Experiment Name: At_100uM_ABA_Mutants__P Parameter: Timepoint (hr) Value: N/A
  misc_feature: MA Experiment 20000573 PARAMETER Experiment Name: At_100uM_ABA_Mutants__P Parameter: Tissue Value: Whole Plant
  misc_feature: MA Experiment 20000573 PARAMETER Experiment Name: At_100uM_ABA_Mutants__P Parameter: Treatment Value: None
  misc_feature: MA Experiment ID: 20001905 Result: Up-regulated in Transcription
  misc_feature: MA Experiment 20001905 PARAMETER Experiment Name: At_Drought_Reproduction_P Parameter: Age (day) Value: 40
  misc_feature: MA Experiment 20001905 PARAMETER Experiment Name: At_Drought_Reproduction_P Parameter: Organism Value: A. thaliana
  misc_feature: MA Experiment 20001905 PARAMETER Experiment Name: At_Drought_Reproduction_P Parameter: Plant Line Value: WS
  misc_feature: MA Experiment 20001905 PARAMETER Experiment Name: At_Drought_Reproduction_P Parameter: Timepoint (day) Value: 10
  misc_feature: MA Experiment 20001905 PARAMETER Experiment Name: At_Drought_Reproduction_P Parameter: Tissue Value: Rosettes
  misc_feature: MA Experiment 20001905 PARAMETER Experiment Name: At_Drought_Reproduction_P Parameter: Treatment Value: Drought vs. No Drought
aaaggaaaaagaaaaatacataattgatctcaaccgtccgatcatccatcttgccatcaccgttcaccaatcttcttcgtctcctctctctttctctctttttgctgtttctagctcctctctctctggatctcgccggcgaaccgtttctcttgggtgtaaacagtagcaatcaagctatagaatctcagatatcgctgaattagctgttggattttatccgccttttcttcgttatccggggctcgggtataaggtttcatcgtcttatttcatctgtaaatgggctgcttccactcaaaggcagcaaaagaatttcgaggacacgaagaccctgttaagcttgcctctgagacagcttctagtgtgagtgaggttgaagcattatttgagctattcaagagcataagcagttcggttgttgattatggtctgattaacaaggaggagtttcaacttgctttgttcaaaagccggaagagggagaatatatttgctaatagggtaaaatcttaattcttcaggcttttacaagattcgtcttctggaagagtgatctaaaccaagataatatgtccattatcctaaacaatattgcttttccgcagatatttgatatgtttgatgttaaacgaaaaggagtcatcgatttcggggactttgtaagatcactcaatgttttccaccccaatgcttctctagaagacaaaatagattttacgtttaggctttacgacatggactgcacgggttacattgaacgacaagaggtcaagcaaatgttgatcgcgcttctctgcgaatctgaaatgaaactggctgatgaaaccatagagataatactcgataagacatttgaagatgcagacgtgaatcaagatggaaaaattgataaattagagtggagtgatttcgtaaacaaaaatccatcattgcttaagatcatgactcttccatatctcagggatattacgacaacgtttccgagttttgtcttccattcggaggtcgatgagattgccacatgaagaaacaaactggtttaagaccgagtagattgccacgagttggaagaacaagtctgagctaatcggtgtaatcaacatctgtttgtaaacagtagtagagcatattctcttgaaattgtttgggttacttttttcttctcacaacagtttaaaattttgggtttttagctt

SEQ ID NO: 35420 - protein, 151 aa, Arabidopsis thaliana
  peptide (1)..(151): Ceres Seq. ID no. 12371574
  misc_feature (90)..(118): Pfam Name: EF hand Pfam Description: EF hand
  misc_feature (7)..(149): Homolog of NCBI NO: 15237928 NR Description: calcium sensor homolog (gb|AAC26110.1)
  misc_feature (7)..(151): Homolog of NCBI NO: 37536918 NR Description: putative calcineurin [Oryza sativa (japonica
  misc_feature (12)..(148): Homolog of NCBI NO: 21593228 NR Description: calcineurin B-like protein 2 [Arabidopsis
  misc_feature (12)..(148): Homolog of NCBI NO: 15241101 NR Description: calcineurin B-like protein 2 (gb|AAC26009.1)
  misc_feature (12)..(148): Homolog of NCBI NO: 15236778 NR Description: calcineurin B-like protein 3
  misc_feature (12)..(148): Homolog of NCBI NO: 22137326 NR Description: calcineurin B [Pisum sativum]
  misc_feature (12)..(148): Homolog of NCBI NO: 16924116 NR Description: putative calcineurin B-like protein [Oryza sativa]
  misc_feature (12)..(148): Homolog of NCBI NO: 30687272 NR Description: calcineurin B-like protein 3 (CBL3) [Arabidopsis
  misc_feature (7)..(151): Homolog of NCBI NO: 15238015 NR Description: calcineurin B 1
  misc_feature (7)..(151): Homolog of NCBI NO: 18414931 NR Description: calcineurin B-like protein 1
MSIILNNIAFPQIFDMFDVKRKGVIDFGDFVRSLNVFHPNASLEDKIDFTFRLYDMDCTGYIERQEVKQMLIALLCESEMKLADETIEIILDKTFEDADVNQDGKIDKLEWSDFVNKNPSLLKIMTLPYLRDITTTFPSFVFHSEVDEIAT

SEQ ID NO: 35421 - protein, 136 aa, Arabidopsis thaliana
  peptide (1)..(136): Ceres Seq. ID no. 12371575
  misc_feature (75)..(103): Pfam Name: EF hand Pfam Description: EF hand
  misc_feature (1)..(134): Homolog of NCBI NO: 15237928 NR Description: calcium sensor homolog (gb|AAC26110.1)
  misc_feature (1)..(136): Homolog of NCBI NO: 37536918 NR Description: putative calcineurin [Oryza sativa (japonica
  misc_feature (1)..(133): Homolog of NCBI NO: 21593228 NR Description: calcineurin B-like protein 2 [Arabidopsis
  misc_feature (1)..(133): Homolog of NCBI NO: 15241101 NR Description: calcineurin B-like protein 2 (gb|AAC26009.1)
  misc_feature (1)..(133): Homolog of NCBI NO: 15236778 NR Description: calcineurin B-like protein 3
  misc_feature (1)..(133): Homolog of NCBI NO: 22137326 NR Description: calcineurin B [Pisum sativum]
  misc_feature (1)..(133): Homolog of NCBI NO: 16924116 NR Description: putative calcineurin B-like protein [Oryza sativa]
  misc_feature (1)..(133): Homolog of NCBI NO: 30687272 NR Description: calcineurin B-like protein 3 (CBL3) [Arabidopsis
  misc_feature (1)..(136): Homolog of NCBI NO: 15238015 NR Description: calcineurin B 1
  misc_feature (1)..(136): Homolog of NCBI NO: 18414931 NR Description: calcineurin B-like protein 1
MFDVKRKGVIDFGDFVRSLNVFHPNASLEDKIDFTFRLYDMDCTGYIERQEVKQMLIALLCESEMKLADETIEIILDKTFEDADVNQDGKIDKLEWSDFVNKNPSLLKIMTLPYLRDITTTFPSFVFHSEVDEIAT

SEQ ID NO: 35422 - protein, 96 aa, Arabidopsis thaliana
  peptide (1)..(96): Ceres Seq. ID no. 12371576
  misc_feature (35)..(63): Pfam Name: EF hand Pfam Description: EF hand
  misc_feature (1)..(94): Homolog of NCBI NO: 15237928 NR Description: calcium sensor homolog (gb|AAC26110.1)
  misc_feature (1)..(96): Homolog of NCBI NO: 37536918 NR Description: putative calcineurin [Oryza sativa (japonica
  misc_feature (1)..(93): Homolog of NCBI NO: 21593228 NR Description: calcineurin B-like protein 2 [Arabidopsis
  misc_feature (1)..(93): Homolog of NCBI NO: 15241101 NR Description: calcineurin B-like protein 2 (gb|AAC26009.1)
  misc_feature (1)..(93): Homolog of NCBI NO: 15236778 NR Description: calcineurin B-like protein 3
  misc_feature (1)..(93): Homolog of NCBI NO: 22137326 NR Description: calcineurin B [Pisum sativum]
  misc_feature (1)..(93): Homolog of NCBI NO: 16924116 NR Description: putative calcineurin B-like protein [Oryza sativa]
  misc_feature (1)..(93): Homolog of NCBI NO: 30687272 NR Description: calcineurin B-like protein 3 (CBL3) [Arabidopsis
  misc_feature (1)..(96): Homolog of NCBI NO: 15238015 NR Description: calcineurin B 1
  misc_feature (1)..(96): Homolog of NCBI NO: 18414931 NR Description: calcineurin B-like protein 1
MDCTGYIERQEVKQMLIALLCESEMKLADETIEIILDKTFEDADVNQDGKIDKLEWSDFVNKNPSLLKIMTLPYLRDITTTFPSFVFHSEVDEIAT

SEQ ID NO: 35423 - DNA, 946 bp, Arabidopsis thaliana
  misc_feature (1)..(946): Ceres Seq. ID no. 13592449
  misc_feature: MA Experiment ID: 20000180 Result: Down-regulated in Transcription
  misc_feature: MA Experiment 20000180 PARAMETER Experiment Name: At_Germinating_Seeds_P Parameter: Age (hr) Value: 24 vs. 0
  misc_feature: MA Experiment 20000180 PARAMETER Experiment Name: At_Germinating_Seeds_P Parameter: Tissue Value: Germinating Seeds
  misc_feature: MA Experiment ID: 20000184 Result: Down-regulated in Transcription
  misc_feature: MA Experiment 20000184 PARAMETER Experiment Name: At_Shoots__P Parameter: Age (day) Value: 7
  misc_feature: MA Experiment 20000184 PARAMETER Experiment Name: At_Shoots__P Parameter: Tissue Value: Shoots vs. Whole Plant
  misc_feature: MA Experiment ID: 20000234 Result: Up-regulated in Transcription
  misc_feature: MA Experiment 20000234 PARAMETER Experiment Name: At_Siliques_P Parameter: Age (day) Value: 21
  misc_feature: MA Experiment 20000234 PARAMETER Experiment Name: At_Siliques_P Parameter: Organism Value: A. thaliana
  misc_feature: MA Experiment 20000234 PARAMETER Experiment Name: At_Siliques_P Parameter: Plant Line Value: WS
  misc_feature: MA Experiment 20000234 PARAMETER Experiment Name: At_Siliques_P Parameter: Tissue Value: Less Than 5mm Siliques vs. Whole Plant
  misc_feature: MA Experiment ID: 20000265 Result: Up-regulated in Transcription
  misc_feature: MA Experiment 20000265 PARAMETER Experiment Name: At_Open_Flower_P Parameter: Age (day) Value: 21
  misc_feature: MA Experiment 20000265 PARAMETER Experiment Name: At_Open_Flower_P Parameter: Plant Line Value: WS
  misc_feature: MA Experiment 20000265 PARAMETER Experiment Name: At_Open_Flower_P Parameter: Tissue Value: Closed Flower vs. Whole Plant
  misc_feature: MA Experiment ID: 20000437 Result: Up-regulated in Transcription
  misc_feature: MA Experiment 20000437 PARAMETER Experiment Name: At_Drought_P Parameter: Age (day) Value: 8
  misc_feature: MA Experiment 20000437 PARAMETER Experiment Name: At_Drought_P Parameter: Organism Value: A. thaliana
  misc_feature: MA Experiment 20000437 PARAMETER Experiment Name: At_Drought_P Parameter: Plant Line Value: WS
  misc_feature: MA Experiment 20000437 PARAMETER Experiment Name: At_Drought_P Parameter: Timepoint (hr) Value: 24
  misc_feature: MA Experiment 20000437 PARAMETER Experiment Name: At_Drought_P Parameter: Tissue Value: Whole Plant
  misc_feature: MA Experiment 20000437 PARAMETER Experiment Name: At_Drought_P Parameter: Treatment Value: Drought vs. No Drought
  misc_feature: MA Experiment ID: 20000495 Result: Up-regulated in Transcription
  misc_feature: MA Experiment 20000495 PARAMETER Experiment Name: At_Guard_Cells_P Parameter: Harvest Date Value: 8/2/2002
  misc_feature: MA Experiment 20000495 PARAMETER Experiment Name: At_Guard_Cells_P Parameter: Organism Value: A. thaliana
  misc_feature: MA Experiment 20000495 PARAMETER Experiment Name: At_Guard_Cells_P Parameter: Tissue Value: Guard Cells vs. Leaves
  misc_feature: MA Experiment ID: 20001451 Result: Down-regulated in Transcription
  misc_feature: MA Experiment 20001451 PARAMETER Experiment Name: At_Far-red-induction_P Parameter: Age (day) Value: 7
  misc_feature: MA Experiment 20001451 PARAMETER Experiment Name: At_Far-red-induction_P Parameter: Light Value: Far-red vs. White
  misc_feature: MA Experiment 20001451 PARAMETER Experiment Name: At_Far-red-induction_P Parameter: Organism Value: A. thaliana
  misc_feature: MA Experiment 20001451 PARAMETER Experiment Name: At_Far-red-induction_P Parameter: Plant Line Value: Columbia
  misc_feature: MA Experiment 20001451 PARAMETER Experiment Name: At_Far-red-induction_P Parameter: Timepoint (hr) Value: 24
  misc_feature: MA Experiment 20001451 PARAMETER Experiment Name: At_Far-red-induction_P Parameter: Tissue Value: Whole Plant
aaaaagtgagtgcggtgtttaatgggtttgtcaccaactttccattttcttaccaacgaagaagaagcagaaaaaaagtaaacaaagactaaaaaaaaaaagccagcatcttcggagttggtgggagagagacagagatggagaggagaaagattgtgatgtgtggtgttttatttcttcttggtttattatcagctgttactgccttcgtcgctgaagctactcgaatcaagagatctcaggtcacggttaccgtttcggattcaatcacaaaatgcacttatccaagaagtccagctttcaatctcggcttcacttcagctctctttctgatgatggctcagataatagtcagtgtctcaagcggttgtttctgttgtagaaaaggtcctgctccttcaaggtctaattggattatctccttaatctgctttgttgtttcctggttcacttttgtaatagctttcctcgtgctgctttctggagctgcactcaacgatgaacacaccgaggaatcaatgaatgctggtacctacttttgctacatagtgaaaccaggcgttttctctaccggtgctgtgctttcgcttgttactattgcccttgggattgtctactatttatgtttgacttcaaataagcaaattgttgctgccacaacgacccaaggaacaggaatagcaatggggcagcctcagattccagagagagtagaagatcctgtttttgttcatgaggatacttacatgagaagacagttcacttaaaaacagacaaagcttgcttgtaaagcacgttaggtttagtagaagatttagacaaaatgattaacggatatgtgtttgattaagagtattgaaactttgtaatgattgttattcttgattgaagtagaaatctttgagaaccccaaaaacgtcacttagttttgtagtttttttctctg

SEQ ID NO: 35424 - protein, 209 aa, Arabidopsis thaliana
  peptide (1)..(209): Ceres Seq. ID no. 13592450
  misc_feature (11)..(168): Homolog of NCBI NO: 21554630 NR Description: unknown [Arabidopsis thaliana]
  misc_feature (11)..(167): Homolog of NCBI NO: 18391509 NR Description: expressed protein [Arabidopsis thaliana]
  misc_feature (5)..(184): Homolog of NCBI NO: 38016521 NR Description: fiber protein Fb34 [Gossypium barbadense]
  misc_feature (8)..(184): Homolog of NCBI NO: 34394069 NR Description: unknown protein [Oryza sativa (japonica
  misc_feature (6)..(183): Homolog of NCBI NO: 38344206 NR Description: OSJNBa0064G10.22 [Oryza sativa (japonica
  misc_feature (1)..(32): Homolog of NCBI NO: 24413945 NR Description: contains ESTs
  misc_feature (79)..(208): Homolog of NCBI NO: 24413945 NR Description: contains ESTs
  misc_feature (1)..(208): Homolog of NCBI NO: 34897938 NR Description: ESTs AU082454(S3638),D41267(S3638) correspond to region of the predicted gene.~Similar to Arabidopsis thaliana DNA
  misc_feature (31)..(209): Homolog of NCBI NO: 10177066 NR Description: dbj|BAA92731.1~gene_id:MKP11.6~similar to unknown
  misc_feature (1)..(209): Homolog of NCBI NO: 18418215 NR Description: expressed protein [Arabidopsis thaliana]
  misc_feature (11)..(168): Homolog of NCBI NO: 21554630 NR Description: unknown [Arabidopsis thaliana]
  misc_feature (11)..(167): Homolog of NCBI NO: 18391509 NR Description: expressed protein [Arabidopsis thaliana]
  misc_feature (5)..(184): Homolog of NCBI NO: 38016521 NR Description: fiber protein Fb34 [Gossypium barbadense]
  misc_feature (8)..(184): Homolog of NCBI NO: 34394069 NR Description: unknown protein [Oryza sativa (japonica
  misc_feature (6)..(183): Homolog of NCBI NO: 38344206 NR Description: OSJNBa0064G10.22 [Oryza sativa (japonica
  misc_feature (1)..(32): Homolog of NCBI NO: 24413945 NR Description: contains ESTs
  misc_feature (79)..(208): Homolog of NCBI NO: 24413945 NR Description: contains ESTs
  misc_feature (1)..(208): Homolog of NCBI NO: 34897938 NR Description: ESTs AU082454(S3638),D41267(S3638) correspond to region of the predicted gene.~Similar to Arabidopsis thaliana DNA
  misc_feature (31)..(209): Homolog of NCBI NO: 10177066 NR Description: dbj|BAA92731.1~gene_id:MKP11.6~similar to unknown
  misc_feature (1)..(209): Homolog of NCBI NO: 18418215 NR Description: expressed protein [Arabidopsis thaliana]
MERRKIVMCGVLFLLGLLSAVTAFVAEATRIKRSQVTVTVSDSITKCTYPRSPAFNLGFTSALFLMMAQIIVSVSSGCFCCRKGPAPSRSNWIISLICFVVSWFTFVIAFLVLLSGAALNDEHTEESMNAGTYFCYIVKPGVFSTGAVLSLVTIALGIVYYLCLTSNKQIVAATTTQGTGIAMGQPQIPERVEDPVFVHEDTYMRRQFT

SEQ ID NO: 35425 - protein, 202 aa, Arabidopsis thaliana
  peptide (1)..(202): Ceres Seq. ID no. 13592451
  misc_feature (4)..(161): Homolog of NCBI NO: 21554630 NR Description: unknown [Arabidopsis thaliana]
  misc_feature (4)..(160): Homolog of NCBI NO: 18391509 NR Description: expressed protein [Arabidopsis thaliana]
  misc_feature (1)..(177): Homolog of NCBI NO: 38016521 NR Description: fiber protein Fb34 [Gossypium barbadense]
  misc_feature (1)..(177): Homolog of NCBI NO: 34394069 NR Description: unknown protein [Oryza sativa (japonica
  misc_feature (1)..(176): Homolog of NCBI NO: 38344206 NR Description: OSJNBa0064G10.22 [Oryza sativa (japonica
  misc_feature (1)..(25): Homolog of NCBI NO: 24413945 NR Description: contains ESTs
  misc_feature (72)..(201): Homolog of NCBI NO: 24413945 NR Description: contains ESTs
  misc_feature (1)..(201): Homolog of NCBI NO: 34897938 NR Description: ESTs AU082454(S3638),D41267(S3638) correspond to region of the predicted gene.~Similar to Arabidopsis thaliana DNA
  misc_feature (24)..(202): Homolog of NCBI NO: 10177066 NR Description: dbj|BAA92731.1~gene_id:MKP11.6~similar to unknown
  misc_feature (1)..(202): Homolog of NCBI NO: 18418215 NR Description: expressed protein [Arabidopsis thaliana]
  misc_feature (4)..(161): Homolog of NCBI NO: 21554630 NR Description: unknown [Arabidopsis thaliana]
  misc_feature (4)..(160): Homolog of NCBI NO: 18391509 NR Description: expressed protein [Arabidopsis thaliana]
  misc_feature (1)..(177): Homolog of NCBI NO: 38016521 NR Description: fiber protein Fb34 [Gossypium barbadense]
  misc_feature (1)..(177): Homolog of NCBI NO: 34394069 NR Description: unknown protein [Oryza sativa (japonica
  misc_feature (1)..(176): Homolog of NCBI NO: 38344206 NR Description: OSJNBa0064G10.22 [Oryza sativa (japonica
  misc_feature (1)..(25): Homolog of NCBI NO: 24413945 NR Description: contains ESTs
  misc_feature (72)..(201): Homolog of NCBI NO: 24413945 NR Description: contains ESTs
  misc_feature (1)..(201): Homolog of NCBI NO: 34897938 NR Description: ESTs AU082454(S3638),D41267(S3638) correspond to region of the predicted gene.~Similar to Arabidopsis thaliana DNA
  misc_feature (24)..(202): Homolog of NCBI NO: 10177066 NR Description: dbj|BAA92731.1~gene_id:MKP11.6~similar to unknown
  misc_feature (1)..(202): Homolog of NCBI NO: 18418215 NR Description: expressed protein [Arabidopsis thaliana]
MCGVLFLLGLLSAVTAFVAEATRIKRSQVTVTVSDSITKCTYPRSPAFNLGFTSALFLMMAQIIVSVSSGCFCCRKGPAPSRSNWIISLICFVVSWFTFVIAFLVLLSGAALNDEHTEESMNAGTYFCYIVKPGVFSTGAVLSLVTIALGIVYYLCLTSNKQIVAATTTQGTGIAMGQPQIPERVEDPVFVHEDTYMRRQFT

SEQ ID NO: 35426 - protein, 144 aa, Arabidopsis thaliana
  peptide (1)..(144): Ceres Seq. ID no. 13592452
  misc_feature (1)..(103): Homolog of NCBI NO: 18407003 NR Description: expressed protein [Arabidopsis thaliana]
  misc_feature (1)..(103): Homolog of NCBI NO: 21554630 NR Description: unknown [Arabidopsis thaliana]
  misc_feature (1)..(102): Homolog of NCBI NO: 18391509 NR Description: expressed protein [Arabidopsis thaliana]
  misc_feature (1)..(119): Homolog of NCBI NO: 38016521 NR Description: fiber protein Fb34 [Gossypium barbadense]
  misc_feature (1)..(119): Homolog of NCBI NO: 34394069 NR Description: unknown protein [Oryza sativa (japonica
  misc_feature (1)..(118): Homolog of NCBI NO: 38344206 NR Description: OSJNBa0064G10.22 [Oryza sativa (japonica
  misc_feature (14)..(143): Homolog of NCBI NO: 24413945 NR Description: contains ESTs
  misc_feature (1)..(143): Homolog of NCBI NO: 34897938 NR Description: ESTs AU082454(S3638),D41267(S3638) correspond to region of the predicted gene.~Similar to Arabidopsis thaliana DNA
  misc_feature (1)..(144): Homolog of NCBI NO: 10177066 NR Description: dbj|BAA92731.1~gene_id:MKP11.6~similar to unknown
  misc_feature (1)..(144): Homolog of NCBI NO: 18418215 NR Description: expressed protein [Arabidopsis thaliana]
  misc_feature (1)..(103): Homolog of NCBI NO: 18407003 NR Description: expressed protein [Arabidopsis thaliana]
  misc_feature (1)..(103): Homolog of NCBI NO: 21554630 NR Description: unknown [Arabidopsis thaliana]
  misc_feature (1)..(102): Homolog of NCBI NO: 18391509 NR Description: expressed protein [Arabidopsis thaliana]
  misc_feature (1)..(119): Homolog of NCBI NO: 38016521 NR Description: fiber protein Fb34 [Gossypium barbadense]
  misc_feature (1)..(119): Homolog of NCBI NO: 34394069 NR Description: unknown protein [Oryza sativa (japonica
  misc_feature (1)..(118): Homolog of NCBI NO: 38344206 NR Description: OSJNBa0064G10.22 [Oryza sativa (japonica
  misc_feature (14)..(143): Homolog of NCBI NO: 24413945 NR Description: contains ESTs
  misc_feature (1)..(143): Homolog of NCBI NO: 34897938 NR Description: ESTs AU082454(S3638),D41267(S3638) correspond to region of the predicted gene.~Similar to Arabidopsis thaliana DNA
  misc_feature (1)..(144): Homolog of NCBI NO: 10177066 NR Description: dbj|BAA92731.1~gene_id:MKP11.6~similar to unknown
  misc_feature (1)..(144): Homolog of NCBI NO: 18418215 NR Description: expressed protein [Arabidopsis thaliana]
MMAQIIVSVSSGCFCCRKGPAPSRSNWIISLICFVVSWFTFVIAFLVLLSGAALNDEHTEESMNAGTYFCYIVKPGVFSTGAVLSLVTIALGIVYYLCLTSNKQIVAATTTQGTGIAMGQPQIPERVEDPVFVHEDTYMRRQFT

SEQ ID NO: 35427 - DNA, 1018 bp, Arabidopsis thaliana
  misc_feature (1)..(1018): Ceres Seq. ID no. 13488235
  misc_feature: MA Experiment ID: 108462 Result: Up-regulated in Transcription
  misc_feature: MA Experiment 108462 PARAMETER Experiment Name: At_Germinating_Seeds_cDNA_P Parameter: Age (day) Value: 2 vs. 0
  misc_feature: MA Experiment 108462 PARAMETER Experiment Name: At_Germinating_Seeds_cDNA_P Parameter: Tissue Value: Germinating Seeds
  misc_feature: MA Experiment ID: 108463 Result: Up-regulated in Transcription
  misc_feature: MA Experiment 108463 PARAMETER Experiment Name: At_Germinating_Seeds_cDNA_P Parameter: Age (day) Value: 3 vs. 0
  misc_feature: MA Experiment 108463 PARAMETER Experiment Name: At_Germinating_Seeds_cDNA_P Parameter: Tissue Value: Germinating Seeds
  misc_feature: MA Experiment ID: 108488 Result: Down-regulated in Transcription
  misc_feature: MA Experiment ID: 108573 Result: Up-regulated in Transcription
  misc_feature: MA Experiment 108573 PARAMETER Experiment Name: At_Drought_cDNA_P Parameter: Timepoint (hr) Value: 6
  misc_feature: MA Experiment 108573 PARAMETER Experiment Name: At_Drought_cDNA_P Parameter: Tissue Value: Aerial
  misc_feature: MA Experiment 108573 PARAMETER Experiment Name: At_Drought_cDNA_P Parameter: Treatment Value: Drought vs. No Drought
  misc_feature: MA Experiment ID: 20000086 Result: Down-regulated in Transcription
  misc_feature: MA Experiment 20000086 PARAMETER Experiment Name: At_100uM_ABA_Mutants_cDNA_P Parameter: Plant Line Value: CS22
  misc_feature: MA Experiment 20000086 PARAMETER Experiment Name: At_100uM_ABA_Mutants_cDNA_P Parameter: Timepoint (hr) Value: 6
  misc_feature: MA Experiment 20000086 PARAMETER Experiment Name: At_100uM_ABA_Mutants_cDNA_P Parameter: Tissue Value: Aerial
  misc_feature: MA Experiment 20000086 PARAMETER Experiment Name: At_100uM_ABA_Mutants_cDNA_P Parameter: Treatment Value: 100uM ABA vs. No Treatment
  misc_feature: MA Experiment ID: 20000179 Result: Up-regulated in Transcription
  misc_feature: MA Experiment 20000179 PARAMETER Experiment Name: At_Germinating_Seeds_P Parameter: Age (hr) Value: 6 vs. 0
  misc_feature: MA Experiment 20000179 PARAMETER Experiment Name: At_Germinating_Seeds_P Parameter: Tissue Value: Germinating Seeds
  misc_feature: MA Experiment ID: 20000180 Result: Up-regulated in Transcription
  misc_feature: MA Experiment 20000180 PARAMETER Experiment Name: At_Germinating_Seeds_P Parameter: Age (hr) Value: 24 vs. 0
  misc_feature: MA Experiment 20000180 PARAMETER Experiment Name: At_Germinating_Seeds_P Parameter: Tissue Value: Germinating Seeds
  misc_feature: MA Experiment ID: 20001451 Result: Up-regulated in Transcription
  misc_feature: MA Experiment 20001451 PARAMETER Experiment Name: At_Far-red-induction_P Parameter: Age (day) Value: 7
  misc_feature: MA Experiment 20001451 PARAMETER Experiment Name: At_Far-red-induction_P Parameter: Light Value: Far-red vs. White
  misc_feature: MA Experiment 20001451 PARAMETER Experiment Name: At_Far-red-induction_P Parameter: Organism Value: A. thaliana
  misc_feature: MA Experiment 20001451 PARAMETER Experiment Name: At_Far-red-induction_P Parameter: Plant Line Value: Columbia
  misc_feature: MA Experiment 20001451 PARAMETER Experiment Name: At_Far-red-induction_P Parameter: Timepoint (hr) Value: 24
  misc_feature: MA Experiment 20001451 PARAMETER Experiment Name: At_Far-red-induction_P Parameter: Tissue Value: Whole Plant
  misc_feature: MA Experiment ID: 20001560 Result: Down-regulated in Transcription
  misc_feature: MA Experiment 20001560 PARAMETER Experiment Name: At_Drought_Soil_Dry_P Parameter: Age (day) Value: 28
  misc_feature: MA Experiment 20001560 PARAMETER Experiment Name: At_Drought_Soil_Dry_P Parameter: Organism Value: A. thaliana
  misc_feature: MA Experiment 20001560 PARAMETER Experiment Name: At_Drought_Soil_Dry_P Parameter: Plant Line Value: WS
  misc_feature: MA Experiment 20001560 PARAMETER Experiment Name: At_Drought_Soil_Dry_P Parameter: Post Timepoint (hr) Value: None
  misc_feature: MA Experiment 20001560 PARAMETER Experiment Name: At_Drought_Soil_Dry_P Parameter: Post-Treatment Value: None
  misc_feature: MA Experiment 20001560 PARAMETER Experiment Name: At_Drought_Soil_Dry_P Parameter: Timepoint (day) Value: 14
  misc_feature: MA Experiment 20001560 PARAMETER Experiment Name: At_Drought_Soil_Dry_P Parameter: Treatment Value: Drought vs. No Drought
  misc_feature: MA Experiment ID: 20001905 Result: Up-regulated in Transcription
  misc_feature: MA Experiment 20001905 PARAMETER Experiment Name: At_Drought_Reproduction_P Parameter: Age (day) Value: 40
  misc_feature: MA Experiment 20001905 PARAMETER Experiment Name: At_Drought_Reproduction_P Parameter: Organism Value: A. thaliana
  misc_feature: MA Experiment 20001905 PARAMETER Experiment Name: At_Drought_Reproduction_P Parameter: Plant Line Value: WS
  misc_feature: MA Experiment 20001905 PARAMETER Experiment Name: At_Drought_Reproduction_P Parameter: Timepoint (day) Value: 10
  misc_feature: MA Experiment 20001905 PARAMETER Experiment Name: At_Drought_Reproduction_P Parameter: Tissue Value: Rosettes
  misc_feature: MA Experiment 20001905 PARAMETER Experiment Name: At_Drought_Reproduction_P Parameter: Treatment Value: Drought vs. No Drought
aggagactcttgctttttcacaaaaaaaaaagaaagagatagagcagcaaccccagcagcatcgaagatcatcgatcggtttctctctttcattaatcagatctaattgatacccaaccttcttcatcggaggccgtatctcacgaggaaacatgggcggtagatttggagtcctcctagtcctcttcctcttgagctggtcttgtcatgctacaaacccgattcttctcgaaccattcgaatcagctcatgatgacaaccaagtctgtgaactatgtgacaagtatgtcacgctagtcattgattaccttcaagactacgacaaccagaatgaactcgttgaggcccttcatatcagctgctctcagattcctcctctcaaaaaacagtgtctttcaatggtagatcattacacccaacttttcttcacacaagtctctactatcaaatcagaccaaatctgcaaacggcttaacctctgtcaagctgtgacaccggcctttgcccctcaagtccatcaaggaaactgcgaggcttgccgcgagactgtctctgaggtcgtcaccaaactcaaggatcctgagactaagctgaagataattcggttacttctcaaggaatgcaagtcgcttaacaattaccaggacaagtgcaagaagatggtattcgagtacgggcctctgatgcttacggatttgcagaagtttctggagaagaaagacgtgtgcactatcctccacgtctgtccaggtccagccacccaccgtgactacgttcctgcggtggagtcattggcagattcgtaaattcggccaccttggtttcgtcgtcattcacactaataccatgccatgatcgtgatgctaatttaatttggtaacccggtggtcatgtaaatactgattgatatattaaaaacataactacacgattgatgattcttgtgtgatttgaaaagaacgctgtctaaaggcccattgtccatcgatgggcctttttgctaatttctacattgctc

SEQ ID NO: 35428 - protein, 217 aa, Arabidopsis thaliana
  peptide (1)..(217): Ceres Seq. ID no. 13488236
  misc_feature (36)..(74): Pfam Name: Saposin-like type B, region 1 Pfam Description: Saposin-like type B, region 1
  misc_feature (39)..(203): Homolog of NCBI NO: 26324414 NR Description: unnamed protein product [Mus musculus]
  misc_feature (39)..(203): Homolog of NCBI NO: 26364659 NR Description: unnamed protein product [Mus musculus]
  misc_feature (64)..(160): Homolog of NCBI NO: 18399278 NR Description: cyclin, putative [Arabidopsis thaliana]
  misc_feature (41)..(201): Homolog of NCBI NO: 6942199 NR Description: putative protein [Vitis riparia]
  misc_feature (35)..(198): Homolog of NCBI NO: 34896130 NR Description: P0701D05.19 [Oryza sativa (japonica
  misc_feature (1)..(199): Homolog of NCBI NO: 15231028 NR Description: expressed protein [Arabidopsis thaliana]
  misc_feature (1)..(217): Homolog of NCBI NO: 15241065 NR Description: expressed protein [Arabidopsis thaliana]
MGGRFGVLLVLFLLSWSCHATNPILLEPFESAHDDNQVCELCDKYVTLVIDYLQDYDNQNELVEALHISCSQIPPLKKQCLSMVDHYTQLFFTQVSTIKSDQICKRLNLCQAVTPAFAPQVHQGNCEACRETVSEVVTKLKDPETKLKIIRLLLKECKSLNNYQDKCKKMVFEYGPLMLTDLQKFLEKKDVCTILHVCPGPATHRDYVPAVESLADS

SEQ ID NO: 35429 - protein, 135 aa, Arabidopsis thaliana
  peptide (1)..(135): Ceres Seq. ID no. 13488237
  misc_feature (82)..(116): Pfam Name: Saposin-like type B, region 2 Pfam Description: Saposin-like type B, region 2
  misc_feature (1)..(121): Homolog of NCBI NO: 26324414 NR Description: unnamed protein product [Mus musculus]
  misc_feature (1)..(121): Homolog of NCBI NO: 26364659 NR Description: unnamed protein product [Mus musculus]
  misc_feature (1)..(78): Homolog of NCBI NO: 18399278 NR Description: cyclin, putative [Arabidopsis thaliana]
  misc_feature (1)..(119): Homolog of NCBI NO: 6942199 NR Description: putative protein [Vitis riparia]
  misc_feature (1)..(116): Homolog of NCBI NO: 34896130 NR Description: P0701D05.19 [Oryza sativa (japonica
  misc_feature (1)..(117): Homolog of NCBI NO: 15231028 NR Description: expressed protein [Arabidopsis thaliana]
  misc_feature (1)..(135): Homolog of NCBI NO: 15241065 NR Description: expressed protein [Arabidopsis thaliana]
MVDHYTQLFFTQVSTIKSDQICKRLNLCQAVTPAFAPQVHQGNCEACRETVSEVVTKLKDPETKLKIIRLLLKECKSLNNYQDKCKKMVFEYGPLMLTDLQKFLEKKDVCTILHVCPGPATHRDYVPAVESLADS

SEQ ID NO: 35430 - DNA, 617 bp, Arabidopsis thaliana
  misc_feature (1)..(617): Ceres Seq. ID no. 12562672
  misc_feature: MA Experiment ID: 108435 Result: Down-regulated in Transcription
  misc_feature: MA Experiment 108435 PARAMETER Experiment Name: At_stm_Mutants_cDNA_P Parameter: Plant Line Value: wt Landsburg vs stm
  misc_feature: MA Experiment 108435 PARAMETER Experiment Name: At_stm_Mutants_cDNA_P Parameter: Tissue Value: Shoot Apical Meristem Region
  misc_feature: MA Experiment ID: 108461 Result: Up-regulated in Transcription
  misc_feature: MA Experiment 108461 PARAMETER Experiment Name: At_Germinating_Seeds_cDNA_P Parameter: Age (day) Value: 1 vs. 0
  misc_feature: MA Experiment 108461 PARAMETER Experiment Name: At_Germinating_Seeds_cDNA_P Parameter: Tissue Value: Germinating Seeds
  misc_feature: MA Experiment ID: 108462 Result: Up-regulated in Transcription
  misc_feature: MA Experiment 108462 PARAMETER Experiment Name: At_Germinating_Seeds_cDNA_P Parameter: Age (day) Value: 2 vs. 0
  misc_feature: MA Experiment 108462 PARAMETER Experiment Name: At_Germinating_Seeds_cDNA_P Parameter: Tissue Value: Germinating Seeds
  misc_feature: MA Experiment ID: 108464 Result: Up-regulated in Transcription
  misc_feature: MA Experiment 108464 PARAMETER Experiment Name: At_Germinating_Seeds_cDNA_P Parameter: Age (day) Value: 4 vs. 0
  misc_feature: MA Experiment 108464 PARAMETER Experiment Name: At_Germinating_Seeds_cDNA_P Parameter: Tissue Value: Germinating Seeds
  misc_feature: MA Experiment ID: 108488 Result: Down-regulated in Transcription
  misc_feature: MA Experiment ID: 108573 Result: Up-regulated in Transcription
  misc_feature: MA Experiment 108573 PARAMETER Experiment Name: At_Drought_cDNA_P Parameter: Timepoint (hr) Value: 6
  misc_feature: MA Experiment 108573 PARAMETER Experiment Name: At_Drought_cDNA_P Parameter: Tissue Value: Aerial
  misc_feature: MA Experiment 108573 PARAMETER Experiment Name: At_Drought_cDNA_P Parameter: Treatment Value: Drought vs. No Drought
  misc_feature: MA Experiment ID: 108577 Result: Down-regulated in Transcription
  misc_feature: MA Experiment 108577 PARAMETER Experiment Name: At_42deg_Heat_cDNA_P Parameter: Temperature (deg C) Value: 42 vs. 22
  misc_feature: MA Experiment 108577 PARAMETER Experiment Name: At_42deg_Heat_cDNA_P Parameter: Timepoint (hr) Value: 6
  misc_feature: MA Experiment 108577 PARAMETER Experiment Name: At_42deg_Heat_cDNA_P Parameter: Tissue Value: Aerial
  misc_feature: MA Experiment ID: 108608 Result: Up-regulated in Transcription
  misc_feature: MA Experiment 108608 PARAMETER Experiment Name: At_100uM_ABA_cDNA_P Parameter: Timepoint (hr) Value: 1
  misc_feature: MA Experiment 108608 PARAMETER Experiment Name: At_100uM_ABA_cDNA_P Parameter: Tissue Value: Aerial
  misc_feature: MA Experiment 108608 PARAMETER Experiment Name: At_100uM_ABA_cDNA_P Parameter: Treatment Value: 100uM ABA vs. No Treatment
  misc_feature: MA Experiment ID: 108609 Result: Up-regulated in Transcription
  misc_feature: MA Experiment 108609 PARAMETER Experiment Name: At_100uM_ABA_cDNA_P Parameter: Timepoint (hr) Value: 24
  misc_feature: MA Experiment 108609 PARAMETER Experiment Name: At_100uM_ABA_cDNA_P Parameter: Tissue Value: Aerial
  misc_feature: MA Experiment 108609 PARAMETER Experiment Name: At_100uM_ABA_cDNA_P Parameter: Treatment Value: 100uM ABA vs. No Treatment
  misc_feature: MA Experiment ID: 20000069 Result: Up-regulated in Transcription
  misc_feature: MA Experiment 20000069 PARAMETER Experiment Name: At_100uM_ABA_Mutants_cDNA_P Parameter: Plant Line Value: CS23
  misc_feature: MA Experiment 20000069 PARAMETER Experiment Name: At_100uM_ABA_Mutants_cDNA_P Parameter: Timepoint (hr) Value: 6
  misc_feature: MA Experiment 20000069 PARAMETER Experiment Name: At_100uM_ABA_Mutants_cDNA_P Parameter: Tissue Value: Aerial
  misc_feature: MA Experiment 20000069 PARAMETER Experiment Name: At_100uM_ABA_Mutants_cDNA_P Parameter: Treatment Value: 100uM ABA vs. No Treatment
  misc_feature: MA Experiment ID: 20000070 Result: Up-regulated in Transcription
  misc_feature: MA Experiment 20000070 PARAMETER Experiment Name: At_100uM_ABA_Mutants_cDNA_P Parameter: Plant Line Value: CS24
  misc_feature: MA Experiment 20000070 PARAMETER Experiment Name: At_100uM_ABA_Mutants_cDNA_P Parameter: Timepoint (hr) Value: 6
  misc_feature: MA Experiment 20000070 PARAMETER Experiment Name: At_100uM_ABA_Mutants_cDNA_P Parameter: Tissue Value: Aerial
  misc_feature: MA Experiment 20000070 PARAMETER Experiment Name: At_100uM_ABA_Mutants_cDNA_P Parameter: Treatment Value: 100uM ABA vs. No Treatment
  misc_feature: MA Experiment ID: 20000071 Result: Up-regulated in Transcription
  misc_feature: MA Experiment 20000071 PARAMETER Experiment Name: At_100uM_ABA_Mutants_cDNA_P Parameter: Plant Line Value: CS8104
  misc_feature: MA Experiment 20000071 PARAMETER Experiment Name: At_100uM_ABA_Mutants_cDNA_P Parameter: Timepoint (hr) Value: 6
  misc_feature: MA Experiment 20000071 PARAMETER Experiment Name: At_100uM_ABA_Mutants_cDNA_P Parameter: Tissue Value: Aerial
  misc_feature: MA Experiment 20000071 PARAMETER Experiment Name: At_100uM_ABA_Mutants_cDNA_P Parameter: Treatment Value: 100uM ABA vs. No Treatment
  misc_feature: MA Experiment ID: 20000072 Result: Up-regulated in Transcription
  misc_feature: MA Experiment 20000072 PARAMETER Experiment Name: At_100uM_ABA_Mutants_cDNA_P Parameter: Plant Line Value: CS8105
  misc_feature: MA Experiment 20000072 PARAMETER Experiment Name: At_100uM_ABA_Mutants_cDNA_P Parameter: Timepoint (hr) Value: 6
  misc_feature: MA Experiment 20000072 PARAMETER Experiment Name: At_100uM_ABA_Mutants_cDNA_P Parameter: Tissue Value: Aerial
  misc_feature: MA Experiment 20000072 PARAMETER Experiment Name: At_100uM_ABA_Mutants_cDNA_P Parameter: Treatment Value: 100uM ABA vs. No Treatment
  misc_feature: MA Experiment ID: 20000086 Result: Up-regulated in Transcription
  misc_feature: MA Experiment 20000086 PARAMETER Experiment Name: At_100uM_ABA_Mutants_cDNA_P Parameter: Plant Line Value: CS22
  misc_feature: MA Experiment 20000086 PARAMETER Experiment Name: At_100uM_ABA_Mutants_cDNA_P Parameter: Timepoint (hr) Value: 6
  misc_feature: MA Experiment 20000086 PARAMETER Experiment Name: At_100uM_ABA_Mutants_cDNA_P Parameter: Tissue Value: Aerial
  misc_feature: MA Experiment 20000086 PARAMETER Experiment Name: At_100uM_ABA_Mutants_cDNA_P Parameter: Treatment Value: 100uM ABA vs. No Treatment
  misc_feature: MA Experiment ID: 20000087 Result: Up-regulated in Transcription
  misc_feature: MA Experiment 20000087 PARAMETER Experiment Name: At_100uM_ABA_Mutants_cDNA_P Parameter: Plant Line Value: WS
  misc_feature: MA Experiment 20000087 PARAMETER Experiment Name: At_100uM_ABA_Mutants_cDNA_P Parameter: Timepoint (hr) Value: 6
  misc_feature: MA Experiment 20000087 PARAMETER Experiment Name: At_100uM_ABA_Mutants_cDNA_P Parameter: Tissue Value: Aerial
  misc_feature: MA Experiment 20000087 PARAMETER Experiment Name: At_100uM_ABA_Mutants_cDNA_P Parameter: Treatment Value: 100uM ABA vs. No Treatment
  misc_feature: MA Experiment ID: 20000088 Result: Up-regulated in Transcription
  misc_feature: MA Experiment 20000088 PARAMETER Experiment Name: At_100uM_ABA_Mutants_cDNA_P Parameter: Plant Line Value: Landsberg
  misc_feature: MA Experiment 20000088 PARAMETER Experiment Name: At_100uM_ABA_Mutants_cDNA_P Parameter: Timepoint (hr) Value: 6
  misc_feature: MA Experiment 20000088 PARAMETER Experiment Name: At_100uM_ABA_Mutants_cDNA_P Parameter: Tissue Value: Aerial
  misc_feature: MA Experiment 20000088 PARAMETER Experiment Name: At_100uM_ABA_Mutants_cDNA_P Parameter: Treatment Value: 100uM ABA vs. No Treatment
  misc_feature: MA Experiment ID: 20000089 Result: Up-regulated in Transcription
  misc_feature: MA Experiment ID: 20000090 Result: Up-regulated in Transcription
  misc_feature: MA Experiment ID: 20000113 Result: Up-regulated in Transcription
  misc_feature: MA Experiment 20000113 PARAMETER Experiment Name: At_42deg_Heat_cDNA_P Parameter: Temperature (deg C) Value: 42 vs. 22
  misc_feature: MA Experiment 20000113 PARAMETER Experiment Name: At_42deg_Heat_cDNA_P Parameter: Timepoint (hr) Value: 8
  misc_feature: MA Experiment 20000113 PARAMETER Experiment Name: At_42deg_Heat_cDNA_P Parameter: Tissue Value: Aerial
  misc_feature: MA Experiment ID: 20000117 Result: Up-regulated in Transcription
  misc_feature: MA Experiment 20000117 PARAMETER Experiment Name: At_100uM_ABA_Mutants_cDNA_P Parameter: Plant Line Value: Columbia
  misc_feature: MA Experiment 20000117 PARAMETER Experiment Name: At_100uM_ABA_Mutants_cDNA_P Parameter: Timepoint (hr) Value: 6
  misc_feature: MA Experiment 20000117 PARAMETER Experiment Name: At_100uM_ABA_Mutants_cDNA_P Parameter: Tissue Value: Aerial
  misc_feature: MA Experiment 20000117 PARAMETER Experiment Name: At_100uM_ABA_Mutants_cDNA_P Parameter: Treatment Value: 100uM ABA vs. No Treatment
  misc_feature: MA Experiment ID: 20000166 Result: Up-regulated in Transcription
  misc_feature: MA Experiment 20000166 PARAMETER Experiment Name: At_100uM_ABA_P Parameter: Age (day) Value: 14
  misc_feature: MA Experiment 20000166 PARAMETER Experiment Name: At_100uM_ABA_P Parameter: Organism Value: A. thaliana
  misc_feature: MA Experiment 20000166 PARAMETER Experiment Name: At_100uM_ABA_P Parameter: Plant Line Value: WS
  misc_feature: MA Experiment 20000166 PARAMETER Experiment Name: At_100uM_ABA_P Parameter: Timepoint (hr) Value: 1
  misc_feature: MA Experiment 20000166 PARAMETER Experiment Name: At_100uM_ABA_P Parameter: Tissue Value: Aerial
  misc_feature: MA Experiment 20000166 PARAMETER Experiment Name: At_100uM_ABA_P Parameter: Treatment Value: 100uM ABA vs. No Treatment
  misc_feature: MA Experiment ID: 20000180 Result: Up-regulated in Transcription
  misc_feature: MA Experiment 20000180 PARAMETER Experiment Name: At_Germinating_Seeds_P Parameter: Age (hr) Value: 24 vs. 0
  misc_feature: MA Experiment 20000180 PARAMETER Experiment Name: At_Germinating_Seeds_P Parameter: Tissue Value: Germinating Seeds
  misc_feature: MA Experiment ID: 20000184 Result: Down-regulated in Transcription
  misc_feature: MA Experiment 20000184 PARAMETER Experiment Name: At_Shoots__P Parameter: Age (day) Value: 7
  misc_feature: MA Experiment 20000184 PARAMETER Experiment Name: At_Shoots__P Parameter: Tissue Value: Shoots vs. Whole Plant
  misc_feature: MA Experiment ID: 20000224 Result: Up-regulated in Transcription
  misc_feature: MA Experiment ID: 20000227 Result: Up-regulated in Transcription
  misc_feature: MA Experiment 20000227 PARAMETER Experiment Name: At_Root-Tips-vs-Tops_P Parameter: Tissue Value: Root Tips vs. Root Tops
  misc_feature: MA Experiment ID: 20000437 Result: Up-regulated in Transcription
  misc_feature: MA Experiment 20000437 PARAMETER Experiment Name: At_Drought_P Parameter: Age (day) Value: 8
  misc_feature: MA Experiment 20000437 PARAMETER Experiment Name: At_Drought_P Parameter: Organism Value: A. thaliana
  misc_feature: MA Experiment 20000437 PARAMETER Experiment Name: At_Drought_P Parameter: Plant Line Value: WS
  misc_feature: MA Experiment 20000437 PARAMETER Experiment Name: At_Drought_P Parameter: Timepoint (hr) Value: 24
  misc_feature: MA Experiment 20000437 PARAMETER Experiment Name: At_Drought_P Parameter: Tissue Value: Whole Plant
  misc_feature: MA Experiment 20000437 PARAMETER Experiment Name: At_Drought_P Parameter: Treatment Value: Drought vs. No Drought
  misc_feature: MA Experiment ID: 20000453 Result: Up-regulated in Transcription
  misc_feature: MA Experiment 20000453 PARAMETER Experiment Name: At_100uM_ABA_P Parameter: Age (day) Value: 15
  misc_feature: MA Experiment 20000453 PARAMETER Experiment Name: At_100uM_ABA_P Parameter: Organism Value: A. thaliana
  misc_feature: MA Experiment 20000453 PARAMETER Experiment Name: At_100uM_ABA_P Parameter: Plant Line Value: WS
  misc_feature: MA Experiment 20000453 PARAMETER Experiment Name: At_100uM_ABA_P Parameter: Timepoint (hr) Value: 24
  misc_feature: MA Experiment 20000453 PARAMETER Experiment Name: At_100uM_ABA_P Parameter: Tissue Value: Aerial
  misc_feature: MA Experiment 20000453 PARAMETER Experiment Name: At_100uM_ABA_P Parameter: Treatment Value: 100uM ABA vs. No Treatment
  misc_feature: MA Experiment ID: 20000496 Result: Down-regulated in Transcription
  misc_feature: MA Experiment 20000496 PARAMETER Experiment Name: At_Guard_Cells_P Parameter: Harvest Date Value: 7/19/2002
  misc_feature: MA Experiment 20000496 PARAMETER Experiment Name: At_Guard_Cells_P Parameter: Organism Value: Canola
  misc_feature: MA Experiment 20000496 PARAMETER Experiment Name: At_Guard_Cells_P Parameter: Tissue Value: Guard Cells vs. Leaves
  misc_feature: MA Experiment ID: 20001248 Result: Up-regulated in Transcription
  misc_feature: MA Experiment 20001248 PARAMETER Experiment Name: At_Far-red-induction_P Parameter: Age (day) Value: 7
  misc_feature: MA Experiment 20001248 PARAMETER Experiment Name: At_Far-red-induction_P Parameter: Light Value: Far-red vs. White
  misc_feature: MA Experiment 20001248 PARAMETER Experiment Name: At_Far-red-induction_P Parameter: Organism Value: A. thaliana
  misc_feature: MA Experiment 20001248 PARAMETER Experiment Name: At_Far-red-induction_P Parameter: Plant Line Value: Columbia
  misc_feature: MA Experiment 20001248 PARAMETER Experiment Name: At_Far-red-induction_P Parameter: Timepoint (hr) Value: 4
  misc_feature: MA Experiment 20001248 PARAMETER Experiment Name: At_Far-red-induction_P Parameter: Tissue Value: Whole Plant
  misc_feature: MA Experiment ID: 20001451 Result: Up-regulated in Transcription
  misc_feature: MA Experiment 20001451 PARAMETER Experiment Name: At_Far-red-induction_P Parameter: Age (day) Value: 7
  misc_feature: MA Experiment 20001451 PARAMETER Experiment Name: At_Far-red-induction_P Parameter: Light Value: Far-red vs. White
  misc_feature: MA Experiment 20001451 PARAMETER Experiment Name: At_Far-red-induction_P Parameter: Organism Value: A. thaliana
  misc_feature: MA Experiment 20001451 PARAMETER Experiment Name: At_Far-red-induction_P Parameter: Plant Line Value: Columbia
  misc_feature: MA Experiment 20001451 PARAMETER Experiment Name: At_Far-red-induction_P Parameter: Timepoint (hr) Value: 24
  misc_feature: MA Experiment 20001451 PARAMETER Experiment Name: At_Far-red-induction_P Parameter: Tissue Value: Whole Plant
  misc_feature: MA Experiment ID: 20001557 Result: Down-regulated in Transcription
  misc_feature: MA Experiment 20001557 PARAMETER Experiment Name: At_Drought_Soil_Dry_P Parameter: Age (day) Value: 27
  misc_feature: MA Experiment 20001557 PARAMETER Experiment Name: At_Drought_Soil_Dry_P Parameter: Organism Value: A. thaliana
  misc_feature: MA Experiment 20001557 PARAMETER Experiment Name: At_Drought_Soil_Dry_P Parameter: Plant Line Value: WS
  misc_feature: MA Experiment 20001557 PARAMETER Experiment Name: At_Drought_Soil_Dry_P Parameter: Post Timepoint (hr) Value: 3
  misc_feature: MA Experiment 20001557 PARAMETER Experiment Name: At_Drought_Soil_Dry_P Parameter: Post-Treatment Value: Re-Water vs. No Drought
  misc_feature: MA Experiment 20001557 PARAMETER Experiment Name: At_Drought_Soil_Dry_P Parameter: Timepoint (day) Value: 13
  misc_feature: MA Experiment 20001557 PARAMETER Experiment Name: At_Drought_Soil_Dry_P Parameter: Treatment Value: Drought vs. No Drought
  misc_feature: MA Experiment ID: 20001558 Result: Down-regulated in Transcription
  misc_feature: MA Experiment 20001558 PARAMETER Experiment Name: At_Drought_Soil_Dry_P Parameter: Age (day) Value: 27
  misc_feature: MA Experiment 20001558 PARAMETER Experiment Name: At_Drought_Soil_Dry_P Parameter: Organism Value: A. thaliana
  misc_feature: MA Experiment 20001558 PARAMETER Experiment Name: At_Drought_Soil_Dry_P Parameter: Plant Line Value: WS
  misc_feature: MA Experiment 20001558 PARAMETER Experiment Name: At_Drought_Soil_Dry_P Parameter: Post Timepoint (hr) Value: 6
  misc_feature: MA Experiment 20001558 PARAMETER Experiment Name: At_Drought_Soil_Dry_P Parameter: Post-Treatment Value: Re-Water vs. No Drought
  misc_feature: MA Experiment 20001558 PARAMETER Experiment Name: At_Drought_Soil_Dry_P Parameter: Timepoint (day) Value: 13
  misc_feature: MA Experiment 20001558 PARAMETER Experiment Name: At_Drought_Soil_Dry_P Parameter: Treatment Value: Drought vs. No Drought
  misc_feature: MA Experiment ID: 20001911 Result: Up-regulated in Transcription
  misc_feature: MA Experiment 20001911 PARAMETER Experiment Name: At_Drought_Reproduction_P Parameter: Age (day) Value: 40
  misc_feature: MA Experiment 20001911 PARAMETER Experiment Name: At_Drought_Reproduction_P Parameter: Organism Value: A. thaliana
  misc_feature: MA Experiment 20001911 PARAMETER Experiment Name: At_Drought_Reproduction_P Parameter: Plant Line Value: WS
  misc_feature: MA Experiment 20001911 PARAMETER Experiment Name: At_Drought_Reproduction_P Parameter: Timepoint (day) Value: 10
  misc_feature: MA Experiment 20001911 PARAMETER Experiment Name: At_Drought_Reproduction_P Parameter: Tissue Value: Flowers
  misc_feature: MA Experiment 20001911 PARAMETER Experiment Name: At_Drought_Reproduction_P Parameter: Treatment Value: Drought vs. No Drought
aatatataactttaaaacattgaagctaacttctcacaagtcaccaccatttctctctagaaaaaatctgaaaaacaaaaccatctcaaagtttcttgagaagaaaaaaagggtcaagaaagatgcctaaagacaggaatatcggaatcgccatggatttctcagagagcagcaagaacgctctgaaatgggcgatcgagaacttagcagacaaaggagacacgatttacatcatccacactctaccactctctggcgatgaatctcgtaactccctctggttcaaatccggttctcctctcataccgttggcagagtttagggaaccggagattatggagaaatacggtgtcaaaaccgacatcgcatgtcttgatatgctcgacactggttcgaggcagaaagaggtgcatgtagtgaccaagttatactggggagatgcaagagagaagcttgttgatgctgttaaagatcttaaactcgattctattgtcatgggaagcagaggactcagtgctcttcaaaggataataatgggaagcgtgagcagctttgtgatccaacacgcgccttgccctgtcaccgttgtcaaggataacgaataaacgattctcact

SEQ ID NO: 35431 - protein, 160 aa, Arabidopsis thaliana
  peptide (1)..(160): Ceres Seq. ID no. 12562673
  misc_feature (4)..(157): Pfam Name: Universal stress protein family Pfam Description: Universal stress protein family
  misc_feature (5)..(159): Homolog of NCBI NO: 15528707 NR Description: P0583G08.8 [Oryza sativa (japonica
  misc_feature (5)..(157): Homolog of NCBI NO: 18401345 NR Description: expressed protein
  misc_feature (1)..(135): Homolog of NCBI NO: 18396497 NR Description: expressed protein
  misc_feature (4)..(157): Homolog of NCBI NO: 20160561 NR Description: P0414E03.3 [Oryza sativa (japonica
  misc_feature (1)..(159): Homolog of NCBI NO: 30678807 NR Description: expressed protein [Arabidopsis thaliana]
  misc_feature (1)..(98): Homolog of NCBI NO: 21555070 NR Description: unknown [Arabidopsis thaliana]
  misc_feature (1)..(158): Homolog of NCBI NO: 11602749 NR Description: early nodulin ENOD18 [Vicia faba]
  misc_feature (1)..(158): Homolog of NCBI NO: 11602747 NR Description: early nodulin ENOD18 [Vicia faba]
  misc_feature (3)..(158): Homolog of NCBI NO: 11602751 NR Description: ENOD18 protein [Vicia faba]
  misc_feature (1)..(160): Homolog of NCBI NO: 30693971 NR Description: expressed protein [Arabidopsis thaliana]
MPKDRNIGIAMDFSESSKNALKWAIENLADKGDTIYIIHTLPLSGDESRNSLWFKSGSPLIPLAEFREPEIMEKYGVKTDIACLDMLDTGSRQKEVHVVTKLYWGDAREKLVDAVKDLKLDSIVMGSRGLSALQRIIMGSVSSFVIQHAPCPVTVVKDNE

SEQ ID NO: 35432 - protein, 150 aa, Arabidopsis thaliana
  peptide (1)..(150): Ceres Seq. ID no. 12562674
  misc_feature (1)..(147): Pfam Name: Universal stress protein family Pfam Description: Universal stress protein family
  misc_feature (1)..(149): Homolog of NCBI NO: 15528707 NR Description: P0583G08.8 [Oryza sativa (japonica
  misc_feature (1)..(147): Homolog of NCBI NO: 18401345 NR Description: expressed protein
  misc_feature (1)..(125): Homolog of NCBI NO: 18396497 NR Description: expressed protein
  misc_feature (1)..(147): Homolog of NCBI NO: 20160561 NR Description: P0414E03.3 [Oryza sativa (japonica
  misc_feature (1)..(149): Homolog of NCBI NO: 30678807 NR Description: expressed protein [Arabidopsis thaliana]
  misc_feature (1)..(88): Homolog of NCBI NO: 21555070 NR Description: unknown [Arabidopsis thaliana]
  misc_feature (1)..(148): Homolog of NCBI NO: 11602749 NR Description: early nodulin ENOD18 [Vicia faba]
  misc_feature (1)..(148): Homolog of NCBI NO: 11602747 NR Description: early nodulin ENOD18 [Vicia faba]
  misc_feature (1)..(148): Homolog of NCBI NO: 11602751 NR Description: ENOD18 protein [Vicia faba]
  misc_feature (1)..(150): Homolog of NCBI NO: 30693971 NR Description: expressed protein [Arabidopsis thaliana]
MDFSESSKNALKWAIENLADKGDTIYIIHTLPLSGDESRNSLWFKSGSPLIPLAEFREPEIMEKYGVKTDIACLDMLDTGSRQKEVHVVTKLYWGDAREKLVDAVKDLKLDSIVMGSRGLSALQRIIMGSVSSFVIQHAPCPVTVVKDNE

SEQ ID NO: 35433 - protein, 89 aa, Arabidopsis thaliana; identical to SEQ ID NO: 34717
  peptide (1)..(89): Ceres Seq. ID no. 12562675
  misc_feature (1)..(86): Pfam Name: Universal stress protein family Pfam Description: Universal stress protein family
  misc_feature (1)..(88): Homolog of NCBI NO: 15528707 NR Description: P0583G08.8 [Oryza sativa (japonica
  misc_feature (1)..(86): Homolog of NCBI NO: 18401345 NR Description: expressed protein
  misc_feature (1)..(64): Homolog of NCBI NO: 18396497 NR Description: expressed protein
  misc_feature (1)..(86): Homolog of NCBI NO: 20160561 NR Description: P0414E03.3 [Oryza sativa (japonica
  misc_feature (1)..(88): Homolog of NCBI NO: 30678807 NR Description: expressed protein [Arabidopsis thaliana]
  misc_feature (1)..(27): Homolog of NCBI NO: 21555070 NR Description: unknown [Arabidopsis thaliana]
  misc_feature (1)..(87): Homolog of NCBI NO: 11602749 NR Description: early nodulin ENOD18 [Vicia faba]
  misc_feature (1)..(87): Homolog of NCBI NO: 11602747 NR Description: early nodulin ENOD18 [Vicia faba]
  misc_feature (1)..(87): Homolog of NCBI NO: 11602751 NR Description: ENOD18 protein [Vicia faba]
  misc_feature (1)..(89): Homolog of NCBI NO: 30693971 NR Description: expressed protein [Arabidopsis thaliana]

SEQ ID NO: 35434 - DNA, 572 bp, Arabidopsis thaliana
  misc_feature (1)..(572): Ceres Seq. ID no. 13490216
  misc_feature: MA Experiment ID: 108434 Result: Up-regulated in Transcription
  misc_feature: MA Experiment 108434 PARAMETER Experiment Name: At_Root_Tips_cDNA_P Parameter: Tissue Value: Root Tips
  misc_feature: MA Experiment ID: 108462 Result: Down-regulated in Transcription
  misc_feature: MA Experiment 108462 PARAMETER Experiment Name: At_Germinating_Seeds_cDNA_P Parameter: Age (day) Value: 2 vs. 0
  misc_feature: MA Experiment 108462 PARAMETER Experiment Name: At_Germinating_Seeds_cDNA_P Parameter: Tissue Value: Germinating Seeds
  misc_feature: MA Experiment ID: 108463 Result: Down-regulated in Transcription
  misc_feature: MA Experiment 108463 PARAMETER Experiment Name: At_Germinating_Seeds_cDNA_P Parameter: Age (day) Value: 3 vs. 0
  misc_feature: MA Experiment 108463 PARAMETER Experiment Name: At_Germinating_Seeds_cDNA_P Parameter: Tissue Value: Germinating Seeds
  misc_feature: MA Experiment ID: 108464 Result: Down-regulated in Transcription
  misc_feature: MA Experiment 108464 PARAMETER Experiment Name: At_Germinating_Seeds_cDNA_P Parameter: Age (day) Value: 4 vs. 0
  misc_feature: MA Experiment 108464 PARAMETER Experiment Name: At_Germinating_Seeds_cDNA_P Parameter: Tissue Value: Germinating Seeds
  misc_feature: MA Experiment ID: 108573 Result: Down-regulated in Transcription
  misc_feature: MA Experiment 108573 PARAMETER Experiment Name: At_Drought_cDNA_P Parameter: Timepoint (hr) Value: 6
  misc_feature: MA Experiment 108573 PARAMETER Experiment Name: At_Drought_cDNA_P Parameter: Tissue Value: Aerial
  misc_feature: MA Experiment 108573 PARAMETER Experiment Name: At_Drought_cDNA_P Parameter: Treatment Value: Drought vs. No Drought
  misc_feature: MA Experiment ID: 20001558 Result: Up-regulated in Transcription
  misc_feature: MA Experiment 20001558 PARAMETER Experiment Name: At_Drought_Soil_Dry_P Parameter: Age (day) Value: 27
  misc_feature: MA Experiment 20001558 PARAMETER Experiment Name: At_Drought_Soil_Dry_P Parameter: Organism Value: A. thaliana
  misc_feature: MA Experiment 20001558 PARAMETER Experiment Name: At_Drought_Soil_Dry_P Parameter: Plant Line Value: WS
  misc_feature: MA Experiment 20001558 PARAMETER Experiment Name: At_Drought_Soil_Dry_P Parameter: Post Timepoint (hr) Value: 6
  misc_feature: MA Experiment 20001558 PARAMETER Experiment Name: At_Drought_Soil_Dry_P Parameter: Post-Treatment Value: Re-Water vs. No Drought
  misc_feature: MA Experiment 20001558 PARAMETER Experiment Name: At_Drought_Soil_Dry_P Parameter: Timepoint (day) Value: 13
  misc_feature: MA Experiment 20001558 PARAMETER Experiment Name: At_Drought_Soil_Dry_P Parameter: Treatment Value: Drought vs. No Drought
  misc_feature: MA Experiment ID: 20001560 Result: Up-regulated in Transcription
  misc_feature: MA Experiment 20001560 PARAMETER Experiment Name: At_Drought_Soil_Dry_P Parameter: Age (day) Value: 28
  misc_feature: MA Experiment 20001560 PARAMETER Experiment Name: At_Drought_Soil_Dry_P Parameter: Organism Value: A. thaliana
  misc_feature: MA Experiment 20001560 PARAMETER Experiment Name: At_Drought_Soil_Dry_P Parameter: Plant Line Value: WS
  misc_feature: MA Experiment 20001560 PARAMETER Experiment Name: At_Drought_Soil_Dry_P Parameter: Post Timepoint (hr) Value: None
  misc_feature: MA Experiment 20001560 PARAMETER Experiment Name: At_Drought_Soil_Dry_P Parameter: Post-Treatment Value: None
  misc_feature: MA Experiment 20001560 PARAMETER Experiment Name: At_Drought_Soil_Dry_P Parameter: Timepoint (day) Value: 14
  misc_feature: MA Experiment 20001560 PARAMETER Experiment Name: At_Drought_Soil_Dry_P Parameter: Treatment Value: Drought vs. No Drought
  misc_feature: MA Experiment ID: 20001757 Result: Up-regulated in Transcription
  misc_feature: MA Experiment 20001757 PARAMETER Experiment Name: At_50mM_NH4NO3_L-to-H_P Parameter: Timepoint (hr) Value: 6
  misc_feature: MA Experiment 20001757 PARAMETER Experiment Name: At_50mM_NH4NO3_L-to-H_P Parameter: Tissue Value: Leaf
  misc_feature: MA Experiment 20001757 PARAMETER Experiment Name: At_50mM_NH4NO3_L-to-H_P Parameter: Treatment Value: 50mM NH4NO3 vs 100mM Mannitol
aaaaaccctagatctgatactaaaatggcgacggcgttgaagaagaacagaaagaagagaggtcacgtcagcgccggacatggacgtatcggtaagcaccgtaagcatcccggaggtcgtggaaacgcaggaggtatgcatcaccacaggatcctcttcgacaagtaccatccaggttacttcgggaaagttggtatgaggtatttccacaagcttcgtaacaagttcttttgcccaatcgtgaacctggacaagctatggtcacttgttcctgaagacgtgaaggcgaaatcgagcaaggataatgttccgttgatcgatgtgacgcagcatggtttcttcaaggttttggggaaaggtcatttgcctgagaacaaacctttcgttgtgaaggctaagcttatctctaagactgctgagaagaagattaaggaagctggtggtgctgttgttctcactgcttagtttttttttttcaattcagtctctttttaatttatttcatgttattgaactcagctttgttggattttggaatcagagatcttttaatctatggtattggattatac

SEQ ID NO: 35435 - protein, 154 aa, Arabidopsis thaliana
  peptide (1)..(154): Ceres Seq. ID no. 13490217
  misc_feature (115)..(148): Pfam Name: Ribosomal protein L15 Pfam Description: Ribosomal protein L15
  misc_feature (9)..(154): Homolog of NCBI NO: 132846 NR Description: 60S RIBOSOMAL PROTEIN L27A
  misc_feature (9)..(154): Homolog of NCBI NO: 23612262 NR Description: 60S ribosomal protein L27a, putative [Plasmodium
  misc_feature (11)..(154): Homolog of NCBI NO: 22758850 NR Description: ribosomal protein L22 [Argopecten irradians]
  misc_feature (9)..(154): Homolog of NCBI NO: 30017566 NR Description: putative ribosomal protein L27a
  misc_feature (9)..(154): Homolog of NCBI NO: 23237917 NR Description: putative 60S ribosomal protein L27a
  misc_feature (9)..(154): Homolog of NCBI NO: 3608481 NR Description: ribosomal protein L27a [Petunia x hybrida]
  misc_feature (9)..(154): Homolog of NCBI NO: 7959355 NR Description: 60S ribosomal protein L27a [Panax ginseng]
  misc_feature (9)..(154): Homolog of NCBI NO: 21553702 NR Description: 60S ribosomal protein L27A [Arabidopsis thaliana]
  misc_feature (9)..(154): Homolog of NCBI NO: 15223190 NR Description: 60S ribosomal protein L27A (RPL27aC) [Arabidopsis
  misc_feature (9)..(154): Homolog of NCBI NO: 15220698 NR Description: 60S ribosomal protein L27A (RPL27aB) [Arabidopsis
KNPRSDTKMATALKKNRKKRGHVSAGHGRIGKHRKHPGGRGNAGGMHHHRILFDKYHPGYFGKVGMRYFHKLRNKFFCPIVNLDKLWSLVPEDVKAKSSKDNVPLIDVTQHGFFKVLGKGHLPENKPFVVKAKLISKTAEKKIKEAGGAVVLTA

SEQ ID NO: 35436 - protein, 146 aa, Arabidopsis thaliana
  peptide (1)..(146): Ceres Seq. ID no. 13490218
  misc_feature (107)..(140): Pfam Name: Ribosomal protein L15 Pfam Description: Ribosomal protein L15
  misc_feature (1)..(146): Homolog of NCBI NO: 132846 NR Description: 60S RIBOSOMAL PROTEIN L27A
  misc_feature (1)..(146): Homolog of NCBI NO: 23612262 NR Description: 60S ribosomal protein L27a, putative [Plasmodium
  misc_feature (3)..(146): Homolog of NCBI NO: 22758850 NR Description: ribosomal protein L22 [Argopecten irradians]
  misc_feature (1)..(146): Homolog of NCBI NO: 30017566 NR Description: putative ribosomal protein L27a
  misc_feature (1)..(146): Homolog of NCBI NO: 23237917 NR Description: putative 60S ribosomal protein L27a
  misc_feature (1)..(146): Homolog of NCBI NO: 3608481 NR Description: ribosomal protein L27a [Petunia x hybrida]
  misc_feature (1)..(146): Homolog of NCBI NO: 7959355 NR Description: 60S ribosomal protein L27a [Panax ginseng]
  misc_feature (1)..(146): Homolog of NCBI NO: 21553702 NR Description: 60S ribosomal protein L27A [Arabidopsis thaliana]
  misc_feature (1)..(146): Homolog of NCBI NO: 15223190 NR Description: 60S ribosomal protein L27A (RPL27aC) [Arabidopsis
  misc_feature (1)..(146): Homolog of NCBI NO: 15220698 NR Description: 60S ribosomal protein L27A (RPL27aB) [Arabidopsis
MATALKKNRKKRGHVSAGHGRIGKHRKHPGGRGNAGGMHHHRILFDKYHPGYFGKVGMRYFHKLRNKFFCPIVNLDKLWSLVPEDVKAKSSKDNVPLIDVTQHGFFKVLGKGHLPENKPFVVKAKLISKTAEKKIKEAGGAVVLTA

SEQ ID NO: 35437 - protein, 109 aa, Arabidopsis thaliana
  peptide (1)..(109): Ceres Seq. ID no. 13490219
  misc_feature (70)..(103): Pfam Name: Ribosomal protein L15 Pfam Description: Ribosomal protein L15
  misc_feature (1)..(109): Homolog of NCBI NO: 132846 NR Description: 60S RIBOSOMAL PROTEIN L27A
  misc_feature (1)..(109): Homolog of NCBI NO: 23612262 NR Description: 60S ribosomal protein L27a, putative [Plasmodium
  misc_feature (1)..(109): Homolog of NCBI NO: 22758850 NR Description: ribosomal protein L22 [Argopecten irradians]
  misc_feature (1)..(109): Homolog of NCBI NO: 30017566 NR Description: putative ribosomal protein L27a
  misc_feature (1)..(109): Homolog of NCBI NO: 23237917 NR Description: putative 60S ribosomal protein L27a
  misc_feature (1)..(109): Homolog of NCBI NO: 3608481 NR Description: ribosomal protein L27a [Petunia x hybrida]
  misc_feature (1)..(109): Homolog of NCBI NO: 7959355 NR Description: 60S ribosomal protein L27a [Panax ginseng]
  misc_feature (1)..(109): Homolog of NCBI NO: 21553702 NR Description: 60S ribosomal protein L27A [Arabidopsis thaliana]
  misc_feature (1)..(109): Homolog of NCBI NO: 15223190 NR Description: 60S ribosomal protein L27A (RPL27aC) [Arabidopsis
  misc_feature (1)..(109): Homolog of NCBI NO: 15220698 NR Description: 60S ribosomal protein L27A (RPL27aB) [Arabidopsis
MHHHRILFDKYHPGYFGKVGMRYFHKLRNKFFCPIVNLDKLWSLVPEDVKAKSSKDNVPLIDVTQHGFFKVLGKGHLPENKPFVVKAKLISKTAEKKIKEAGGAVVLTA

SEQ ID NO: 35438 - DNA, 742 bp, Arabidopsis thaliana
  misc_feature (1)..(742): Ceres Seq. ID no. 12370138
  misc_feature: MA Experiment ID: 108434 Result: Down-regulated in Transcription
  misc_feature: MA Experiment 108434 PARAMETER Experiment Name: At_Root_Tips_cDNA_P Parameter: Tissue Value: Root Tips
  misc_feature: MA Experiment ID: 108435 Result: Down-regulated in Transcription
  misc_feature: MA Experiment 108435 PARAMETER Experiment Name: At_stm_Mutants_cDNA_P Parameter: Plant Line Value: wt Landsburg vs stm
  misc_feature: MA Experiment 108435 PARAMETER Experiment Name: At_stm_Mutants_cDNA_P Parameter: Tissue Value: Shoot Apical Meristem Region
  misc_feature: MA Experiment ID: 108461 Result: Up-regulated in Transcription
  misc_feature: MA Experiment 108461 PARAMETER Experiment Name: At_Germinating_Seeds_cDNA_P Parameter: Age (day) Value: 1 vs. 0
  misc_feature: MA Experiment 108461 PARAMETER Experiment Name: At_Germinating_Seeds_cDNA_P Parameter: Tissue Value: Germinating Seeds
  misc_feature: MA Experiment ID: 108462 Result: Up-regulated in Transcription
  misc_feature: MA Experiment 108462 PARAMETER Experiment Name: At_Germinating_Seeds_cDNA_P Parameter: Age (day) Value: 2 vs. 0
  misc_feature: MA Experiment 108462 PARAMETER Experiment Name: At_Germinating_Seeds_cDNA_P Parameter: Tissue Value: Germinating Seeds
  misc_feature: MA Experiment ID: 108463 Result: Up-regulated in Transcription
  misc_feature: MA Experiment 108463 PARAMETER Experiment Name: At_Germinating_Seeds_cDNA_P Parameter: Age (day) Value: 3 vs. 0
  misc_feature: MA Experiment 108463 PARAMETER Experiment Name: At_Germinating_Seeds_cDNA_P Parameter: Tissue Value: Germinating Seeds
  misc_feature: MA Experiment ID: 108464 Result: Up-regulated in Transcription
  misc_feature: MA Experiment 108464 PARAMETER Experiment Name: At_Germinating_Seeds_cDNA_P Parameter: Age (day) Value: 4 vs. 0
  misc_feature: MA Experiment 108464 PARAMETER Experiment Name: At_Germinating_Seeds_cDNA_P Parameter: Tissue Value: Germinating Seeds
  misc_feature: MA Experiment ID: 108573 Result: Down-regulated in Transcription
  misc_feature: MA Experiment 108573 PARAMETER Experiment Name: At_Drought_cDNA_P Parameter: Timepoint (hr) Value: 6
  misc_feature: MA Experiment 108573 PARAMETER Experiment Name: At_Drought_cDNA_P Parameter: Tissue Value: Aerial
  misc_feature: MA Experiment 108573 PARAMETER Experiment Name: At_Drought_cDNA_P Parameter: Treatment Value: Drought vs. No Drought
  misc_feature: MA Experiment ID: 108595 Result: Down-regulated in Transcription
  misc_feature: MA Experiment 108595 PARAMETER Experiment Name: At_Ler-pi_Ovule_cDNA_P Parameter: Plant Line Value: null
  misc_feature: MA Experiment ID: 20000069 Result: Down-regulated in Transcription
  misc_feature: MA Experiment 20000069 PARAMETER Experiment Name: At_100uM_ABA_Mutants_cDNA_P Parameter: Plant Line Value: CS23
  misc_feature: MA Experiment 20000069 PARAMETER Experiment Name: At_100uM_ABA_Mutants_cDNA_P Parameter: Timepoint (hr) Value: 6
  misc_feature: MA Experiment 20000069 PARAMETER Experiment Name: At_100uM_ABA_Mutants_cDNA_P Parameter: Tissue Value: Aerial
  misc_feature: MA Experiment 20000069 PARAMETER Experiment Name: At_100uM_ABA_Mutants_cDNA_P Parameter: Treatment Value: 100uM ABA vs. No Treatment
  misc_feature: MA Experiment ID: 20000070 Result: Down-regulated in Transcription
  misc_feature: MA Experiment 20000070 PARAMETER Experiment Name: At_100uM_ABA_Mutants_cDNA_P Parameter: Plant Line Value: CS24
  misc_feature: MA Experiment 20000070 PARAMETER Experiment Name: At_100uM_ABA_Mutants_cDNA_P Parameter: Timepoint (hr) Value: 6
  misc_feature: MA Experiment 20000070 PARAMETER Experiment Name: At_100uM_ABA_Mutants_cDNA_P Parameter: Tissue Value: Aerial
  misc_feature: MA Experiment 20000070 PARAMETER Experiment Name: At_100uM_ABA_Mutants_cDNA_P Parameter: Treatment Value: 100uM ABA vs. No Treatment
  misc_feature: MA Experiment ID: 20000071 Result: Down-regulated in Transcription
  misc_feature: MA Experiment 20000071 PARAMETER Experiment Name: At_100uM_ABA_Mutants_cDNA_P Parameter: Plant Line Value: CS8104
  misc_feature: MA Experiment 20000071 PARAMETER Experiment Name: At_100uM_ABA_Mutants_cDNA_P Parameter: Timepoint (hr) Value: 6
  misc_feature: MA Experiment 20000071 PARAMETER Experiment Name: At_100uM_ABA_Mutants_cDNA_P Parameter: Tissue Value: Aerial
  misc_feature: MA Experiment 20000071 PARAMETER Experiment Name: At_100uM_ABA_Mutants_cDNA_P Parameter: Treatment Value: 100uM ABA vs. No Treatment
  misc_feature: MA Experiment ID: 20000072 Result: Down-regulated in Transcription
  misc_feature: MA Experiment 20000072 PARAMETER Experiment Name: At_100uM_ABA_Mutants_cDNA_P Parameter: Plant Line Value: CS8105
  misc_feature: MA Experiment 20000072 PARAMETER Experiment Name: At_100uM_ABA_Mutants_cDNA_P Parameter: Timepoint (hr) Value: 6
  misc_feature: MA Experiment 20000072 PARAMETER Experiment Name: At_100uM_ABA_Mutants_cDNA_P Parameter: Tissue Value: Aerial
  misc_feature: MA Experiment 20000072 PARAMETER Experiment Name: At_100uM_ABA_Mutants_cDNA_P Parameter: Treatment Value: 100uM ABA vs. No Treatment
  misc_feature: MA Experiment ID: 20000086 Result: Down-regulated in Transcription
  misc_feature: MA Experiment 20000086 PARAMETER Experiment Name: At_100uM_ABA_Mutants_cDNA_P Parameter: Plant Line Value: CS22
  misc_feature: MA Experiment 20000086 PARAMETER Experiment Name: At_100uM_ABA_Mutants_cDNA_P Parameter: Timepoint (hr) Value: 6
  misc_feature: MA Experiment 20000086 PARAMETER Experiment Name: At_100uM_ABA_Mutants_cDNA_P Parameter: Tissue Value: Aerial
  misc_feature: MA Experiment 20000086 PARAMETER Experiment Name: At_100uM_ABA_Mutants_cDNA_P Parameter: Treatment Value: 100uM ABA vs. No Treatment
  misc_feature: MA Experiment ID: 20000087 Result: Down-regulated in Transcription
  misc_feature: MA Experiment 20000087 PARAMETER Experiment Name: At_100uM_ABA_Mutants_cDNA_P Parameter: Plant Line Value: WS
  misc_feature: MA Experiment 20000087 PARAMETER Experiment Name: At_100uM_ABA_Mutants_cDNA_P Parameter: Timepoint (hr) Value: 6
  misc_feature: MA Experiment 20000087 PARAMETER Experiment Name: At_100uM_ABA_Mutants_cDNA_P Parameter: Tissue Value: Aerial
  misc_feature: MA Experiment 20000087 PARAMETER Experiment Name: At_100uM_ABA_Mutants_cDNA_P Parameter: Treatment Value: 100uM ABA vs. No Treatment
  misc_feature: MA Experiment ID: 20000088 Result: Down-regulated in Transcription
  misc_feature: MA Experiment 20000088 PARAMETER Experiment Name: At_100uM_ABA_Mutants_cDNA_P Parameter: Plant Line Value: Landsberg
  misc_feature: MA Experiment 20000088 PARAMETER Experiment Name: At_100uM_ABA_Mutants_cDNA_P Parameter: Timepoint (hr) Value: 6
  misc_feature: MA Experiment 20000088 PARAMETER Experiment Name: At_100uM_ABA_Mutants_cDNA_P Parameter: Tissue Value: Aerial
  misc_feature: MA Experiment 20000088 PARAMETER Experiment Name: At_100uM_ABA_Mutants_cDNA_P Parameter: Treatment Value: 100uM ABA vs. No Treatment
  misc_feature: MA Experiment ID: 20000090 Result: Down-regulated in Transcription
  misc_feature: MA Experiment ID: 20000117 Result: Down-regulated in Transcription
  misc_feature: MA Experiment 20000117 PARAMETER Experiment Name: At_100uM_ABA_Mutants_cDNA_P Parameter: Plant Line Value: Columbia
  misc_feature: MA Experiment 20000117 PARAMETER Experiment Name: At_100uM_ABA_Mutants_cDNA_P Parameter: Timepoint (hr) Value: 6
  misc_feature: MA Experiment 20000117 PARAMETER Experiment Name: At_100uM_ABA_Mutants_cDNA_P Parameter: Tissue Value: Aerial
  misc_feature: MA Experiment 20000117 PARAMETER Experiment Name: At_100uM_ABA_Mutants_cDNA_P Parameter: Treatment Value: 100uM ABA vs. No Treatment
  misc_feature: MA Experiment ID: 20000179 Result: Up-regulated in Transcription
  misc_feature: MA Experiment 20000179 PARAMETER Experiment Name: At_Germinating_Seeds_P Parameter: Age (hr) Value: 6 vs. 0
  misc_feature: MA Experiment 20000179 PARAMETER Experiment Name: At_Germinating_Seeds_P Parameter: Tissue Value: Germinating Seeds
  misc_feature: MA Experiment ID: 20000180 Result: Up-regulated in Transcription
  misc_feature: MA Experiment 20000180 PARAMETER Experiment Name: At_Germinating_Seeds_P Parameter: Age (hr) Value: 24 vs. 0
  misc_feature: MA Experiment 20000180 PARAMETER Experiment Name: At_Germinating_Seeds_P Parameter: Tissue Value: Germinating Seeds
  misc_feature: MA Experiment ID: 20000185 Result: Down-regulated in Transcription
  misc_feature: MA Experiment 20000185 PARAMETER Experiment Name: At_Roots__P Parameter: Age (day) Value: 7 vs. 21
  misc_feature: MA Experiment 20000185 PARAMETER Experiment Name: At_Roots__P Parameter: Organism Value: A. thaliana
  misc_feature: MA Experiment 20000185 PARAMETER Experiment Name: At_Roots__P Parameter: Tissue Value: Roots vs. Whole Plant
  misc_feature: MA Experiment ID: 20000224 Result: Up-regulated in Transcription
  misc_feature: MA Experiment ID: 20000227 Result: Down-regulated in Transcription
  misc_feature: MA Experiment 20000227 PARAMETER Experiment Name: At_Root-Tips-vs-Tops_P Parameter: Tissue Value: Root Tips vs. Root Tops
  misc_feature: MA Experiment ID: 20000437 Result: Down-regulated in Transcription
  misc_feature: MA Experiment 20000437 PARAMETER Experiment Name: At_Drought_P Parameter: Age (day) Value: 8
  misc_feature: MA Experiment 20000437 PARAMETER Experiment Name: At_Drought_P Parameter: Organism Value: A. thaliana
  misc_feature: MA Experiment 20000437 PARAMETER Experiment Name: At_Drought_P Parameter: Plant Line Value: WS
  misc_feature: MA Experiment 20000437 PARAMETER Experiment Name: At_Drought_P Parameter: Timepoint (hr) Value: 24
  misc_feature: MA Experiment 20000437 PARAMETER Experiment Name: At_Drought_P Parameter: Tissue Value: Whole Plant
  misc_feature: MA Experiment 20000437 PARAMETER Experiment Name: At_Drought_P Parameter: Treatment Value: Drought vs. No Drought
  misc_feature: MA Experiment ID: 20000439 Result: Down-regulated in Transcription
  misc_feature: MA Experiment 20000439 PARAMETER Experiment Name: At_Roots__P Parameter: Age (day) Value: 14 vs. 21
  misc_feature: MA Experiment 20000439 PARAMETER Experiment Name: At_Roots__P Parameter: Organism Value: A. thaliana
  misc_feature: MA Experiment 20000439 PARAMETER Experiment Name: At_Roots__P Parameter: Tissue Value: Roots vs. Whole Plant
  misc_feature: MA Experiment ID: 20000794 Result: Down-regulated in Transcription
  misc_feature: MA Experiment 20000794 PARAMETER Experiment Name: At_Petals_P Parameter: Age (day) Value: 23-25 days
  misc_feature: MA Experiment 20000794 PARAMETER Experiment Name: At_Petals_P Parameter: Plant Line Value: WS
  misc_feature: MA Experiment 20000794 PARAMETER Experiment Name: At_Petals_P Parameter: Tissue Value: Petals vs. Whole plant
  misc_feature: MA Experiment ID: 20001555 Result: Down-regulated in Transcription
  misc_feature: MA Experiment 20001555 PARAMETER Experiment Name: At_Drought_Soil_Dry_P Parameter: Age (day) Value: 24
  misc_feature: MA Experiment 20001555 PARAMETER Experiment Name: At_Drought_Soil_Dry_P Parameter: Organism Value: A. thaliana
  misc_feature: MA Experiment 20001555 PARAMETER Experiment Name: At_Drought_Soil_Dry_P Parameter: Plant Line Value: WS
  misc_feature: MA Experiment 20001555 PARAMETER Experiment Name: At_Drought_Soil_Dry_P Parameter: Post Timepoint (hr) Value: None
  misc_feature: MA Experiment 20001555 PARAMETER Experiment Name: At_Drought_Soil_Dry_P Parameter: Post-Treatment Value: None
  misc_feature: MA Experiment 20001555 PARAMETER Experiment Name: At_Drought_Soil_Dry_P Parameter: Timepoint (day) Value: 10
  misc_feature: MA Experiment 20001555 PARAMETER Experiment Name: At_Drought_Soil_Dry_P Parameter: Treatment Value: Drought vs. No Drought
  misc_feature: MA Experiment ID: 20001557 Result: Down-regulated in Transcription
  misc_feature: MA Experiment 20001557 PARAMETER Experiment Name: At_Drought_Soil_Dry_P Parameter: Age (day) Value: 27
  misc_feature: MA Experiment 20001557 PARAMETER Experiment Name: At_Drought_Soil_Dry_P Parameter: Organism Value: A. thaliana
  misc_feature: MA Experiment 20001557 PARAMETER Experiment Name: At_Drought_Soil_Dry_P Parameter: Plant Line Value: WS
  misc_feature: MA Experiment 20001557 PARAMETER Experiment Name: At_Drought_Soil_Dry_P Parameter: Post Timepoint (hr) Value: 3
  misc_feature: MA Experiment 20001557 PARAMETER Experiment Name: At_Drought_Soil_Dry_P Parameter: Post-Treatment Value: Re-Water vs. No Drought
  misc_feature: MA Experiment 20001557 PARAMETER Experiment Name: At_Drought_Soil_Dry_P Parameter: Timepoint (day) Value: 13
  misc_feature: MA Experiment 20001557 PARAMETER Experiment Name: At_Drought_Soil_Dry_P Parameter: Treatment Value: Drought vs. No Drought
  misc_feature: MA Experiment ID: 20001559 Result: Down-regulated in Transcription
  misc_feature: MA Experiment 20001559 PARAMETER Experiment Name: At_Drought_Soil_Dry_P Parameter: Age (day) Value: 28
  misc_feature: MA Experiment 20001559 PARAMETER Experiment Name: At_Drought_Soil_Dry_P Parameter: Organism Value: A. thaliana
  misc_feature: MA Experiment 20001559 PARAMETER Experiment Name: At_Drought_Soil_Dry_P Parameter: Plant Line Value: WS
  misc_feature: MA Experiment 20001559 PARAMETER Experiment Name: At_Drought_Soil_Dry_P Parameter: Post Timepoint (hr) Value: 29
  misc_feature: MA Experiment 20001559 PARAMETER Experiment Name: At_Drought_Soil_Dry_P Parameter: Post-Treatment Value: Re-Water vs. No Drought
  misc_feature: MA Experiment 20001559 PARAMETER Experiment Name: At_Drought_Soil_Dry_P Parameter: Timepoint (day) Value: 14
  misc_feature: MA Experiment 20001559 PARAMETER Experiment Name: At_Drought_Soil_Dry_P Parameter: Treatment Value: Drought vs. No Drought
  misc_feature: MA Experiment ID: 20001757 Result: Up-regulated in Transcription
  misc_feature: MA Experiment 20001757 PARAMETER Experiment Name: At_50mM_NH4NO3_L-to-H_P Parameter: Timepoint (hr) Value: 6
  misc_feature: MA Experiment 20001757 PARAMETER Experiment Name: At_50mM_NH4NO3_L-to-H_P Parameter: Tissue Value: Leaf
  misc_feature: MA Experiment 20001757 PARAMETER Experiment Name: At_50mM_NH4NO3_L-to-H_P Parameter: Treatment Value: 50mM NH4NO3 vs 100mM Mannitol
  misc_feature: MA Experiment ID: 20001905 Result: Down-regulated in Transcription
  misc_feature: MA Experiment 20001905 PARAMETER Experiment Name: At_Drought_Reproduction_P Parameter: Age (day) Value: 40
  misc_feature: MA Experiment 20001905 PARAMETER Experiment Name: At_Drought_Reproduction_P Parameter: Organism Value: A. thaliana
  misc_feature: MA Experiment 20001905 PARAMETER Experiment Name: At_Drought_Reproduction_P Parameter: Plant Line Value: WS
  misc_feature: MA Experiment 20001905 PARAMETER Experiment Name: At_Drought_Reproduction_P Parameter: Timepoint (day) Value: 10
  misc_feature: MA Experiment 20001905 PARAMETER Experiment Name: At_Drought_Reproduction_P Parameter: Tissue Value: Rosettes
  misc_feature: MA Experiment 20001905 PARAMETER Experiment Name: At_Drought_Reproduction_P Parameter: Treatment Value: Drought vs. No Drought
  misc_feature: MA Experiment ID: 20001906 Result: Down-regulated in Transcription
  misc_feature: MA Experiment 20001906 PARAMETER Experiment Name: At_Drought_Reproduction_P Parameter: Age (day) Value: 35
  misc_feature: MA Experiment 20001906 PARAMETER Experiment Name: At_Drought_Reproduction_P Parameter: Organism Value: A. thaliana
  misc_feature: MA Experiment 20001906 PARAMETER Experiment Name: At_Drought_Reproduction_P Parameter: Plant Line Value: WS
  misc_feature: MA Experiment 20001906 PARAMETER Experiment Name: At_Drought_Reproduction_P Parameter: Timepoint (day) Value: 5
  misc_feature: MA Experiment 20001906 PARAMETER Experiment Name: At_Drought_Reproduction_P Parameter: Tissue Value: Siliques
  misc_feature: MA Experiment 20001906 PARAMETER Experiment Name: At_Drought_Reproduction_P Parameter: Treatment Value: Drought vs. No Drought
  misc_feature: MA Experiment ID: 20001908 Result: Down-regulated in Transcription
  misc_feature: MA Experiment 20001908 PARAMETER Experiment Name: At_Drought_Reproduction_P Parameter: Age (day) Value: 40
  misc_feature: MA Experiment 20001908 PARAMETER Experiment Name: At_Drought_Reproduction_P Parameter: Organism Value: A. thaliana
  misc_feature: MA Experiment 20001908 PARAMETER Experiment Name: At_Drought_Reproduction_P Parameter: Plant Line Value: WS
  misc_feature: MA Experiment 20001908 PARAMETER Experiment Name: At_Drought_Reproduction_P Parameter: Timepoint (day) Value: 10
  misc_feature: MA Experiment 20001908 PARAMETER Experiment Name: At_Drought_Reproduction_P Parameter: Tissue Value: Siliques
  misc_feature: MA Experiment 20001908 PARAMETER Experiment Name: At_Drought_Reproduction_P Parameter: Treatment Value: Drought vs. No Drought
  misc_feature: MA Experiment ID: 20001911 Result: Down-regulated in Transcription
  misc_feature: MA Experiment 20001911 PARAMETER Experiment Name: At_Drought_Reproduction_P Parameter: Age (day) Value: 40
  misc_feature: MA Experiment 20001911 PARAMETER Experiment Name: At_Drought_Reproduction_P Parameter: Organism Value: A. thaliana
  misc_feature: MA Experiment 20001911 PARAMETER Experiment Name: At_Drought_Reproduction_P Parameter: Plant Line Value: WS
  misc_feature: MA Experiment 20001911 PARAMETER Experiment Name: At_Drought_Reproduction_P Parameter: Timepoint (day) Value: 10
  misc_feature: MA Experiment 20001911 PARAMETER Experiment Name: At_Drought_Reproduction_P Parameter: Tissue Value: Flowers
  misc_feature: MA Experiment 20001911 PARAMETER Experiment Name: At_Drought_Reproduction_P Parameter: Treatment Value: Drought vs. No Drought
  misc_feature: Phenotype: INFLORESCENCE Flowering Time-Late Flowering
  misc_feature: Phenotype: INFLORESCENCE Flowering Time-Late Flowering
  misc_feature: Phenotype: INFLORESCENCE Flowering Time-Late Flowering
  misc_feature: Phenotype: INFLORESCENCE Height-Short
  misc_feature: Phenotype: INFLORESCENCE Strength-Strong
  misc_feature: Phenotype: FERTILITY Fertility-Reduced
  misc_feature: Phenotype: ROSETTE LEAVES Shape-Serrate
  misc_feature: Phenotype: WHOLE PLANT Size-Small
  misc_feature: Phenotype: WHOLE PLANT Other
  misc_feature: Phenotype: INFLORESCENCE Flowering Time-Late Flowering
  misc_feature: Phenotype: INFLORESCENCE Height-Short
  misc_feature: Phenotype: INFLORESCENCE Flowering Time-Late Flowering
  misc_feature: Phenotype: WHOLE PLANT Other
  misc_feature: Phenotype: ROSETTE LEAVES Shape-Lanceolate
  misc_feature: Phenotype: ROSETTE LEAVES Shape-Serrate
  misc_feature: Phenotype: WHOLE PLANT Color-Dark Green
  misc_feature: Phenotype: WHOLE PLANT Dwarf-Misc. Dwarf
  misc_feature: Phenotype: CAULINE LEAVES Shape-Lanceolate
  misc_feature: Phenotype: INFLORESCENCE Flowering Time-Late Flowering
  misc_feature: Phenotype: INFLORESCENCE Other
  misc_feature: Phenotype: ROSETTE LEAVES Shape-Lanceolate
  misc_feature: Phenotype: ROSETTE LEAVES Shape-Serrate
  misc_feature: Phenotype: WHOLE PLANT Color-Dark Green
  misc_feature: Phenotype: WHOLE PLANT Dwarf-Misc. Dwarf
  misc_feature: Phenotype: CAULINE LEAVES Shape-Lanceolate
  misc_feature: Phenotype: INFLORESCENCE Flowering Time-Late Flowering
  misc_feature: Phenotype: INFLORESCENCE Strength-Weak
  misc_feature: Phenotype: FERTILITY Fertility-Sterile
  misc_feature: Phenotype: FERTILITY Fertility-Reduced
aattaagatctctctttactgttttcccacttttcctttgagaaaactcaaaacaaagtaaacaaacaaaccagaaaaaggaatggcactgagaatgtgggcttcctctacagcaaatgctctcaagctctcttcttctgcctccaaatctcatctcttgccagctttctccatctccagatgcttctcctcagtgttggaaggacttaagtatgcaaattcacatgagtgggtgaaacatgaaggctcagttgctacaattggtatcactgaccatgcgcaggaccatttaggagaagttgtgtttgtggagctgcctgaagcaaacagttcagtgagcaaagaaaaaagctttggagctgttgagagtgttaaggccacaagtgagattctatctccaatctctggtgaagtcattgaggttaacacaaagctcaccgagtcacctggtttgatcaactcaagcccttatgaagatggttggatgataaaggtgaaaccgagcagccccgcggagttggaagctctgatgggtccaaaggaatacaccaagttctgcgaagaagaagacgctgctcactagggtttcttcgccttttatctttcccaaatgttcgaaaaacagagcaaaacaagagaatccatgctttagtttcaatctttcatttctcaatgtttcttaccactctcaacttgtatcagtgtgatactaatttgattaaaagatcatccaatgagacac

SEQ ID NO: 35439 - protein, 166 aa, Arabidopsis thaliana
  peptide (1)..(166): Ceres Seq. ID no. 12370139
  misc_feature (42)..(162): Pfam Name: Glycine cleavage H-protein Pfam Description: Glycine cleavage H-protein
  misc_feature (1)..(165): Homolog of NCBI NO: 1362140 NR Description: H-protein precursor - Flaveria trinervia
  misc_feature (2)..(166): Homolog of NCBI NO: 2119600 NR Description: glycine cleavage system protein H precursor
  misc_feature (1)..(166): Homolog of NCBI NO: 3688309 NR Description: H-Protein precursor [Flaveria pringlei]
  misc_feature (1)..(166): Homolog of NCBI NO: 1346118 NR Description: Glycine cleavage system H protein, mitochondrial
  misc_feature (1)..(166): Homolog of NCBI NO: 2887286 NR Description: H protein [Flaveria anomala]
  misc_feature (1)..(166): Homolog of NCBI NO: 2147453 NR Description: glycine cleavage system protein H precursor
  misc_feature (1)..(166): Homolog of NCBI NO: 2499417 NR Description: Glycine cleavage system H protein, mitochondrial
  misc_feature (1)..(166): Homolog of NCBI NO: 121080 NR Description: Glycine cleavage system H protein, mitochondrial
  misc_feature (1)..(166): Homolog of NCBI NO: 15226973 NR Description: glycine decarboxylase complex H-protein
  misc_feature (1)..(166): Homolog of NCBI NO: 15223217 NR Description: glycine cleavage system H protein precursor,
MALRMWASSTANALKLSSSASKSHLLPAFSISRCFSSVLEGLKYANSHEWVKHEGSVATIGITDHAQDHLGEVVFVELPEANSSVSKEKSFGAVESVKATSEILSPISGEVIEVNTKLTESPGLINSSPYEDGWMIKVKPSSPAELEALMGPKEYTKFCEEEDAAH

SEQ ID NO: 35440 - protein, 162 aa, Arabidopsis thaliana
  peptide (1)..(162): Ceres Seq. ID no. 12370140
  misc_feature (38)..(158): Pfam Name: Glycine cleavage H-protein Pfam Description: Glycine cleavage H-protein
  misc_feature (1)..(161): Homolog of NCBI NO: 1362140 NR Description: H-protein precursor - Flaveria trinervia
  misc_feature (1)..(162): Homolog of NCBI NO: 2119600 NR Description: glycine cleavage system protein H precursor
  misc_feature (1)..(162): Homolog of NCBI NO: 3688309 NR Description: H-Protein precursor [Flaveria pringlei]
  misc_feature (1)..(162): Homolog of NCBI NO: 1346118 NR Description: Glycine cleavage system H protein, mitochondrial
  misc_feature (1)..(162): Homolog of NCBI NO: 2887286 NR Description: H protein [Flaveria anomala]
  misc_feature (1)..(162): Homolog of NCBI NO: 2147453 NR Description: glycine cleavage system protein H precursor
  misc_feature (1)..(162): Homolog of NCBI NO: 2499417 NR Description: Glycine cleavage system H protein, mitochondrial
  misc_feature (1)..(162): Homolog of NCBI NO: 121080 NR Description: Glycine cleavage system H protein, mitochondrial
  misc_feature (1)..(162): Homolog of NCBI NO: 15226973 NR Description: glycine decarboxylase complex H-protein
  misc_feature (1)..(162): Homolog of NCBI NO: 15223217 NR Description: glycine cleavage system H protein precursor,
MWASSTANALKLSSSASKSHLLPAFSISRCFSSVLEGLKYANSHEWVKHEGSVATIGITDHAQDHLGEVVFVELPEANSSVSKEKSFGAVESVKATSEILSPISGEVIEVNTKLTESPGLINSSPYEDGWMIKVKPSSPAELEALMGPKEYTKFCEEEDAAH

SEQ ID NO: 35441 - DNA, 826 bp, Arabidopsis thaliana
  misc_feature (1)..(826): Ceres Seq. ID no. 12332018
  misc_feature: MA Experiment ID: 108434 Result: Up-regulated in Transcription
  misc_feature: MA Experiment 108434 PARAMETER Experiment Name: At_Root_Tips_cDNA_P Parameter: Tissue Value: Root Tips
  misc_feature: MA Experiment ID: 108464 Result: Up-regulated in Transcription
  misc_feature: MA Experiment 108464 PARAMETER Experiment Name: At_Germinating_Seeds_cDNA_P Parameter: Age (day) Value: 4 vs. 0
  misc_feature: MA Experiment 108464 PARAMETER Experiment Name: At_Germinating_Seeds_cDNA_P Parameter: Tissue Value: Germinating Seeds
  misc_feature: MA Experiment ID: 108488 Result: Down-regulated in Transcription
  misc_feature: MA Experiment ID: 108576 Result: Up-regulated in Transcription
  misc_feature: MA Experiment 108576 PARAMETER Experiment Name: At_42deg_Heat_cDNA_P Parameter: Temperature (deg C) Value: 42 vs. 22
  misc_feature: MA Experiment 108576 PARAMETER Experiment Name: At_42deg_Heat_cDNA_P Parameter: Timepoint (hr) Value: 1
  misc_feature: MA Experiment 108576 PARAMETER Experiment Name: At_42deg_Heat_cDNA_P Parameter: Tissue Value: Aerial
  misc_feature: MA Experiment ID: 108577 Result: Up-regulated in Transcription
  misc_feature: MA Experiment 108577 PARAMETER Experiment Name: At_42deg_Heat_cDNA_P Parameter: Temperature (deg C) Value: 42 vs. 22
  misc_feature: MA Experiment 108577 PARAMETER Experiment Name: At_42deg_Heat_cDNA_P Parameter: Timepoint (hr) Value: 6
  misc_feature: MA Experiment 108577 PARAMETER Experiment Name: At_42deg_Heat_cDNA_P Parameter: Tissue Value: Aerial
  misc_feature: MA Experiment ID: 108579 Result: Down-regulated in Transcription
  misc_feature: MA Experiment 108579 PARAMETER Experiment Name: At_4deg_Cold_cDNA_P Parameter: Temperature (deg C) Value: 4 vs. 22
  misc_feature: MA Experiment 108579 PARAMETER Experiment Name: At_4deg_Cold_cDNA_P Parameter: Timepoint (hr) Value: 6
  misc_feature: MA Experiment 108579 PARAMETER Experiment Name: At_4deg_Cold_cDNA_P Parameter: Tissue Value: Aerial
  misc_feature: MA Experiment ID: 108585 Result: Up-regulated in Transcription
  misc_feature: MA Experiment 108585 PARAMETER Experiment Name: At_5mM_NaNP_cDNA_P Parameter: Timepoint (hr) Value: 6
  misc_feature: MA Experiment 108585 PARAMETER Experiment Name: At_5mM_NaNP_cDNA_P Parameter: Tissue Value: Aerial
  misc_feature: MA Experiment 108585 PARAMETER Experiment Name: At_5mM_NaNP_cDNA_P Parameter: Treatment Value: null
  misc_feature: MA Experiment ID: 108595 Result: Up-regulated in Transcription
  misc_feature: MA Experiment 108595 PARAMETER Experiment Name: At_Ler-pi_Ovule_cDNA_P Parameter: Plant Line Value: null
  misc_feature: MA Experiment ID: 20000093 Result: Up-regulated in Transcription
  misc_feature: MA Experiment 20000093 PARAMETER Experiment Name: At_42deg_Heat_cDNA_P Parameter: Temperature (deg C) Value: 42 vs. 22
  misc_feature: MA Experiment 20000093 PARAMETER Experiment Name: At_42deg_Heat_cDNA_P Parameter: Timepoint (hr) Value: 0.5
  misc_feature: MA Experiment 20000093 PARAMETER Experiment Name: At_42deg_Heat_cDNA_P Parameter: Tissue Value: Aerial
  misc_feature: MA Experiment ID: 20000111 Result: Up-regulated in Transcription
  misc_feature: MA Experiment 20000111 PARAMETER Experiment Name: At_42deg_Heat_cDNA_P Parameter: Temperature (deg C) Value: 42 vs. 22
  misc_feature: MA Experiment 20000111 PARAMETER Experiment Name: At_42deg_Heat_cDNA_P Parameter: Timepoint (hr) Value: 6
  misc_feature: MA Experiment 20000111 PARAMETER Experiment Name: At_42deg_Heat_cDNA_P Parameter: Tissue Value: Aerial
  misc_feature: MA Experiment ID: 20000112 Result: Up-regulated in Transcription
  misc_feature: MA Experiment 20000112 PARAMETER Experiment Name: At_42deg_Heat_cDNA_P Parameter: Temperature (deg C) Value: 42 vs. 22
  misc_feature: MA Experiment 20000112 PARAMETER Experiment Name: At_42deg_Heat_cDNA_P Parameter: Timepoint (hr) Value: 2
  misc_feature: MA Experiment 20000112 PARAMETER Experiment Name: At_42deg_Heat_cDNA_P Parameter: Tissue Value: Aerial
  misc_feature: MA Experiment ID: 20000113 Result: Up-regulated in Transcription
  misc_feature: MA Experiment 20000113 PARAMETER Experiment Name: At_42deg_Heat_cDNA_P Parameter: Temperature (deg C) Value: 42 vs. 22
  misc_feature: MA Experiment 20000113 PARAMETER Experiment Name: At_42deg_Heat_cDNA_P Parameter: Timepoint (hr) Value: 8
  misc_feature: MA Experiment 20000113 PARAMETER Experiment Name: At_42deg_Heat_cDNA_P Parameter: Tissue Value: Aerial
  misc_feature: MA Experiment ID: 20000144 Result: Up-regulated in Transcription
  misc_feature: MA Experiment 20000144 PARAMETER Experiment Name: At_42deg_Heat_cDNA_P Parameter: Temperature (deg C) Value: 42 vs. 22
  misc_feature: MA Experiment 20000144 PARAMETER Experiment Name: At_42deg_Heat_cDNA_P Parameter: Timepoint (hr) Value: 1
  misc_feature: MA Experiment 20000144 PARAMETER Experiment Name: At_42deg_Heat_cDNA_P Parameter: Tissue Value: Aerial
aattgtcttatctttcgacttttcttcttcttcttcttcttaagagatttttctccaagaaagttcgctccttttctctgttcttaacaaaaaagtctcggtttttttctctttgttttgggtactagcgtgatgtcttctgagaatgatttcgttgagttttcttctatgttcgagagaattatacaaggaagaggtgatggtctctctcgatttttgccggtgattgtagctttagccgccagaaagacgatgatgaccaaggatctaccgatcaaacaacgagacggggagatccgttgagtccaaggttcgtgatgatcggatcgcgatcgggactcgacgatttctttagcgacggtggaaaacaagggaggtcgccggcgttgaagtcagcggtggagaatatgccacgtgtcgtgatcggagaggataaggagaaaaatggtggttcttgcgcgatttgtttggatgagtggtctaaaggtgacgtggcggcggagatgccgtgtaaacataagtttcactcaaagtgtgtggaggagtggttagggaggcacgccacgtgtcctatgtgtaggtttgagatgcctgttgaagaagtggaagaagagaagaagatcgggatttggattggcttctccattaacgccggcgacagaagaaactaagaagacggaggaagaagaagttaaaagtgactcgaaccctcacgatgcaacatgggctaggtttaggtttaggcttaggtttgctagaagaatgttttgtatagcttcgttttcgtttactgaaatcaatttctaattcaataaaattggttgcc

SEQ ID NO: 35442 - protein, 117 aa, Arabidopsis thaliana
  peptide (1)..(117): Ceres Seq. ID no. 12332019
  misc_feature (47)..(87): Pfam Name: Zinc finger, C3HC4 type (RING finger) Pfam Description: Zinc finger, C3HC4 type (RING finger)
  misc_feature (13)..(101): Homolog of NCBI NO: 15231003 NR Description: unknown protein
  misc_feature (16)..(115): Homolog of NCBI NO: 15232595 NR Description: putative protein
  misc_feature (13)..(100): Homolog of NCBI NO: 15241188 NR Description: putative protein
  misc_feature (13)..(117): Homolog of NCBI NO: 22328949 NR Description: putative protein
  misc_feature (13)..(117): Homolog of NCBI NO: 7486783 NR Description: hypothetical protein M3E9.170 - Arabidopsis
  misc_feature (1)..(116): Homolog of NCBI NO: 34913258 NR Description: P0519E12.4 [Oryza sativa (japonica
  misc_feature (14)..(116): Homolog of NCBI NO: 34903272 NR Description: unnamed protein product [Oryza sativa (japonica
  misc_feature (1)..(117): Homolog of NCBI NO: 21554312 NR Description: unknown [Arabidopsis thaliana]
  misc_feature (1)..(117): Homolog of NCBI NO: 18396059 NR Description: expressed protein
  misc_feature (1)..(117): Homolog of NCBI NO: 15223679 NR Description: unknown protein; protein id: At1g14200.1
MIGSRSGLDDFFSDGGKQGRSPALKSAVENMPRVVIGEDKEKNGGSCAICLDEWSKGDVAAEMPCKHKFHSKCVEEWLGRHATCPMCRFEMPVEEVEEEKKIGIWIGFSINAGDRRN

SEQ ID NO: 35443 - protein, 87 aa, Arabidopsis thaliana
  peptide (1)..(87): Ceres Seq. ID no. 12332020
  misc_feature (17)..(57): Pfam Name: Zinc finger, C3HC4 type (RING finger) Pfam Description: Zinc finger, C3HC4 type (RING finger)
  misc_feature (1)..(71): Homolog of NCBI NO: 15231003 NR Description: unknown protein
  misc_feature (1)..(85): Homolog of NCBI NO: 15232595 NR Description: putative protein
  misc_feature (1)..(70): Homolog of NCBI NO: 15241188 NR Description: putative protein
  misc_feature (1)..(87): Homolog of NCBI NO: 22328949 NR Description: putative protein
  misc_feature (1)..(87): Homolog of NCBI NO: 7486783 NR Description: hypothetical protein M3E9.170 - Arabidopsis
  misc_feature (1)..(86): Homolog of NCBI NO: 34913258 NR Description: P0519E12.4 [Oryza sativa (japonica
  misc_feature (1)..(86): Homolog of NCBI NO: 34903272 NR Description: unnamed protein product [Oryza sativa (japonica
  misc_feature (1)..(87): Homolog of NCBI NO: 21554312 NR Description: unknown [Arabidopsis thaliana]
  misc_feature (1)..(87): Homolog of NCBI NO: 18396059 NR Description: expressed protein
  misc_feature (1)..(87): Homolog of NCBI NO: 15223679 NR Description: unknown protein; protein id: At1g14200.1
MPRVVIGEDKEKNGGSCAICLDEWSKGDVAAEMPCKHKFHSKCVEEWLGRHATCPMCRFEMPVEEVEEEKKIGIWIGFSINAGDRRN

SEQ ID NO: 35444 - DNA, 1456 bp, Arabidopsis thaliana
  misc_feature (1)..(1456): Ceres Seq. ID no. 13495658
  misc_feature: MA Experiment ID: 108463 Result: Up-regulated in Transcription
  misc_feature: MA Experiment 108463 PARAMETER Experiment Name: At_Germinating_Seeds_cDNA_P Parameter: Age (day) Value: 3 vs. 0
  misc_feature: MA Experiment 108463 PARAMETER Experiment Name: At_Germinating_Seeds_cDNA_P Parameter: Tissue Value: Germinating Seeds
  misc_feature: MA Experiment ID: 108464 Result: Up-regulated in Transcription
  misc_feature: MA Experiment 108464 PARAMETER Experiment Name: At_Germinating_Seeds_cDNA_P Parameter: Age (day) Value: 4 vs. 0
  misc_feature: MA Experiment 108464 PARAMETER Experiment Name: At_Germinating_Seeds_cDNA_P Parameter: Tissue Value: Germinating Seeds
  misc_feature: MA Experiment ID: 108572 Result: Down-regulated in Transcription
  misc_feature: MA Experiment 108572 PARAMETER Experiment Name: At_Drought_cDNA_P Parameter: Timepoint (hr) Value: 1
  misc_feature: MA Experiment 108572 PARAMETER Experiment Name: At_Drought_cDNA_P Parameter: Tissue Value: Aerial
  misc_feature: MA Experiment 108572 PARAMETER Experiment Name: At_Drought_cDNA_P Parameter: Treatment Value: Drought vs. No Drought
  misc_feature: MA Experiment ID: 108579 Result: Up-regulated in Transcription
  misc_feature: MA Experiment 108579 PARAMETER Experiment Name: At_4deg_Cold_cDNA_P Parameter: Temperature (deg C) Value: 4 vs. 22
  misc_feature: MA Experiment 108579 PARAMETER Experiment Name: At_4deg_Cold_cDNA_P Parameter: Timepoint (hr) Value: 6
  misc_feature: MA Experiment 108579 PARAMETER Experiment Name: At_4deg_Cold_cDNA_P Parameter: Tissue Value: Aerial
  misc_feature: MA Experiment ID: 108595 Result: Up-regulated in Transcription
  misc_feature: MA Experiment 108595 PARAMETER Experiment Name: At_Ler-pi_Ovule_cDNA_P Parameter: Plant Line Value: null
  misc_feature: MA Experiment ID: 20000184 Result: Up-regulated in Transcription
  misc_feature: MA Experiment 20000184 PARAMETER Experiment Name: At_Shoots__P Parameter: Age (day) Value: 7
  misc_feature: MA Experiment 20000184 PARAMETER Experiment Name: At_Shoots__P Parameter: Tissue Value: Shoots vs. Whole Plant
  misc_feature: MA Experiment ID: 20000224 Result: Down-regulated in Transcription
  misc_feature: MA Experiment ID: 20001247 Result: Up-regulated in Transcription
  misc_feature: MA Experiment 20001247 PARAMETER Experiment Name: At_Far-red-induction_P Parameter: Age (day) Value: 7
  misc_feature: MA Experiment 20001247 PARAMETER Experiment Name: At_Far-red-induction_P Parameter: Light Value: Far-red vs. White
  misc_feature: MA Experiment 20001247 PARAMETER Experiment Name: At_Far-red-induction_P Parameter: Organism Value: A. thaliana
  misc_feature: MA Experiment 20001247 PARAMETER Experiment Name: At_Far-red-induction_P Parameter: Plant Line Value: Columbia
  misc_feature: MA Experiment 20001247 PARAMETER Experiment Name: At_Far-red-induction_P Parameter: Timepoint (hr) Value: 1
  misc_feature: MA Experiment 20001247 PARAMETER Experiment Name: At_Far-red-induction_P Parameter: Tissue Value: Whole Plant
tggaatcactttagttatcaatcgatagaaacgcctttcaattaccaaacatcgaaaccaccatgagggttatctcaaaactgttcgattccgacagaagacgaatacccaaatcgccgaagcatttggattccggcgaaagcgccacgtcatcttcctcactcagcgacgtaaccaccggctcaagcagccttcatagcagtctctctctccaaacgcttccttcagttccctctcttcagaaaatcccatccaccaccgtcaccgtctctcactccgttacctcctcgtttaaactccgtgaacggagtcttcctgtaacttgtctcgccgtcaatggtggttacctcttcgccgtgtctggacacgaagtaagtatctacgatcgcgacatgtgtgctcatctcgacacattcaacggccaagatcctttctcaggaaccgtgaagtccgtcggcttctccggtgagaaaatcttcacggcgcatcaagacggtaaaatcggagtttggaaacttacggcgaaaagcggttataaacagttaacgacgcttcctactttaaacgaccgtttacgacgtttcgctcttcctaaaaactacgttcaagtacgccgtcataagaaacgtctctggatcgaacatgctgacgccgttactgctctcgccgttagtgacggattcatttactctgtttcttgggataagactttgaagatatggagagcctccgatcttcgttgcaaagaatcaatcaaagctcacgatgacgccgttaatgccattgccgtttctactaacggcaccgtttacactggatccgcggatagacgtatccgggtttgggccaaaccgaccggtgagaaacgtcacacgttagttgcgactttagagaagcacaaatcggcggttaacgcattagcattaaacgacgacggatcggttttgttctccggttcgtgtgaccggtctattttggtttgggagagagaggatacttccaattacatggcggtgagaggtgcgttgaggggacatgataaagcaatacttagcttgttcaacgtctctgatttgctactcagtggatcagctgatcggacggtcaggatttggcgacgtggacccgattctagttatagttgtttggaggttctttccggtcataccaagccggttaagtcgttggcggcggttagagaaaaggagttagacgatgtcgtttcgatcattagtggaagtcttgacggagaggttaaatgttggaaggtgtccgtcaccaaaccggataattcattttacacgaatctcgttcaataaattagtggcattaatttgttcttttgtcggtgtgttttatttatttgttagtactttagtattgttcggcgaacaaacaatttggcgtttttcagaagtcatttacacaaaatgagtaagaaataattgagcattat

SEQ ID NO: 35445 - protein, 418 aa, Arabidopsis thaliana
  peptide (1)..(418): Ceres Seq. ID no. 13495659
  misc_feature (40)..(408): Homolog of NCBI NO: 15229740 NR Description: transducin / WD-40 repeat protein family
  misc_feature (26)..(418): Homolog of NCBI NO: 15231088 NR Description: transducin / WD-40 repeat protein family
  misc_feature (86)..(404): Homolog of NCBI NO: 17979259 NR Description: At1g49450/F13F21_11 [Arabidopsis thaliana]
  misc_feature (86)..(404): Homolog of NCBI NO: 15222143 NR Description: transducin / WD-40 repeat protein family
  misc_feature (86)..(404): Homolog of NCBI NO: 15230244 NR Description: transducin / WD-40 repeat protein family
  misc_feature (125)..(409): Homolog of NCBI NO: 31126785 NR Description: putative WD repeat-protein
  misc_feature (26)..(404): Homolog of NCBI NO: 15225317 NR Description: transducin / WD-40 repeat protein family
  misc_feature (116)..(405): Homolog of NCBI NO: 15240616 NR Description: transducin / WD-40 repeat protein family
  misc_feature (26)..(406): Homolog of NCBI NO: 15221675 NR Description: transducin / WD-40 repeat protein family
  misc_feature (1)..(418): Homolog of NCBI NO: 18395507 NR Description: transducin / WD-40 repeat protein family
MRVISKLFDSDRRRIPKSPKHLDSGESATSSSSLSDVTTGSSSLHSSLSLQTLPSVPSLQKIPSTTVTVSHSVTSSFKLRERSLPVTCLAVNGGYLFAVSGHEVSIYDRDMCAHLDTFNGQDPFSGTVKSVGFSGEKIFTAHQDGKIGVWKLTAKSGYKQLTTLPTLNDRLRRFALPKNYVQVRRHKKRLWIEHADAVTALAVSDGFIYSVSWDKTLKIWRASDLRCKESIKAHDDAVNAIAVSTNGTVYTGSADRRIRVWAKPTGEKRHTLVATLEKHKSAVNALALNDDGSVLFSGSCDRSILVWEREDTSNYMAVRGALRGHDKAILSLFNVSDLLLSGSADRTVRIWRRGPDSSYSCLEVLSGHTKPVKSLAAVREKELDDVVSIISGSLDGEVKCWKVSVTKPDNSFYTNLVQ

SEQ ID NO: 35446 - protein, 308 aa, Arabidopsis thaliana
  peptide (1)..(308): Ceres Seq. ID no. 13495660
  misc_feature (1)..(298): Homolog of NCBI NO: 15229740 NR Description: transducin / WD-40 repeat protein family
  misc_feature (1)..(308): Homolog of NCBI NO: 15231088 NR Description: transducin / WD-40 repeat protein family
  misc_feature (1)..(294): Homolog of NCBI NO: 17979259 NR Description: At1g49450/F13F21_11 [Arabidopsis thaliana]
  misc_feature (1)..(294): Homolog of NCBI NO: 15222143 NR Description: transducin / WD-40 repeat protein family
  misc_feature (1)..(294): Homolog of NCBI NO: 15230244 NR Description: transducin / WD-40 repeat protein family
  misc_feature (15)..(299): Homolog of NCBI NO: 31126785 NR Description: putative WD repeat-protein
  misc_feature (1)..(294): Homolog of NCBI NO: 15225317 NR Description: transducin / WD-40 repeat protein family
  misc_feature (6)..(295): Homolog of NCBI NO: 15240616 NR Description: transducin / WD-40 repeat protein family
  misc_feature (1)..(296): Homolog of NCBI NO: 15221675 NR Description: transducin / WD-40 repeat protein family
  misc_feature (1)..(308): Homolog of NCBI NO: 18395507 NR Description: transducin / WD-40 repeat protein family
MCAHLDTFNGQDPFSGTVKSVGFSGEKIFTAHQDGKIGVWKLTAKSGYKQLTTLPTLNDRLRRFALPKNYVQVRRHKKRLWIEHADAVTALAVSDGFIYSVSWDKTLKIWRASDLRCKESIKAHDDAVNAIAVSTNGTVYTGSADRRIRVWAKPTGEKRHTLVATLEKHKSAVNALALNDDGSVLFSGSCDRSILVWEREDTSNYMAVRGALRGHDKAILSLFNVSDLLLSGSADRTVRIWRRGPDSSYSCLEVLSGHTKPVKSLAAVREKELDDVVSIISGSLDGEVKCWKVSVTKPDNSFYTNLVQ

SEQ ID NO: 35447 - DNA, 1027 bp, Arabidopsis thaliana
  misc_feature (1)..(1027): Ceres Seq. ID no. 12421011
  misc_feature: MA Experiment ID: 108434 Result: Up-regulated in Transcription
  misc_feature: MA Experiment 108434 PARAMETER Experiment Name: At_Root_Tips_cDNA_P Parameter: Tissue Value: Root Tips
  misc_feature: MA Experiment ID: 108435 Result: Up-regulated in Transcription
  misc_feature: MA Experiment 108435 PARAMETER Experiment Name: At_stm_Mutants_cDNA_P Parameter: Plant Line Value: wt Landsburg vs stm
  misc_feature: MA Experiment 108435 PARAMETER Experiment Name: At_stm_Mutants_cDNA_P Parameter: Tissue Value: Shoot Apical Meristem Region
  misc_feature: MA Experiment ID: 108461 Result: Up-regulated in Transcription
  misc_feature: MA Experiment 108461 PARAMETER Experiment Name: At_Germinating_Seeds_cDNA_P Parameter: Age (day) Value: 1 vs. 0
  misc_feature: MA Experiment 108461 PARAMETER Experiment Name: At_Germinating_Seeds_cDNA_P Parameter: Tissue Value: Germinating Seeds
  misc_feature: MA Experiment ID: 108462 Result: Up-regulated in Transcription
  misc_feature: MA Experiment 108462 PARAMETER Experiment Name: At_Germinating_Seeds_cDNA_P Parameter: Age (day) Value: 2 vs. 0
  misc_feature: MA Experiment 108462 PARAMETER Experiment Name: At_Germinating_Seeds_cDNA_P Parameter: Tissue Value: Germinating Seeds
  misc_feature: MA Experiment ID: 108464 Result: Up-regulated in Transcription
  misc_feature: MA Experiment 108464 PARAMETER Experiment Name: At_Germinating_Seeds_cDNA_P Parameter: Age (day) Value: 4 vs. 0
  misc_feature: MA Experiment 108464 PARAMETER Experiment Name: At_Germinating_Seeds_cDNA_P Parameter: Tissue Value: Germinating Seeds
  misc_feature: MA Experiment ID: 108573 Result: Up-regulated in Transcription
  misc_feature: MA Experiment 108573 PARAMETER Experiment Name: At_Drought_cDNA_P Parameter: Timepoint (hr) Value: 6
  misc_feature: MA Experiment 108573 PARAMETER Experiment Name: At_Drought_cDNA_P Parameter: Tissue Value: Aerial
  misc_feature: MA Experiment 108573 PARAMETER Experiment Name: At_Drought_cDNA_P Parameter: Treatment Value: Drought vs. No Drought
  misc_feature: MA Experiment ID: 108577 Result: Up-regulated in Transcription
  misc_feature: MA Experiment 108577 PARAMETER Experiment Name: At_42deg_Heat_cDNA_P Parameter: Temperature (deg C) Value: 42 vs. 22
  misc_feature: MA Experiment 108577 PARAMETER Experiment Name: At_42deg_Heat_cDNA_P Parameter: Timepoint (hr) Value: 6
  misc_feature: MA Experiment 108577 PARAMETER Experiment Name: At_42deg_Heat_cDNA_P Parameter: Tissue Value: Aerial
  misc_feature: MA Experiment ID: 20000068 Result: Up-regulated in Transcription
  misc_feature: MA Experiment ID: 20000093 Result: Up-regulated in Transcription
  misc_feature: MA Experiment 20000093 PARAMETER Experiment Name: At_42deg_Heat_cDNA_P Parameter: Temperature (deg C) Value: 42 vs. 22
  misc_feature: MA Experiment 20000093 PARAMETER Experiment Name: At_42deg_Heat_cDNA_P Parameter: Timepoint (hr) Value: 0.5
  misc_feature: MA Experiment 20000093 PARAMETER Experiment Name: At_42deg_Heat_cDNA_P Parameter: Tissue Value: Aerial
  misc_feature: MA Experiment ID: 20000111 Result: Up-regulated in Transcription
  misc_feature: MA Experiment 20000111 PARAMETER Experiment Name: At_42deg_Heat_cDNA_P Parameter: Temperature (deg C) Value: 42 vs. 22
  misc_feature: MA Experiment 20000111 PARAMETER Experiment Name: At_42deg_Heat_cDNA_P Parameter: Timepoint (hr) Value: 6
  misc_feature: MA Experiment 20000111 PARAMETER Experiment Name: At_42deg_Heat_cDNA_P Parameter: Tissue Value: Aerial
  misc_feature: MA Experiment ID: 20000112 Result: Up-regulated in Transcription
  misc_feature: MA Experiment 20000112 PARAMETER Experiment Name: At_42deg_Heat_cDNA_P Parameter: Temperature (deg C) Value: 42 vs. 22
  misc_feature: MA Experiment 20000112 PARAMETER Experiment Name: At_42deg_Heat_cDNA_P Parameter: Timepoint (hr) Value: 2
  misc_feature: MA Experiment 20000112 PARAMETER Experiment Name: At_42deg_Heat_cDNA_P Parameter: Tissue Value: Aerial
  misc_feature: MA Experiment ID: 20000113 Result: Up-regulated in Transcription
  misc_feature: MA Experiment 20000113 PARAMETER Experiment Name: At_42deg_Heat_cDNA_P Parameter: Temperature (deg C) Value: 42 vs. 22
  misc_feature: MA Experiment 20000113 PARAMETER Experiment Name: At_42deg_Heat_cDNA_P Parameter: Timepoint (hr) Value: 8
  misc_feature: MA Experiment 20000113 PARAMETER Experiment Name: At_42deg_Heat_cDNA_P Parameter: Tissue Value: Aerial
  misc_feature: MA Experiment ID: 20000117 Result: Up-regulated in Transcription
  misc_feature: MA Experiment 20000117 PARAMETER Experiment Name: At_100uM_ABA_Mutants_cDNA_P Parameter: Plant Line Value: Columbia
  misc_feature: MA Experiment 20000117 PARAMETER Experiment Name: At_100uM_ABA_Mutants_cDNA_P Parameter: Timepoint (hr) Value: 6
  misc_feature: MA Experiment 20000117 PARAMETER Experiment Name: At_100uM_ABA_Mutants_cDNA_P Parameter: Tissue Value: Aerial
  misc_feature: MA Experiment 20000117 PARAMETER Experiment Name: At_100uM_ABA_Mutants_cDNA_P Parameter: Treatment Value: 100uM ABA vs. No Treatment
  misc_feature: MA Experiment ID: 20000144 Result: Up-regulated in Transcription
  misc_feature: MA Experiment 20000144 PARAMETER Experiment Name: At_42deg_Heat_cDNA_P Parameter: Temperature (deg C) Value: 42 vs. 22
  misc_feature: MA Experiment 20000144 PARAMETER Experiment Name: At_42deg_Heat_cDNA_P Parameter: Timepoint (hr) Value: 1
  misc_feature: MA Experiment 20000144 PARAMETER Experiment Name: At_42deg_Heat_cDNA_P Parameter: Tissue Value: Aerial
  misc_feature: MA Experiment ID: 20000224 Result: Down-regulated in Transcription
  misc_feature: MA Experiment ID: 20000306 Result: Up-regulated in Transcription
  misc_feature: MA Experiment 20000306 PARAMETER Experiment Name: At_Germinating_Seeds_Sub_P Parameter: Age (hr) Value: 6 vs. 0
  misc_feature: MA Experiment 20000306 PARAMETER Experiment Name: At_Germinating_Seeds_Sub_P Parameter: Organism Value: A. thaliana
  misc_feature: MA Experiment 20000306 PARAMETER Experiment Name: At_Germinating_Seeds_Sub_P Parameter: Plant Line Value: WS
  misc_feature: MA Experiment 20000306 PARAMETER Experiment Name: At_Germinating_Seeds_Sub_P Parameter: Tissue Value: Germinating Seeds
  misc_feature: MA Experiment ID: 20000307 Result: Up-regulated in Transcription
  misc_feature: MA Experiment 20000307 PARAMETER Experiment Name: At_Germinating_Seeds_Sub_P Parameter: Age (hr) Value: 24 vs. 0
  misc_feature: MA Experiment 20000307 PARAMETER Experiment Name: At_Germinating_Seeds_Sub_P Parameter: Organism Value: A. thaliana
  misc_feature: MA Experiment 20000307 PARAMETER Experiment Name: At_Germinating_Seeds_Sub_P Parameter: Plant Line Value: WS
  misc_feature: MA Experiment 20000307 PARAMETER Experiment Name: At_Germinating_Seeds_Sub_P Parameter: Tissue Value: Germinating Seeds
  misc_feature: MA Experiment ID: 20000314 Result: Down-regulated in Transcription
  misc_feature: MA Experiment 20000314 PARAMETER Experiment Name: At_14day_Shoots-Roots_Sub_P Parameter: Age (day) Value: 14
  misc_feature: MA Experiment 20000314 PARAMETER Experiment Name: At_14day_Shoots-Roots_Sub_P Parameter: Organism Value: A. thaliana
  misc_feature: MA Experiment 20000314 PARAMETER Experiment Name: At_14day_Shoots-Roots_Sub_P Parameter: Plant Line Value: WS
  misc_feature: MA Experiment 20000314 PARAMETER Experiment Name: At_14day_Shoots-Roots_Sub_P Parameter: Tissue Value: Roots vs. Whole Plant
  misc_feature: MA Experiment ID: 20000327 Result: Up-regulated in Transcription
  misc_feature: MA Experiment 20000327 PARAMETER Experiment Name: At_42deg_Heat_Sub_P Parameter: Age (day) Value: 14
  misc_feature: MA Experiment 20000327 PARAMETER Experiment Name: At_42deg_Heat_Sub_P Parameter: Organism Value: A. thaliana
  misc_feature: MA Experiment 20000327 PARAMETER Experiment Name: At_42deg_Heat_Sub_P Parameter: Plant Line Value: WS
  misc_feature: MA Experiment 20000327 PARAMETER Experiment Name: At_42deg_Heat_Sub_P Parameter: Temperature (deg C) Value: 42 vs. 22
  misc_feature: MA Experiment 20000327 PARAMETER Experiment Name: At_42deg_Heat_Sub_P Parameter: Timepoint (hr) Value: 1
  misc_feature: MA Experiment 20000327 PARAMETER Experiment Name: At_42deg_Heat_Sub_P Parameter: Tissue Value: Aerial
  misc_feature: MA Experiment ID: 20000328 Result: Up-regulated in Transcription
  misc_feature: MA Experiment 20000328 PARAMETER Experiment Name: At_42deg_Heat_Sub_P Parameter: Age (day) Value: 14
  misc_feature: MA Experiment 20000328 PARAMETER Experiment Name: At_42deg_Heat_Sub_P Parameter: Organism Value: A. thaliana
  misc_feature: MA Experiment 20000328 PARAMETER Experiment Name: At_42deg_Heat_Sub_P Parameter: Plant Line Value: WS
  misc_feature: MA Experiment 20000328 PARAMETER Experiment Name: At_42deg_Heat_Sub_P Parameter: Temperature (deg C) Value: 42 vs. 22
  misc_feature: MA Experiment 20000328 PARAMETER Experiment Name: At_42deg_Heat_Sub_P Parameter: Timepoint (hr) Value: 6
  misc_feature: MA Experiment 20000328 PARAMETER Experiment Name: At_42deg_Heat_Sub_P Parameter: Tissue Value: Aerial
  misc_feature: MA Experiment ID: 20000355 Result: Up-regulated in Transcription
  misc_feature: MA Experiment 20000355 PARAMETER Experiment Name: At_Siliques_Sub_P Parameter: Age (day) Value: 21
  misc_feature: MA Experiment 20000355 PARAMETER Experiment Name: At_Siliques_Sub_P Parameter: Organism Value: A. thaliana
  misc_feature: MA Experiment 20000355 PARAMETER Experiment Name: At_Siliques_Sub_P Parameter: Plant Line Value: WS
  misc_feature: MA Experiment 20000355 PARAMETER Experiment Name: At_Siliques_Sub_P Parameter: Tissue Value: Less Than 5mm Siliques vs. Whole Plant
  misc_feature: MA Experiment ID: 20000440 Result: Up-regulated in Transcription
  misc_feature: MA Experiment 20000440 PARAMETER Experiment Name: At_Closed-Flower__Sub_P Parameter: Tissue Value: Closed Flower vs. Whole Plant
  misc_feature: MA Experiment ID: 20000634 Result: Down-regulated in Transcription
  misc_feature: MA Experiment 20000634 PARAMETER Experiment Name: At_10percent_PEG_Sub_P Parameter: Age (day) Value: 12
  misc_feature: MA Experiment 20000634 PARAMETER Experiment Name: At_10percent_PEG_Sub_P Parameter: Organism Value: A. thaliana
  misc_feature: MA Experiment 20000634 PARAMETER Experiment Name: At_10percent_PEG_Sub_P Parameter: Plant Line Value: WS
  misc_feature: MA Experiment 20000634 PARAMETER Experiment Name: At_10percent_PEG_Sub_P Parameter: Timepoint (day) Value: 12
  misc_feature: MA Experiment 20000634 PARAMETER Experiment Name: At_10percent_PEG_Sub_P Parameter: Tissue Value: Whole Plant
  misc_feature: MA Experiment 20000634 PARAMETER Experiment Name: At_10percent_PEG_Sub_P Parameter: Treatment Value: 10% PEG vs. No Treatment
attcgtcttctccaattttctcgcgaagaaaactttcctactttgtttcaatccaaacgagtcaaaatgcttatcaagactgtttcttcatcttcttcttcagctctctcgctggtgaatttccatggcgtgaagaaggatgtgtctcctttgttaccttccatttcatcgaatcttcgagtttcttctggaaaatctggaaaattaactttctctgttcgcgcatctaaaagctcaaccaccgacgcgctaagcggcgttgtcttcgagccgtttaaggaagtaaaaaaggagctcgatctcgtccctaccagctctcatctctcactcgctcgacaaaagtactcagacgagtgcgaagccgccattaacgagcagatcaatgtggaatacaatgtctcgtatgtgtatcacgctatgtatgcttactttgatcgggataacatcgcgctcaaaggtcttgccaagttctttaaggaatcaagtctggaagaaagagagcatgctgagaagttaatggagtatcagaacaaacgtggtgggagggttaagttacagtccattgtaatgcctctttcagagtttgaacatgttgacaaaggagatgctctttatggcatggagcttgctctgtcactggagaaactagttaatgagaagctcttaaaccttcacagtgttgcttcgaggaacaatgatgtccacttggcagattttattgagagcgagtttctgacagagcaggtggaagcaatcaagttgatctcagaatatgtggctcaactgcgacgagttggcaaaggacacggaacatggcatttcaatcagatgcttctggaagggtaagcagcttcgagggactcttgtgtctactgtgtttctatatgaagctctcttagtgatatgtatggaactactttatgtttagttctttagcttttacgattttgtgaggtagtagacttctttttctgtaagagacaaaagacatgatcacataactttatattctggtataaggttcacc

SEQ ID NO: 35448 - protein, 281 aa, Arabidopsis thaliana
  peptide (1)..(281): Ceres Seq. ID no. 12421012
  misc_feature (120)..(265): Pfam Name: Ferritin-like domain Pfam Description: Ferritin-like domain
  misc_feature (32)..(281): Homolog of NCBI NO: 15228818 NR Description: putative protein
  misc_feature (23)..(281): Homolog of NCBI NO: 15225679 NR Description: putative ferritin
IRLLQFSREENFPTLFQSKRVKMLIKTVSSSSSSALSLVNFHGVKKDVSPLLPSISSNLRVSSGKSGKLTFSVRASKSSTTDALSGVVFEPFKEVKKELDLVPTSSHLSLARQKYSDECEAAINEQINVEYNVSYVYHAMYAYFDRDNIALKGLAKFFKESSLEEREHAEKLMEYQNKRGGRVKLQSIVMPLSEFEHVDKGDALYGMELALSLEKLVNEKLLNLHSVASRNNDVHLADFIESEFLTEQVEAIKLISEYVAQLRRVGKGHGTWHFNQMLLEG

SEQ ID NO: 35449 - protein, 259 aa, Arabidopsis thaliana
  peptide (1)..(259): Ceres Seq. ID no. 12421013
  misc_feature (98)..(243): Pfam Name: Ferritin-like domain Pfam Description: Ferritin-like domain
  misc_feature (10)..(259): Homolog of NCBI NO: 15228818 NR Description: putative protein
  misc_feature (1)..(259): Homolog of NCBI NO: 15225679 NR Description: putative ferritin
MLIKTVSSSSSSALSLVNFHGVKKDVSPLLPSISSNLRVSSGKSGKLTFSVRASKSSTTDALSGVVFEPFKEVKKELDLVPTSSHLSLARQKYSDECEAAINEQINVEYNVSYVYHAMYAYFDRDNIALKGLAKFFKESSLEEREHAEKLMEYQNKRGGRVKLQSIVMPLSEFEHVDKGDALYGMELALSLEKLVNEKLLNLHSVASRNNDVHLADFIESEFLTEQVEAIKLISEYVAQLRRVGKGHGTWHFNQMLLEG

SEQ ID NO: 35450 - protein, 142 aa, Arabidopsis thaliana
  peptide (1)..(142): Ceres Seq. ID no. 12421014
  misc_feature (1)..(126): Pfam Name: Ferritin-like domain Pfam Description: Ferritin-like domain
  misc_feature (1)..(142): Homolog of NCBI NO: 15228818 NR Description: putative protein
  misc_feature (1)..(142): Homolog of NCBI NO: 15225679 NR Description: putative ferritin
MYAYFDRDNIALKGLAKFFKESSLEEREHAEKLMEYQNKRGGRVKLQSIVMPLSEFEHVDKGDALYGMELALSLEKLVNEKLLNLHSVASRNNDVHLADFIESEFLTEQVEAIKLISEYVAQLRRVGKGHGTWHFNQMLLEG

SEQ ID NO: 35451 - DNA, 1524 bp, Arabidopsis thaliana
  misc_feature (1)..(1524): Ceres Seq. ID no. 15174461
  misc_feature: MA Experiment ID: 20000089 Result: Up-regulated in Transcription
  misc_feature: MA Experiment ID: 20000173 Result: Down-regulated in Transcription
  misc_feature: MA Experiment 20000173 PARAMETER Experiment Name: At_42deg_Heat_P Parameter: Age (day) Value: 14
  misc_feature: MA Experiment 20000173 PARAMETER Experiment Name: At_42deg_Heat_P Parameter: Organism Value: A. thaliana
  misc_feature: MA Experiment 20000173 PARAMETER Experiment Name: At_42deg_Heat_P Parameter: Plant Line Value: WS
  misc_feature: MA Experiment 20000173 PARAMETER Experiment Name: At_42deg_Heat_P Parameter: Temperature (deg C) Value: 42 vs. 22
  misc_feature: MA Experiment 20000173 PARAMETER Experiment Name: At_42deg_Heat_P Parameter: Timepoint (hr) Value: 6
  misc_feature: MA Experiment 20000173 PARAMETER Experiment Name: At_42deg_Heat_P Parameter: Tissue Value: Aerial
  misc_feature: MA Experiment ID: 20000182 Result: Down-regulated in Transcription
  misc_feature: MA Experiment 20000182 PARAMETER Experiment Name: At_2mM_SA_P Parameter: Age (day) Value: 14
  misc_feature: MA Experiment 20000182 PARAMETER Experiment Name: At_2mM_SA_P Parameter: Organism Value: A. thaliana
  misc_feature: MA Experiment 20000182 PARAMETER Experiment Name: At_2mM_SA_P Parameter: Plant Line Value: WS
  misc_feature: MA Experiment 20000182 PARAMETER Experiment Name: At_2mM_SA_P Parameter: Timepoint (hr) Value: 6
  misc_feature: MA Experiment 20000182 PARAMETER Experiment Name: At_2mM_SA_P Parameter: Tissue Value: Aerial
  misc_feature: MA Experiment 20000182 PARAMETER Experiment Name: At_2mM_SA_P Parameter: Treatment Value: 2mM SA vs. No Treatment
  misc_feature: MA Experiment ID: 20000185 Result: Down-regulated in Transcription
  misc_feature: MA Experiment 20000185 PARAMETER Experiment Name: At_Roots__P Parameter: Age (day) Value: 7 vs. 21
  misc_feature: MA Experiment 20000185 PARAMETER Experiment Name: At_Roots__P Parameter: Organism Value: A. thaliana
  misc_feature: MA Experiment 20000185 PARAMETER Experiment Name: At_Roots__P Parameter: Tissue Value: Roots vs. Whole Plant
  misc_feature: MA Experiment ID: 20000213 Result: Up-regulated in Transcription
  misc_feature: MA Experiment 20000213 PARAMETER Experiment Name: At_4deg_Cold_P Parameter: Timepoint (hr) Value: 2
  misc_feature: MA Experiment ID: 20000437 Result: Down-regulated in Transcription
  misc_feature: MA Experiment 20000437 PARAMETER Experiment Name: At_Drought_P Parameter: Age (day) Value: 8
  misc_feature: MA Experiment 20000437 PARAMETER Experiment Name: At_Drought_P Parameter: Organism Value: A. thaliana
  misc_feature: MA Experiment 20000437 PARAMETER Experiment Name: At_Drought_P Parameter: Plant Line Value: WS
  misc_feature: MA Experiment 20000437 PARAMETER Experiment Name: At_Drought_P Parameter: Timepoint (hr) Value: 24
  misc_feature: MA Experiment 20000437 PARAMETER Experiment Name: At_Drought_P Parameter: Tissue Value: Whole Plant
  misc_feature: MA Experiment 20000437 PARAMETER Experiment Name: At_Drought_P Parameter: Treatment Value: Drought vs. No Drought
  misc_feature: MA Experiment ID: 20000439 Result: Down-regulated in Transcription
  misc_feature: MA Experiment 20000439 PARAMETER Experiment Name: At_Roots__P Parameter: Age (day) Value: 14 vs. 21
  misc_feature: MA Experiment 20000439 PARAMETER Experiment Name: At_Roots__P Parameter: Organism Value: A. thaliana
  misc_feature: MA Experiment 20000439 PARAMETER Experiment Name: At_Roots__P Parameter: Tissue Value: Roots vs. Whole Plant
  misc_feature: MA Experiment ID: 20000441 Result: Down-regulated in Transcription
  misc_feature: MA Experiment 20000441 PARAMETER Experiment Name: At_1uM_BR-BRZ__P Parameter: Tissue Value: Shoot Apices
  misc_feature: MA Experiment 20000441 PARAMETER Experiment Name: At_1uM_BR-BRZ__P Parameter: Treatment Value: 1uM BR vs. No Treatment
  misc_feature: MA Experiment ID: 20000443 Result: Down-regulated in Transcription
  misc_feature: MA Experiment 20000443 PARAMETER Experiment Name: At_1uM_BR-BRZ__P Parameter: Tissue Value: Shoot Apices
  misc_feature: MA Experiment 20000443 PARAMETER Experiment Name: At_1uM_BR-BRZ__P Parameter: Treatment Value: 1uM BRZ vs. No Treatment
  misc_feature: MA Experiment ID: 20000495 Result: Down-regulated in Transcription
  misc_feature: MA Experiment 20000495 PARAMETER Experiment Name: At_Guard_Cells_P Parameter: Harvest Date Value: 8/2/2002
  misc_feature: MA Experiment 20000495 PARAMETER Experiment Name: At_Guard_Cells_P Parameter: Organism Value: A. thaliana
  misc_feature: MA Experiment 20000495 PARAMETER Experiment Name: At_Guard_Cells_P Parameter: Tissue Value: Guard Cells vs. Leaves
  misc_feature: MA Experiment ID: 20000527 Result: Up-regulated in Transcription
  misc_feature: MA Experiment 20000527 PARAMETER Experiment Name: At_10percent_PEG_P Parameter: Age (day) Value: 20
  misc_feature: MA Experiment 20000527 PARAMETER Experiment Name: At_10percent_PEG_P Parameter: Organism Value: A. thaliana
  misc_feature: MA Experiment 20000527 PARAMETER Experiment Name: At_10percent_PEG_P Parameter: Plant Line Value: WS
  misc_feature: MA Experiment 20000527 PARAMETER Experiment Name: At_10percent_PEG_P Parameter: Timepoint (day) Value: 20
  misc_feature: MA Experiment 20000527 PARAMETER Experiment Name: At_10percent_PEG_P Parameter: Tissue Value: Whole Plant
  misc_feature: MA Experiment 20000527 PARAMETER Experiment Name: At_10percent_PEG_P Parameter: Treatment Value: 10percent PEG vs. No Treatment
  misc_feature: MA Experiment ID: 20000794 Result: Down-regulated in Transcription
  misc_feature: MA Experiment 20000794 PARAMETER Experiment Name: At_Petals_P Parameter: Age (day) Value: 23-25 days
  misc_feature: MA Experiment 20000794 PARAMETER Experiment Name: At_Petals_P Parameter: Plant Line Value: WS
  misc_feature: MA Experiment 20000794 PARAMETER Experiment Name: At_Petals_P Parameter: Tissue Value: Petals vs. Whole plant
  misc_feature: MA Experiment ID: 20001247 Result: Down-regulated in Transcription
  misc_feature: MA Experiment 20001247 PARAMETER Experiment Name: At_Far-red-induction_P Parameter: Age (day) Value: 7
  misc_feature: MA Experiment 20001247 PARAMETER Experiment Name: At_Far-red-induction_P Parameter: Light Value: Far-red vs. White
  misc_feature: MA Experiment 20001247 PARAMETER Experiment Name: At_Far-red-induction_P Parameter: Organism Value: A. thaliana
  misc_feature: MA Experiment 20001247 PARAMETER Experiment Name: At_Far-red-induction_P Parameter: Plant Line Value: Columbia
  misc_feature: MA Experiment 20001247 PARAMETER Experiment Name: At_Far-red-induction_P Parameter: Timepoint (hr) Value: 1
  misc_feature: MA Experiment 20001247 PARAMETER Experiment Name: At_Far-red-induction_P Parameter: Tissue Value: Whole Plant
  misc_feature: MA Experiment ID: 20001458 Result: Up-regulated in Transcription
  misc_feature: MA Experiment 20001458 PARAMETER Experiment Name: At_50mM_NH4NO3_L-to-H_P Parameter: Age (day) Value: Undefined
  misc_feature: MA Experiment 20001458 PARAMETER Experiment Name: At_50mM_NH4NO3_L-to-H_P Parameter: Organism Value: Undefined
  misc_feature: MA Experiment 20001458 PARAMETER Experiment Name: At_50mM_NH4NO3_L-to-H_P Parameter: Plant Line Value: Undefined
  misc_feature: MA Experiment 20001458 PARAMETER Experiment Name: At_50mM_NH4NO3_L-to-H_P Parameter: Timepoint (hr) Value: 2
  misc_feature: MA Experiment 20001458 PARAMETER Experiment Name: At_50mM_NH4NO3_L-to-H_P Parameter: Tissue Value: Siliques
  misc_feature: MA Experiment 20001458 PARAMETER Experiment Name: At_50mM_NH4NO3_L-to-H_P Parameter: Treatment Value: 50mM NH4NO3 vs. 100mM Manitol
  misc_feature: MA Experiment ID: 20001905 Result: Down-regulated in Transcription
  misc_feature: MA Experiment 20001905 PARAMETER Experiment Name: At_Drought_Reproduction_P Parameter: Age (day) Value: 40
  misc_feature: MA Experiment 20001905 PARAMETER Experiment Name: At_Drought_Reproduction_P Parameter: Organism Value: A. thaliana
  misc_feature: MA Experiment 20001905 PARAMETER Experiment Name: At_Drought_Reproduction_P Parameter: Plant Line Value: WS
  misc_feature: MA Experiment 20001905 PARAMETER Experiment Name: At_Drought_Reproduction_P Parameter: Timepoint (day) Value: 10
  misc_feature: MA Experiment 20001905 PARAMETER Experiment Name: At_Drought_Reproduction_P Parameter: Tissue Value: Rosettes
  misc_feature: MA Experiment 20001905 PARAMETER Experiment Name: At_Drought_Reproduction_P Parameter: Treatment Value: Drought vs. No Drought
cattgggattaaactaacttctcattctcattccaccttcttcttctttgttcttgtgtgctactaaaaatcaagaaagcacaaggagacaaataaacctatccatttcattaccaaacaagccgtacattctctagttatggcttcttcttcttcttcttcttcttcttcaactacttcaaccatcacatccaaatttattgggcttatgcttcttctctctcttcaactagacttattactcggatcagctattcatcttaaaaaccaaacttcattcagacccaacagggagattcagaagcttagaagagtggaagcatatctcagcaaaatcaacaaaccttccatcaaaacaatccacagcccagacggagatgtaatagaatgtgtaccgtctcatttacaacccgcatttgatcatcctcagctacaaggccagaaaccacttgactcaccttacaggccaagtaaaggaaatgaaacaacatatgaggaaagttttaatcagttatggagtatgtccggtgaaagttgtccaattgggtcaataccaattagaaaaacaacaaagaatgatgttttaagggcaaattcaccggacatactccataactgattaaaactttcctcaaatattgattcgaaaggagcacaggatttggcgcgagccatcaaggattatcctaaccgtcgtggagacgttggatggttggattttgattacaacttaccaggagattgtctttcattcttgtattacaggcagagcagagagaataagaatccatcggatcagagaacctcgatgcttctacaagcattgggggttgcagaatcagaaaaggctaagaacaggttgaacacagagctatacggggacaaggaagcagagaaggagaaggagaagaagaagaaggaagaggaagtcaaagctattcggattccagtggtgaggcttaagtttggagaagtagcagaagcgacctcggtggtagttttaccggtttgtaaagcagaggaaggggaaaagaagattcttgaagctccaatggagatcatagccggaggggattttaaggtggttgaggcggagaaaggatggaagagatgggtagtgcttccgtcgtggaacccagtggcagccattgggaaaggcggtgtggcggtttctttcagggatgatagaaaagtgctgccttgggatggaaaggaggagcctttactggtagtggccgatagggtgaggaatgttgtggaggctgatgacgggtattatctcgtggtggctgagaacggacttaagctagagaaaggatcagatttgaaggcgagagaggtgaaggagagtttagggatggttgttttggtggtgaggccgccaagagaagatgatgatgattggcagacaagtcatcagaactgggactgaattaatagaatcaatactcatatgctgtaactgattacggagtcatcatggtcatgtaaaatttttggataaaggtggtaactttttgttct

SEQ ID NO: 35452 - protein, 207 aa, Arabidopsis thaliana
  peptide (1)..(207): Ceres Seq. ID no. 15174462
  misc_feature (1)..(25): Homolog of NCBI NO: 15239542 NR Description: hypothetical protein [Arabidopsis thaliana]
  misc_feature (1)..(207): Homolog of NCBI NO: 37534826 NR Description: unknown protein [Oryza sativa (japonica
  misc_feature (1)..(207): Homolog of NCBI NO: 15241839 NR Description: expressed protein [Arabidopsis thaliana]
  misc_feature (1)..(207): Homolog of NCBI NO: 18396920 NR Description: expressed protein [Arabidopsis thaliana]
MLLQALGVAESEKAKNRLNTELYGDKEAEKEKEKKKKEEEVKAIRIPVVRLKFGEVAEATSVVVLPVCKAEEGEKKILEAPMEIIAGGDFKVVEAEKGWKRWVVLPSWNPVAAIGKGGVAVSFRDDRKVLPWDGKEEPLLVVADRVRNVVEADDGYYLVVAENGLKLEKGSDLKAREVKESLGMVVLVVRPPREDDDDWQTSHQNWD

SEQ ID NO: 35453 - protein, 159 aa, Arabidopsis thaliana
  peptide (1)..(159): Ceres Seq. ID no. 15174463
  misc_feature (15)..(104): Homolog of NCBI NO: 6573746 NR Description: F20B24.18 [Arabidopsis thaliana]
  misc_feature (9)..(153): Homolog of NCBI NO: 34913794 NR Description: OSJNBa0026J14.25 [Oryza sativa (japonica
  misc_feature (17)..(153): Homolog of NCBI NO: 28416687 NR Description: At1g70550 [Arabidopsis thaliana]
  misc_feature (17)..(153): Homolog of NCBI NO: 25345697 NR Description: unknown protein F5A18.27 [imported] - Arabidopsis
  misc_feature (4)..(153): Homolog of NCBI NO: 30698726 NR Description: expressed protein [Arabidopsis thaliana]
  misc_feature (13)..(153): Homolog of NCBI NO: 30688348 NR Description: expressed protein [Arabidopsis thaliana]
  misc_feature (13)..(153): Homolog of NCBI NO: 25345695 NR Description: protein F26F24.22 [imported] - Arabidopsis
  misc_feature (15)..(153): Homolog of NCBI NO: 15220207 NR Description: expressed protein [Arabidopsis thaliana]
  misc_feature (1)..(153): Homolog of NCBI NO: 21389708 NR Description: putative carboxyl-terminal proteinase [Gossypium
  misc_feature (4)..(159): Homolog of NCBI NO: 15240622 NR Description: expressed protein [Arabidopsis thaliana]
MASSSSSSSSSTTSTITSKFIGLMLLLSLQLDLLLGSAIHLKNQTSFRPNREIQKLRRVEAYLSKINKPSIKTIHSPDGDVIECVPSHLQPAFDHPQLQGQKPLDSPYRPSKGNETTYEESFNQLWSMSGESCPIGSIPIRKTTKNDVLRANSPDILHN

SEQ ID NO: 35454 - protein, 136 aa, Arabidopsis thaliana
  peptide (1)..(136): Ceres Seq. ID no. 15174464
  misc_feature (1)..(81): Homolog of NCBI NO: 6573746 NR Description: F20B24.18 [Arabidopsis thaliana]
  misc_feature (1)..(130): Homolog of NCBI NO: 34913794 NR Description: OSJNBa0026J14.25 [Oryza sativa (japonica
  misc_feature (1)..(130): Homolog of NCBI NO: 28416687 NR Description: At1g70550 [Arabidopsis thaliana]
  misc_feature (1)..(130): Homolog of NCBI NO: 25345697 NR Description: unknown protein F5A18.27 [imported] - Arabidopsis
  misc_feature (1)..(130): Homolog of NCBI NO: 30698726 NR Description: expressed protein [Arabidopsis thaliana]
  misc_feature (1)..(130): Homolog of NCBI NO: 30688348 NR Description: expressed protein [Arabidopsis thaliana]
  misc_feature (1)..(130): Homolog of NCBI NO: 25345695 NR Description: protein F26F24.22 [imported] - Arabidopsis
  misc_feature (1)..(130): Homolog of NCBI NO: 15220207 NR Description: expressed protein [Arabidopsis thaliana]
  misc_feature (1)..(130): Homolog of NCBI NO: 21389708 NR Description: putative carboxyl-terminal proteinase [Gossypium
  misc_feature (1)..(136): Homolog of NCBI NO: 15240622 NR Description: expressed protein [Arabidopsis thaliana]
MLLLSLQLDLLLGSAIHLKNQTSFRPNREIQKLRRVEAYLSKINKPSIKTIHSPDGDVIECVPSHLQPAFDHPQLQGQKPLDSPYRPSKGNETTYEESFNQLWSMSGESCPIGSIPIRKTTKNDVLRANSPDILHN

SEQ ID NO: 35455 - DNA, 732 bp, Arabidopsis thaliana
  misc_feature (1)..(732): Ceres Seq. ID no. 13497746
  misc_feature: MA Experiment ID: 108433 Result: Up-regulated in Transcription
  misc_feature: MA Experiment 108433 PARAMETER Experiment Name: At_rhl_Mutant2_cDNA_P Parameter: Age (day) Value: 7
  misc_feature: MA Experiment 108433 PARAMETER Experiment Name: At_rhl_Mutant2_cDNA_P Parameter: Organism Value: A. thaliana
  misc_feature: MA Experiment 108433 PARAMETER Experiment Name: At_rhl_Mutant2_cDNA_P Parameter: Plant Line Value: rhl Mutant vs. wt landsburg
  misc_feature: MA Experiment 108433 PARAMETER Experiment Name: At_rhl_Mutant2_cDNA_P Parameter: Tissue Value: Roots
  misc_feature: MA Experiment ID: 108434 Result: Down-regulated in Transcription
  misc_feature: MA Experiment 108434 PARAMETER Experiment Name: At_Root_Tips_cDNA_P Parameter: Tissue Value: Root Tips
  misc_feature: MA Experiment ID: 108488 Result: Down-regulated in Transcription
  misc_feature: MA Experiment ID: 20000227 Result: Down-regulated in Transcription
  misc_feature: MA Experiment 20000227 PARAMETER Experiment Name: At_Root-Tips-vs-Tops_P Parameter: Tissue Value: Root Tips vs. Root Tops
  misc_feature: MA Experiment ID: 20000234 Result: Down-regulated in Transcription
  misc_feature: MA Experiment 20000234 PARAMETER Experiment Name: At_Siliques_P Parameter: Age (day) Value: 21
  misc_feature: MA Experiment 20000234 PARAMETER Experiment Name: At_Siliques_P Parameter: Organism Value: A. thaliana
  misc_feature: MA Experiment 20000234 PARAMETER Experiment Name: At_Siliques_P Parameter: Plant Line Value: WS
  misc_feature: MA Experiment 20000234 PARAMETER Experiment Name: At_Siliques_P Parameter: Tissue Value: Less Than 5mm Siliques vs. Whole Plant
  misc_feature: MA Experiment ID: 20000235 Result: Down-regulated in Transcription
  misc_feature: MA Experiment 20000235 PARAMETER Experiment Name: At_Siliques_P Parameter: Age (day) Value: 21
  misc_feature: MA Experiment 20000235 PARAMETER Experiment Name: At_Siliques_P Parameter: Organism Value: A. thaliana
  misc_feature: MA Experiment 20000235 PARAMETER Experiment Name: At_Siliques_P Parameter: Plant Line Value: WS
  misc_feature: MA Experiment 20000235 PARAMETER Experiment Name: At_Siliques_P Parameter: Tissue Value: 5-10mm Siliques vs. Whole Plant
  misc_feature: MA Experiment ID: 20000286 Result: Down-regulated in Transcription
  misc_feature: MA Experiment 20000286 PARAMETER Experiment Name: At_Open_Flower_P Parameter: Age (day) Value: 21
  misc_feature: MA Experiment 20000286 PARAMETER Experiment Name: At_Open_Flower_P Parameter: Plant Line Value: WS
  misc_feature: MA Experiment 20000286 PARAMETER Experiment Name: At_Open_Flower_P Parameter: Tissue Value: Half Open vs. Whole Plant
  misc_feature: MA Experiment ID: 20000573 Result: Down-regulated in Transcription
  misc_feature: MA Experiment 20000573 PARAMETER Experiment Name: At_100uM_ABA_Mutants__P Parameter: Organism Value: A. thaliana
  misc_feature: MA Experiment 20000573 PARAMETER Experiment Name: At_100uM_ABA_Mutants__P Parameter: Plant Line Value: CS22 vs. Ler wt
  misc_feature: MA Experiment 20000573 PARAMETER Experiment Name: At_100uM_ABA_Mutants__P Parameter: Timepoint (hr) Value: N/A
  misc_feature: MA Experiment 20000573 PARAMETER Experiment Name: At_100uM_ABA_Mutants__P Parameter: Tissue Value: Whole Plant
  misc_feature: MA Experiment 20000573 PARAMETER Experiment Name: At_100uM_ABA_Mutants__P Parameter: Treatment Value: None
  misc_feature: MA Experiment ID: 20000574 Result: Down-regulated in Transcription
  misc_feature: MA Experiment 20000574 PARAMETER Experiment Name: At_100uM_ABA_Mutants__P Parameter: Organism Value: A. thaliana
  misc_feature: MA Experiment 20000574 PARAMETER Experiment Name: At_100uM_ABA_Mutants__P Parameter: Plant Line Value: CS23 vs. Ler wt
  misc_feature: MA Experiment 20000574 PARAMETER Experiment Name: At_100uM_ABA_Mutants__P Parameter: Timepoint (hr) Value: N/A
  misc_feature: MA Experiment 20000574 PARAMETER Experiment Name: At_100uM_ABA_Mutants__P Parameter: Tissue Value: Whole Plant
  misc_feature: MA Experiment 20000574 PARAMETER Experiment Name: At_100uM_ABA_Mutants__P Parameter: Treatment Value: None
  misc_feature: MA Experiment ID: 20001905 Result: Up-regulated in Transcription
  misc_feature: MA Experiment 20001905 PARAMETER Experiment Name: At_Drought_Reproduction_P Parameter: Age (day) Value: 40
  misc_feature: MA Experiment 20001905 PARAMETER Experiment Name: At_Drought_Reproduction_P Parameter: Organism Value: A. thaliana
  misc_feature: MA Experiment 20001905 PARAMETER Experiment Name: At_Drought_Reproduction_P Parameter: Plant Line Value: WS
  misc_feature: MA Experiment 20001905 PARAMETER Experiment Name: At_Drought_Reproduction_P Parameter: Timepoint (day) Value: 10
  misc_feature: MA Experiment 20001905 PARAMETER Experiment Name: At_Drought_Reproduction_P Parameter: Tissue Value: Rosettes
  misc_feature: MA Experiment 20001905 PARAMETER Experiment Name: At_Drought_Reproduction_P Parameter: Treatment Value: Drought vs. No Drought
aaaaggtaaactcggtaacgaaatcagaattcgtcgaagaagaaaaagaagatcaatgacgttgaagaagcttgacgcgaatccatcgaccttagaatcgattttacaggaactgaaatcagacgagacaaatcgtagcaagatcaatttcatactcttcctcgccgacaatgatcccaccaccggtcaaagctggtgtccagactgtgttagagctgaacctgtgatttacaagactctagaggaatttccagaggaggtgaatctaattcgtgcttacgccggagaccgaccgacgtggcggactccggcgcatccttggagagttgattctcggtttaagctaaccggagtaccaactcttgttcgttgggatggtgactctgttaaaggacgtcttgaagatcatcaagctcaccttcctcacttgattcttccccttcttgcaccatccacttgatttgatcgatatcgatttctcgggactatcgtgggattgaggatcaaatatcttatatatatttctagttgtgaattgttttccaataaatcctttacaatggtaaaggaaagtttgtttcttcgatgatctttacgatttcgtgctcaatgtagtgttatttctctaataaattacggtgatattagccgaattctagactctggactcgagatttcgacttatatttggttttgaagttatagttgtgataaaactacgagatttgattg

SEQ ID NO: 35456 - protein, 152 aa, Arabidopsis thaliana
  peptide (1)..(152): Ceres Seq. ID no. 15223017
  misc_feature (19)..(150): Pfam Name: Eukaryotic protein of unknown function (DUF953) Pfam Description: Eukaryotic protein of unknown function (DUF953)
  misc_feature (27)..(124): Homolog of NCBI NO: 38048627 NR Description: similar to Drosophila melanogaster CG11024
  misc_feature (42)..(144): Homolog of NCBI NO: 14249348 NR Description: hypothetical protein MGC14353 [Homo sapiens]
  misc_feature (20)..(122): Homolog of NCBI NO: 39585269 NR Description: Hypothetical protein CBG00487 [Caenorhabditis
  misc_feature (39)..(124): Homolog of NCBI NO: 13386060 NR Description: hypothetical protein D11Ertd672e; putative 42-9-9
  misc_feature (39)..(124): Homolog of NCBI NO: 15216179 NR Description: putative 42-9-9 protein [Mus musculus]
  misc_feature (39)..(124): Homolog of NCBI NO: 12835324 NR Description: unnamed protein product [Mus musculus]
  misc_feature (39)..(144): Homolog of NCBI NO: 27673864 NR Description: similar to hypothetical protein D11Ertd672e
  misc_feature (32)..(144): Homolog of NCBI NO: 17556458 NR Description: Putative cytoplasmic protein of eukaryotic origin
  misc_feature (19)..(152): Homolog of NCBI NO: 18422261 NR Description: expressed protein [Arabidopsis thaliana]
  misc_feature (19)..(152): Homolog of NCBI NO: 21592399 NR Description: unknown [Arabidopsis thaliana]
KGKLGNEIRIRRRRKRRSMTLKKLDANPSTLESILQELKSDETNRSKINFILFLADNDPTTGQSWCPDCVRAEPVIYKTLEEFPEEVNLIRAYAGDRPTWRTPAHPWRVDSRFKLTGVPTLVRWDGDSVKGRLEDHQAHLPHLILPLLAPST

SEQ ID NO: 35457 - protein, 134 aa, Arabidopsis thaliana
  peptide (1)..(134): Ceres Seq. ID no. 15223018
  misc_feature (1)..(132): Pfam Name: Eukaryotic protein of unknown function (DUF953) Pfam Description: Eukaryotic protein of unknown function (DUF953)
  misc_feature (9)..(106): Homolog of NCBI NO: 38048627 NR Description: similar to Drosophila melanogaster CG11024
  misc_feature (24)..(126): Homolog of NCBI NO: 14249348 NR Description: hypothetical protein MGC14353 [Homo sapiens]
  misc_feature (2)..(104): Homolog of NCBI NO: 39585269 NR Description: Hypothetical protein CBG00487 [Caenorhabditis
  misc_feature (21)..(106): Homolog of NCBI NO: 13386060 NR Description: hypothetical protein D11Ertd672e; putative 42-9-9
  misc_feature (21)..(106): Homolog of NCBI NO: 15216179 NR Description: putative 42-9-9 protein [Mus musculus]
  misc_feature (21)..(106): Homolog of NCBI NO: 12835324 NR Description: unnamed protein product [Mus musculus]
  misc_feature (21)..(126): Homolog of NCBI NO: 27673864 NR Description: similar to hypothetical protein D11Ertd672e
  misc_feature (14)..(126): Homolog of NCBI NO: 17556458 NR Description: Putative cytoplasmic protein of eukaryotic origin
  misc_feature (1)..(134): Homolog of NCBI NO: 18422261 NR Description: expressed protein [Arabidopsis thaliana]
  misc_feature (1)..(134): Homolog of NCBI NO: 21592399 NR Description: unknown [Arabidopsis thaliana]
MTLKKLDANPSTLESILQELKSDETNRSKINFILFLADNDPTTGQSWCPDCVRAEPVIYKTLEEFPEEVNLIRAYAGDRPTWRTPAHPWRVDSRFKLTGVPTLVRWDGDSVKGRLEDHQAHLPHLILPLLAPST

SEQ ID NO: 35458 - DNA, 1331 bp, Arabidopsis thaliana
  misc_feature (1)..(1331): Ceres Seq. ID no. 13487073
  misc_feature: MA Experiment ID: 108433 Result: Down-regulated in Transcription
  misc_feature: MA Experiment 108433 PARAMETER Experiment Name: At_rhl_Mutant2_cDNA_P Parameter: Age (day) Value: 7
  misc_feature: MA Experiment 108433 PARAMETER Experiment Name: At_rhl_Mutant2_cDNA_P Parameter: Organism Value: A. thaliana
  misc_feature: MA Experiment 108433 PARAMETER Experiment Name: At_rhl_Mutant2_cDNA_P Parameter: Plant Line Value: rhl Mutant vs. wt landsburg
  misc_feature: MA Experiment 108433 PARAMETER Experiment Name: At_rhl_Mutant2_cDNA_P Parameter: Tissue Value: Roots
  misc_feature: MA Experiment ID: 108434 Result: Up-regulated in Transcription
  misc_feature: MA Experiment 108434 PARAMETER Experiment Name: At_Root_Tips_cDNA_P Parameter: Tissue Value: Root Tips
  misc_feature: MA Experiment ID: 108573 Result: Up-regulated in Transcription
  misc_feature: MA Experiment 108573 PARAMETER Experiment Name: At_Drought_cDNA_P Parameter: Timepoint (hr) Value: 6
  misc_feature: MA Experiment 108573 PARAMETER Experiment Name: At_Drought_cDNA_P Parameter: Tissue Value: Aerial
  misc_feature: MA Experiment 108573 PARAMETER Experiment Name: At_Drought_cDNA_P Parameter: Treatment Value: Drought vs. No Drought
  misc_feature: MA Experiment ID: 108577 Result: Down-regulated in Transcription
  misc_feature: MA Experiment 108577 PARAMETER Experiment Name: At_42deg_Heat_cDNA_P Parameter: Temperature (deg C) Value: 42 vs. 22
  misc_feature: MA Experiment 108577 PARAMETER Experiment Name: At_42deg_Heat_cDNA_P Parameter: Timepoint (hr) Value: 6
  misc_feature: MA Experiment 108577 PARAMETER Experiment Name: At_42deg_Heat_cDNA_P Parameter: Tissue Value: Aerial
  misc_feature: MA Experiment ID: 108595 Result: Down-regulated in Transcription
  misc_feature: MA Experiment 108595 PARAMETER Experiment Name: At_Ler-pi_Ovule_cDNA_P Parameter: Plant Line Value: null
  misc_feature: MA Experiment ID: 20000086 Result: Up-regulated in Transcription
  misc_feature: MA Experiment 20000086 PARAMETER Experiment Name: At_100uM_ABA_Mutants_cDNA_P Parameter: Plant Line Value: CS22
  misc_feature: MA Experiment 20000086 PARAMETER Experiment Name: At_100uM_ABA_Mutants_cDNA_P Parameter: Timepoint (hr) Value: 6
  misc_feature: MA Experiment 20000086 PARAMETER Experiment Name: At_100uM_ABA_Mutants_cDNA_P Parameter: Tissue Value: Aerial
  misc_feature: MA Experiment 20000086 PARAMETER Experiment Name: At_100uM_ABA_Mutants_cDNA_P Parameter: Treatment Value: 100uM ABA vs. No Treatment
  misc_feature: MA Experiment ID: 20000112 Result: Down-regulated in Transcription
  misc_feature: MA Experiment 20000112 PARAMETER Experiment Name: At_42deg_Heat_cDNA_P Parameter: Temperature (deg C) Value: 42 vs. 22
  misc_feature: MA Experiment 20000112 PARAMETER Experiment Name: At_42deg_Heat_cDNA_P Parameter: Timepoint (hr) Value: 2
  misc_feature: MA Experiment 20000112 PARAMETER Experiment Name: At_42deg_Heat_cDNA_P Parameter: Tissue Value: Aerial
  misc_feature: MA Experiment ID: 20000113 Result: Down-regulated in Transcription
  misc_feature: MA Experiment 20000113 PARAMETER Experiment Name: At_42deg_Heat_cDNA_P Parameter: Temperature (deg C) Value: 42 vs. 22
  misc_feature: MA Experiment 20000113 PARAMETER Experiment Name: At_42deg_Heat_cDNA_P Parameter: Timepoint (hr) Value: 8
  misc_feature: MA Experiment 20000113 PARAMETER Experiment Name: At_42deg_Heat_cDNA_P Parameter: Tissue Value: Aerial
  misc_feature: MA Experiment ID: 20000173 Result: Down-regulated in Transcription
  misc_feature: MA Experiment 20000173 PARAMETER Experiment Name: At_42deg_Heat_P Parameter: Age (day) Value: 14
  misc_feature: MA Experiment 20000173 PARAMETER Experiment Name: At_42deg_Heat_P Parameter: Organism Value: A. thaliana
  misc_feature: MA Experiment 20000173 PARAMETER Experiment Name: At_42deg_Heat_P Parameter: Plant Line Value: WS
  misc_feature: MA Experiment 20000173 PARAMETER Experiment Name: At_42deg_Heat_P Parameter: Temperature (deg C) Value: 42 vs. 22
  misc_feature: MA Experiment 20000173 PARAMETER Experiment Name: At_42deg_Heat_P Parameter: Timepoint (hr) Value: 6
  misc_feature: MA Experiment 20000173 PARAMETER Experiment Name: At_42deg_Heat_P Parameter: Tissue Value: Aerial
  misc_feature: MA Experiment ID: 20001451 Result: Down-regulated in Transcription
  misc_feature: MA Experiment 20001451 PARAMETER Experiment Name: At_Far-red-induction_P Parameter: Age (day) Value: 7
  misc_feature: MA Experiment 20001451 PARAMETER Experiment Name: At_Far-red-induction_P Parameter: Light Value: Far-red vs. White
  misc_feature: MA Experiment 20001451 PARAMETER Experiment Name: At_Far-red-induction_P Parameter: Organism Value: A. thaliana
  misc_feature: MA Experiment 20001451 PARAMETER Experiment Name: At_Far-red-induction_P Parameter: Plant Line Value: Columbia
  misc_feature: MA Experiment 20001451 PARAMETER Experiment Name: At_Far-red-induction_P Parameter: Timepoint (hr) Value: 24
  misc_feature: MA Experiment 20001451 PARAMETER Experiment Name: At_Far-red-induction_P Parameter: Tissue Value: Whole Plant
attacaacaaactctttgagacctaaagagagagagagcgatagtgagatttagatcaacagatttgaatcgatttctgaaaacatgcagtacaagaatctggggaaatcgggtttaaaagtgagcacgctctcgttcggagcgtgggttacgttcgggaaccagctcgatgtgaaagaagcgaaatcgattcttcagtgttgtcgtgatcatggagtcaatttcttcgataacgctgaggtttacgctaatggtcgcgctgaggagattatgggtcaagcgattcgtgaactgggttggcgtcgatccgatatcgtcatctctaccaagatcttctggggtggtcctggtcctaacgataagggtttatctaggaaacatatcgttgaaggcactaaagcttctctcaaacgacttgatatggattacgttgatgtgctctattgccacaggccggatgcttcaactcctatcgaagagactgtgagggcgatgaactacgtgattgataagggttgggccttctattggggaaccagtgaatggtcagctcaacaaattacggaggcatggggagctgctgaccggttggatttggttggtccaattgtcgaacagccagaatacaacatgttcgctaggcacaaagttgagacagagtttcttcctctgtacaccaaccatggtataggtctcactacctggagcccacttgcatctggtgtgctcactggtaaatacaacaagggagctattccctcagacagccgatttgcattggagaactacaaaaaccttgccaatagatcacttgtggatgacgtgctgaggaaagttagcggtctcaaacccattgcagatgagctaggtgtaaccttggctcagcttgcaatcgcatggtgtgcttcaaatcctaatgtgtcatctgttatcactggtgccacaagggagtcacagattcaagaaaatatgaaagctgttgatgtgatcccattgttgacccctattgttctggacaagattgagcaagtgatacagagcaaaccaaaacgtcctgaatcatataggtaaaaccaacatccaagatctctcttccctattcaatcgtttacaaaagagtgttgcaggaaaaagaaaacattagaagaagctctgtgatgtatgttgttggatgttgtctcgttttcgctttgtttgttctctttagcagcttatgcatttttaagactcagacagagagaaagagagactaatgtttttttttagtttttcttgtttcatcatttaaaaaacggtcttatttgttacttgttagtgcaacttaaagtttg

SEQ ID NO: 35459 - protein, 328 aa, Arabidopsis thaliana
  peptide (1)..(328): Ceres Seq. ID no. 13487074
  misc_feature (1)..(328): Homolog of NCBI NO: 7914984 NR Description: potassium channel Kv beta 2.2 subunit
  misc_feature (1)..(328): Homolog of NCBI NO: 7914982 NR Description: potassium channel Kv beta 2.1 subunit
  misc_feature (1)..(317): Homolog of NCBI NO: 15643082 NR Description: K+ channel, beta subunit [Thermotoga maritima]
  misc_feature (1)..(317): Homolog of NCBI NO: 22987410 NR Description: hypothetical protein [Burkholderia fungorum]
  misc_feature (1)..(322): Homolog of NCBI NO: 23394348 NR Description: K+ channel protein [Phytophthora infestans]
  misc_feature (1)..(328): Homolog of NCBI NO: 7447935 NR Description: probable potassium channel beta chain - rice
  misc_feature (1)..(328): Homolog of NCBI NO: 2832783 NR Description: potassium channel beta subunit [Egeria densa]
  misc_feature (1)..(328): Homolog of NCBI NO: 7447934 NR Description: probable potassium channel beta chain KB1 -
  misc_feature (1)..(328): Homolog of NCBI NO: 1063415 NR Description: K+ channel protein
  misc_feature (1)..(328): Homolog of NCBI NO: 15219795 NR Description: potassium channel protein, putative [Arabidopsis
MQYKNLGKSGLKVSTLSFGAWVTFGNQLDVKEAKSILQCCRDHGVNFFDNAEVYANGRAEEIMGQAIRELGWRRSDIVISTKIFWGGPGPNDKGLSRKHIVEGTKASLKRLDMDYVDVLYCHRPDASTPIEETVRAMNYVIDKGWAFYWGTSEWSAQQITEAWGAADRLDLVGPIVEQPEYNMFARHKVETEFLPLYTNHGIGLTTWSPLASGVLTGKYNKGAIPSDSRFALENYKNLANRSLVDDVLRKVSGLKPIADELGVTLAQLAIAWCASNPNVSSVITGATRESQIQENMKAVDVIPLLTPIVLDKIEQVIQSKPKRPESYR

SEQ ID NO: 35460 - protein, 266 aa, Arabidopsis thaliana
  peptide (1)..(266): Ceres Seq. ID no. 13487075
  misc_feature (1)..(266): Homolog of NCBI NO: 7914984 NR Description: potassium channel Kv beta 2.2 subunit
  misc_feature (1)..(266): Homolog of NCBI NO: 7914982 NR Description: potassium channel Kv beta 2.1 subunit
  misc_feature (1)..(255): Homolog of NCBI NO: 15643082 NR Description: K+ channel, beta subunit [Thermotoga maritima]
  misc_feature (1)..(255): Homolog of NCBI NO: 22987410 NR Description: hypothetical protein [Burkholderia fungorum]
  misc_feature (1)..(260): Homolog of NCBI NO: 23394348 NR Description: K+ channel protein [Phytophthora infestans]
  misc_feature (1)..(266): Homolog of NCBI NO: 7447935 NR Description: probable potassium channel beta chain - rice
  misc_feature (1)..(266): Homolog of NCBI NO: 2832783 NR Description: potassium channel beta subunit [Egeria densa]
  misc_feature (1)..(266): Homolog of NCBI NO: 7447934 NR Description: probable potassium channel beta chain KB1 -
  misc_feature (1)..(266): Homolog of NCBI NO: 1063415 NR Description: K+ channel protein
  misc_feature (1)..(266): Homolog of NCBI NO: 15219795 NR Description: potassium channel protein, putative [Arabidopsis
MGQAIRELGWRRSDIVISTKIFWGGPGPNDKGLSRKHIVEGTKASLKRLDMDYVDVLYCHRPDASTPIEETVRAMNYVIDKGWAFYWGTSEWSAQQITEAWGAADRLDLVGPIVEQPEYNMFARHKVETEFLPLYTNHGIGLTTWSPLASGVLTGKYNKGAIPSDSRFALENYKNLANRSLVDDVLRKVSGLKPIADELGVTLAQLAIAWCASNPNVSSVITGATRESQIQENMKAVDVIPLLTPIVLDKIEQVIQSKPKRPESYR

SEQ ID NO: 35461 - protein, 216 aa, Arabidopsis thaliana
  peptide (1)..(216): Ceres Seq. ID no. 13487076
  misc_feature (1)..(216): Homolog of NCBI NO: 7914984 NR Description: potassium channel Kv beta 2.2 subunit
  misc_feature (1)..(216): Homolog of NCBI NO: 7914982 NR Description: potassium channel Kv beta 2.1 subunit
  misc_feature (1)..(205): Homolog of NCBI NO: 15643082 NR Description: K+ channel, beta subunit [Thermotoga maritima]
  misc_feature (1)..(205): Homolog of NCBI NO: 22987410 NR Description: hypothetical protein [Burkholderia fungorum]
  misc_feature (1)..(210): Homolog of NCBI NO: 23394348 NR Description: K+ channel protein [Phytophthora infestans]
  misc_feature (1)..(216): Homolog of NCBI NO: 7447935 NR Description: probable potassium channel beta chain - rice
  misc_feature (1)..(216): Homolog of NCBI NO: 2832783 NR Description: potassium channel beta subunit [Egeria densa]
  misc_feature (1)..(216): Homolog of NCBI NO: 7447934 NR Description: probable potassium channel beta chain KB1 -
  misc_feature (1)..(216): Homolog of NCBI NO: 1063415 NR Description: K+ channel protein
  misc_feature (1)..(216): Homolog of NCBI NO: 15219795 NR Description: potassium channel protein, putative [Arabidopsis
MDYVDVLYCHRPDASTPIEETVRAMNYVIDKGWAFYWGTSEWSAQQITEAWGAADRLDLVGPIVEQPEYNMFARHKVETEFLPLYTNHGIGLTTWSPLASGVLTGKYNKGAIPSDSRFALENYKNLANRSLVDDVLRKVSGLKPIADELGVTLAQLAIAWCASNPNVSSVITGATRESQIQENMKAVDVIPLLTPIVLDKIEQVIQSKPKRPESYR

SEQ ID NO: 35462 - DNA, 692 bp, Arabidopsis thaliana
  misc_feature (1)..(692): Ceres Seq. ID no. 12322747
  misc_feature: MA Experiment ID: 108433 Result: Up-regulated in Transcription
  misc_feature: MA Experiment 108433 PARAMETER Experiment Name: At_rhl_Mutant2_cDNA_P Parameter: Age (day) Value: 7
  misc_feature: MA Experiment 108433 PARAMETER Experiment Name: At_rhl_Mutant2_cDNA_P Parameter: Organism Value: A. thaliana
  misc_feature: MA Experiment 108433 PARAMETER Experiment Name: At_rhl_Mutant2_cDNA_P Parameter: Plant Line Value: rhl Mutant vs. wt landsburg
  misc_feature: MA Experiment 108433 PARAMETER Experiment Name: At_rhl_Mutant2_cDNA_P Parameter: Tissue Value: Roots
  misc_feature: MA Experiment ID: 108434 Result: Down-regulated in Transcription
  misc_feature: MA Experiment 108434 PARAMETER Experiment Name: At_Root_Tips_cDNA_P Parameter: Tissue Value: Root Tips
  misc_feature: MA Experiment ID: 108461 Result: Down-regulated in Transcription
  misc_feature: MA Experiment 108461 PARAMETER Experiment Name: At_Germinating_Seeds_cDNA_P Parameter: Age (day) Value: 1 vs. 0
  misc_feature: MA Experiment 108461 PARAMETER Experiment Name: At_Germinating_Seeds_cDNA_P Parameter: Tissue Value: Germinating Seeds
  misc_feature: MA Experiment ID: 108488 Result: Down-regulated in Transcription
  misc_feature: MA Experiment ID: 108573 Result: Down-regulated in Transcription
  misc_feature: MA Experiment 108573 PARAMETER Experiment Name: At_Drought_cDNA_P Parameter: Timepoint (hr) Value: 6
  misc_feature: MA Experiment 108573 PARAMETER Experiment Name: At_Drought_cDNA_P Parameter: Tissue Value: Aerial
  misc_feature: MA Experiment 108573 PARAMETER Experiment Name: At_Drought_cDNA_P Parameter: Treatment Value: Drought vs. No Drought
  misc_feature: MA Experiment ID: 20000069 Result: Up-regulated in Transcription
  misc_feature: MA Experiment 20000069 PARAMETER Experiment Name: At_100uM_ABA_Mutants_cDNA_P Parameter: Plant Line Value: CS23
  misc_feature: MA Experiment 20000069 PARAMETER Experiment Name: At_100uM_ABA_Mutants_cDNA_P Parameter: Timepoint (hr) Value: 6
  misc_feature: MA Experiment 20000069 PARAMETER Experiment Name: At_100uM_ABA_Mutants_cDNA_P Parameter: Tissue Value: Aerial
  misc_feature: MA Experiment 20000069 PARAMETER Experiment Name: At_100uM_ABA_Mutants_cDNA_P Parameter: Treatment Value: 100uM ABA vs. No Treatment
  misc_feature: MA Experiment ID: 20000087 Result: Up-regulated in Transcription
  misc_feature: MA Experiment 20000087 PARAMETER Experiment Name: At_100uM_ABA_Mutants_cDNA_P Parameter: Plant Line Value: WS
  misc_feature: MA Experiment 20000087 PARAMETER Experiment Name: At_100uM_ABA_Mutants_cDNA_P Parameter: Timepoint (hr) Value: 6
  misc_feature: MA Experiment 20000087 PARAMETER Experiment Name: At_100uM_ABA_Mutants_cDNA_P Parameter: Tissue Value: Aerial
  misc_feature: MA Experiment 20000087 PARAMETER Experiment Name: At_100uM_ABA_Mutants_cDNA_P Parameter: Treatment Value: 100uM ABA vs. No Treatment
  misc_feature: MA Experiment ID: 20000089 Result: Up-regulated in Transcription
  misc_feature: MA Experiment ID: 20000090 Result: Up-regulated in Transcription
  misc_feature: MA Experiment ID: 20000117 Result: Up-regulated in Transcription
  misc_feature: MA Experiment 20000117 PARAMETER Experiment Name: At_100uM_ABA_Mutants_cDNA_P Parameter: Plant Line Value: Columbia
  misc_feature: MA Experiment 20000117 PARAMETER Experiment Name: At_100uM_ABA_Mutants_cDNA_P Parameter: Timepoint (hr) Value: 6
  misc_feature: MA Experiment 20000117 PARAMETER Experiment Name: At_100uM_ABA_Mutants_cDNA_P Parameter: Tissue Value: Aerial
  misc_feature: MA Experiment 20000117 PARAMETER Experiment Name: At_100uM_ABA_Mutants_cDNA_P Parameter: Treatment Value: 100uM ABA vs. No Treatment
  misc_feature: MA Experiment ID: 20000180 Result: Down-regulated in Transcription
  misc_feature: MA Experiment 20000180 PARAMETER Experiment Name: At_Germinating_Seeds_P Parameter: Age (hr) Value: 24 vs. 0
  misc_feature: MA Experiment 20000180 PARAMETER Experiment Name: At_Germinating_Seeds_P Parameter: Tissue Value: Germinating Seeds
  misc_feature: MA Experiment ID: 20000182 Result: Up-regulated in Transcription
  misc_feature: MA Experiment 20000182 PARAMETER Experiment Name: At_2mM_SA_P Parameter: Age (day) Value: 14
  misc_feature: MA Experiment 20000182 PARAMETER Experiment Name: At_2mM_SA_P Parameter: Organism Value: A. thaliana
  misc_feature: MA Experiment 20000182 PARAMETER Experiment Name: At_2mM_SA_P Parameter: Plant Line Value: WS
  misc_feature: MA Experiment 20000182 PARAMETER Experiment Name: At_2mM_SA_P Parameter: Timepoint (hr) Value: 6
  misc_feature: MA Experiment 20000182 PARAMETER Experiment Name: At_2mM_SA_P Parameter: Tissue Value: Aerial
  misc_feature: MA Experiment 20000182 PARAMETER Experiment Name: At_2mM_SA_P Parameter: Treatment Value: 2mM SA vs. No Treatment
  misc_feature: MA Experiment ID: 20000184 Result: Down-regulated in Transcription
  misc_feature: MA Experiment 20000184 PARAMETER Experiment Name: At_Shoots__P Parameter: Age (day) Value: 7
  misc_feature: MA Experiment 20000184 PARAMETER Experiment Name: At_Shoots__P Parameter: Tissue Value: Shoots vs. Whole Plant
  misc_feature: MA Experiment ID: 20000224 Result: Up-regulated in Transcription
  misc_feature: MA Experiment ID: 20000227 Result: Down-regulated in Transcription
  misc_feature: MA Experiment 20000227 PARAMETER Experiment Name: At_Root-Tips-vs-Tops_P Parameter: Tissue Value: Root Tips vs. Root Tops
  misc_feature: MA Experiment ID: 20000234 Result: Down-regulated in Transcription
  misc_feature: MA Experiment 20000234 PARAMETER Experiment Name: At_Siliques_P Parameter: Age (day) Value: 21
  misc_feature: MA Experiment 20000234 PARAMETER Experiment Name: At_Siliques_P Parameter: Organism Value: A. thaliana
  misc_feature: MA Experiment 20000234 PARAMETER Experiment Name: At_Siliques_P Parameter: Plant Line Value: WS
  misc_feature: MA Experiment 20000234 PARAMETER Experiment Name: At_Siliques_P Parameter: Tissue Value: Less Than 5mm Siliques vs. Whole Plant
  misc_feature: MA Experiment ID: 20000235 Result: Down-regulated in Transcription
  misc_feature: MA Experiment 20000235 PARAMETER Experiment Name: At_Siliques_P Parameter: Age (day) Value: 21
  misc_feature: MA Experiment 20000235 PARAMETER Experiment Name: At_Siliques_P Parameter: Organism Value: A. thaliana
  misc_feature: MA Experiment 20000235 PARAMETER Experiment Name: At_Siliques_P Parameter: Plant Line Value: WS
  misc_feature: MA Experiment 20000235 PARAMETER Experiment Name: At_Siliques_P Parameter: Tissue Value: 5-10mm Siliques vs. Whole Plant
  misc_feature: MA Experiment ID: 20000264 Result: Down-regulated in Transcription
  misc_feature: MA Experiment 20000264 PARAMETER Experiment Name: At_Open_Flower_P Parameter: Age (day) Value: 21
  misc_feature: MA Experiment 20000264 PARAMETER Experiment Name: At_Open_Flower_P Parameter: Plant Line Value: WS
  misc_feature: MA Experiment 20000264 PARAMETER Experiment Name: At_Open_Flower_P Parameter: Tissue Value: Open Flower vs. Whole Plant
  misc_feature: MA Experiment ID: 20000265 Result: Down-regulated in Transcription
  misc_feature: MA Experiment 20000265 PARAMETER Experiment Name: At_Open_Flower_P Parameter: Age (day) Value: 21
  misc_feature: MA Experiment 20000265 PARAMETER Experiment Name: At_Open_Flower_P Parameter: Plant Line Value: WS
  misc_feature: MA Experiment 20000265 PARAMETER Experiment Name: At_Open_Flower_P Parameter: Tissue Value: Closed Flower vs. Whole Plant
  misc_feature: MA Experiment ID: 20000286 Result: Down-regulated in Transcription
  misc_feature: MA Experiment 20000286 PARAMETER Experiment Name: At_Open_Flower_P Parameter: Age (day) Value: 21
  misc_feature: MA Experiment 20000286 PARAMETER Experiment Name: At_Open_Flower_P Parameter: Plant Line Value: WS
  misc_feature: MA Experiment 20000286 PARAMETER Experiment Name: At_Open_Flower_P Parameter: Tissue Value: Half Open vs. Whole Plant
  misc_feature: MA Experiment ID: 20000437 Result: Up-regulated in Transcription
  misc_feature: MA Experiment 20000437 PARAMETER Experiment Name: At_Drought_P Parameter: Age (day) Value: 8
  misc_feature: MA Experiment 20000437 PARAMETER Experiment Name: At_Drought_P Parameter: Organism Value: A. thaliana
  misc_feature: MA Experiment 20000437 PARAMETER Experiment Name: At_Drought_P Parameter: Plant Line Value: WS
  misc_feature: MA Experiment 20000437 PARAMETER Experiment Name: At_Drought_P Parameter: Timepoint (hr) Value: 24
  misc_feature: MA Experiment 20000437 PARAMETER Experiment Name: At_Drought_P Parameter: Tissue Value: Whole Plant
  misc_feature: MA Experiment 20000437 PARAMETER Experiment Name: At_Drought_P Parameter: Treatment Value: Drought vs. No Drought
  misc_feature: MA Experiment ID: 20000438 Result: Down-regulated in Transcription
  misc_feature: MA Experiment 20000438 PARAMETER Experiment Name: At_Shoots__P Parameter: Age (day) Value: 14
  misc_feature: MA Experiment 20000438 PARAMETER Experiment Name: At_Shoots__P Parameter: Tissue Value: Shoots vs. Whole Plant
  misc_feature: MA Experiment ID: 20000794 Result: Down-regulated in Transcription
  misc_feature: MA Experiment 20000794 PARAMETER Experiment Name: At_Petals_P Parameter: Age (day) Value: 23-25 days
  misc_feature: MA Experiment 20000794 PARAMETER Experiment Name: At_Petals_P Parameter: Plant Line Value: WS
  misc_feature: MA Experiment 20000794 PARAMETER Experiment Name: At_Petals_P Parameter: Tissue Value: Petals vs. Whole plant
  misc_feature: MA Experiment ID: 20001247 Result: Down-regulated in Transcription
  misc_feature: MA Experiment 20001247 PARAMETER Experiment Name: At_Far-red-induction_P Parameter: Age (day) Value: 7
  misc_feature: MA Experiment 20001247 PARAMETER Experiment Name: At_Far-red-induction_P Parameter: Light Value: Far-red vs. White
  misc_feature: MA Experiment 20001247 PARAMETER Experiment Name: At_Far-red-induction_P Parameter: Organism Value: A. thaliana
  misc_feature: MA Experiment 20001247 PARAMETER Experiment Name: At_Far-red-induction_P Parameter: Plant Line Value: Columbia
  misc_feature: MA Experiment 20001247 PARAMETER Experiment Name: At_Far-red-induction_P Parameter: Timepoint (hr) Value: 1
  misc_feature: MA Experiment 20001247 PARAMETER Experiment Name: At_Far-red-induction_P Parameter: Tissue Value: Whole Plant
  misc_feature: MA Experiment ID: 20001248 Result: Down-regulated in Transcription
  misc_feature: MA Experiment 20001248 PARAMETER Experiment Name: At_Far-red-induction_P Parameter: Age (day) Value: 7
  misc_feature: MA Experiment 20001248 PARAMETER Experiment Name: At_Far-red-induction_P Parameter: Light Value: Far-red vs. White
  misc_feature: MA Experiment 20001248 PARAMETER Experiment Name: At_Far-red-induction_P Parameter: Organism Value: A. thaliana
  misc_feature: MA Experiment 20001248 PARAMETER Experiment Name: At_Far-red-induction_P Parameter: Plant Line Value: Columbia
  misc_feature: MA Experiment 20001248 PARAMETER Experiment Name: At_Far-red-induction_P Parameter: Timepoint (hr) Value: 4
  misc_feature: MA Experiment 20001248 PARAMETER Experiment Name: At_Far-red-induction_P Parameter: Tissue Value: Whole Plant
  misc_feature: MA Experiment ID: 20001906 Result: Up-regulated in Transcription
  misc_feature: MA Experiment 20001906 PARAMETER Experiment Name: At_Drought_Reproduction_P Parameter: Age (day) Value: 35
  misc_feature: MA Experiment 20001906 PARAMETER Experiment Name: At_Drought_Reproduction_P Parameter: Organism Value: A. thaliana
  misc_feature: MA Experiment 20001906 PARAMETER Experiment Name: At_Drought_Reproduction_P Parameter: Plant Line Value: WS
  misc_feature: MA Experiment 20001906 PARAMETER Experiment Name: At_Drought_Reproduction_P Parameter: Timepoint (day) Value: 5
  misc_feature: MA Experiment 20001906 PARAMETER Experiment Name: At_Drought_Reproduction_P Parameter: Tissue Value: Siliques
  misc_feature: MA Experiment 20001906 PARAMETER Experiment Name: At_Drought_Reproduction_P Parameter: Treatment Value: Drought vs. No Drought
  misc_feature: Phenotype: SILIQUES Length-Short
  misc_feature: Phenotype: WHOLE PLANT Color-Dark Green
  misc_feature: Phenotype: INFLORESCENCE Height-Tall
  misc_feature: Phenotype: INFLORESCENCE Strength-Strong
  misc_feature: Phenotype: INFLORESCENCE Other
  misc_feature: Phenotype: SILIQUES Length-Long
  misc_feature: Phenotype: WHOLE PLANT Size-Small
  misc_feature: Phenotype: INFLORESCENCE Height-Short
  misc_feature: Phenotype: INFLORESCENCE Height-Tall
  misc_feature: Phenotype: SILIQUES Length-Long
  misc_feature: Phenotype: INFLORESCENCE Height-Tall
  misc_feature: Phenotype: SILIQUES Length-Long
gatcacaaattcagaagaaaagaacagagaaaacagaggaagaggtgagatggaggaacttgtagggcttctgagaatccgagtgaagagagggatcaatcttgctcagcgagacactctaagcagcgacccttttgttgtcataaccatgggatcacagaagctgaagactcgtgttgtggaaaataactgcaaccctgagtggaacgaggaattaacccttgcgttaagacatcccgatgaacctgtgaatctgatagtgtatgataaagatacattcacatcgcacgacaagatgggagatgcaaagatagatattaaaccatttctggaggttcacaaaatgggtttgcaagaacttccagatggaacagagatcaagagagttgtgcccaacagagaaaactgtttggctgaagcgagcagtatcgtctccaataatggcaaaatcgttcagaacatgattcttctgttgaggaatgtcgaatgcggtgaggtcgagattcagcttgaatggattgatattccaggttctagagggctttgaacatatctctttctgtgtgtaataaaaaaaaaactcagttcgttttgggtttttagacaaaagtcacaataagtagaacagagtactactctgttttgtaattgaaatatttggttttagcacctaacctaaatcgttttggttt

SEQ ID NO: 35463 - protein, 181 aa, Arabidopsis thaliana
  peptide (1)..(181): Ceres Seq. ID no. 12322748
  misc_feature (24)..(103): Pfam Name: C2 domain Pfam Description: C2 domain
  misc_feature (17)..(176): Homolog of NCBI NO: 34899392 NR Description: putative chitinase III [Oryza sativa (japonica
  misc_feature (17)..(181): Homolog of NCBI NO: 30684739 NR Description: C2 domain-containing protein [Arabidopsis
  misc_feature (17)..(181): Homolog of NCBI NO: 15240322 NR Description: putative protein
  misc_feature (6)..(181): Homolog of NCBI NO: 25405940 NR Description: protein T1N15.21 [imported] - Arabidopsis
  misc_feature (6)..(181): Homolog of NCBI NO: 15221907 NR Description: unknown protein; protein id: At1g48590.1
  misc_feature (17)..(181): Homolog of NCBI NO: 18409675 NR Description: zinc finger and C2 domain protein, putative
  misc_feature (17)..(178): Homolog of NCBI NO: 15220022 NR Description: unknown protein; protein id: At1g23140.1
  misc_feature (16)..(181): Homolog of NCBI NO: 15223248 NR Description: unknown protein; protein id: At1g70800.1
  misc_feature (17)..(181): Homolog of NCBI NO: 13430460 NR Description: unknown protein [Arabidopsis thaliana]
  misc_feature (17)..(181): Homolog of NCBI NO: 18409682 NR Description: expressed protein
ITNSEEKNRENRGRGEMEELVGLLRIRVKRGINLAQRDTLSSDPFVVITMGSQKLKTRVVENNCNPEWNEELTLALRHPDEPVNLIVYDKDTFTSHDKMGDAKIDIKPFLEVHKMGLQELPDGTEIKRVVPNRENCLAEASSIVSNNGKIVQNMILLLRNVECGEVEIQLEWIDIPGSRGL

SEQ ID NO: 35464 - protein, 165 aa, Arabidopsis thaliana
  peptide (1)..(165): Ceres Seq. ID no. 12322749
  misc_feature (8)..(87): Pfam Name: C2 domain Pfam Description: C2 domain
  misc_feature (1)..(160): Homolog of NCBI NO: 34899392 NR Description: putative chitinase III [Oryza sativa (japonica
  misc_feature (1)..(165): Homolog of NCBI NO: 30684739 NR Description: C2 domain-containing protein [Arabidopsis
  misc_feature (1)..(165): Homolog of NCBI NO: 15240322 NR Description: putative protein
  misc_feature (1)..(165): Homolog of NCBI NO: 25405940 NR Description: protein T1N15.21 [imported] - Arabidopsis
  misc_feature (1)..(165): Homolog of NCBI NO: 15221907 NR Description: unknown protein; protein id: At1g48590.1
  misc_feature (1)..(165): Homolog of NCBI NO: 18409675 NR Description: zinc finger and C2 domain protein, putative
  misc_feature (1)..(162): Homolog of NCBI NO: 15220022 NR Description: unknown protein; protein id: At1g23140.1
  misc_feature (1)..(165): Homolog of NCBI NO: 15223248 NR Description: unknown protein; protein id: At1g70800.1
  misc_feature (1)..(165): Homolog of NCBI NO: 13430460 NR Description: unknown protein [Arabidopsis thaliana]
  misc_feature (1)..(165): Homolog of NCBI NO: 18409682 NR Description: expressed protein
MEELVGLLRIRVKRGINLAQRDTLSSDPFVVITMGSQKLKTRVVENNCNPEWNEELTLALRHPDEPVNLIVYDKDTFTSHDKMGDAKIDIKPFLEVHKMGLQELPDGTEIKRVVPNRENCLAEASSIVSNNGKIVQNMILLLRNVECGEVEIQLEWIDIPGSRGL

SEQ ID NO: 35465 - protein, 132 aa, Arabidopsis thaliana
  peptide (1)..(132): Ceres Seq. ID no. 12322750
  misc_feature (1)..(54): Pfam Name: C2 domain Pfam Description: C2 domain
  misc_feature (1)..(127): Homolog of NCBI NO: 34899392 NR Description: putative chitinase III [Oryza sativa (japonica
  misc_feature (1)..(132): Homolog of NCBI NO: 30684739 NR Description: C2 domain-containing protein [Arabidopsis
  misc_feature (1)..(132): Homolog of NCBI NO: 15240322 NR Description: putative protein
  misc_feature (1)..(132): Homolog of NCBI NO: 25405940 NR Description: protein T1N15.21 [imported] - Arabidopsis
  misc_feature (1)..(132): Homolog of NCBI NO: 15221907 NR Description: unknown protein; protein id: At1g48590.1
  misc_feature (1)..(132): Homolog of NCBI NO: 18409675 NR Description: zinc finger and C2 domain protein, putative
  misc_feature (1)..(129): Homolog of NCBI NO: 15220022 NR Description: unknown protein; protein id: At1g23140.1
  misc_feature (1)..(132): Homolog of NCBI NO: 15223248 NR Description: unknown protein; protein id: At1g70800.1
  misc_feature (1)..(132): Homolog of NCBI NO: 13430460 NR Description: unknown protein [Arabidopsis thaliana]
  misc_feature (1)..(132): Homolog of NCBI NO: 18409682 NR Description: expressed protein
MGSQKLKTRVVENNCNPEWNEELTLALRHPDEPVNLIVYDKDTFTSHDKMGDAKIDIKPFLEVHKMGLQELPDGTEIKRVVPNRENCLAEASSIVSNNGKIVQNMILLLRNVECGEVEIQLEWIDIPGSRGL

SEQ ID NO: 35466 - DNA, 1065 bp, Arabidopsis thaliana
  misc_feature (1)..(1065): Ceres Seq. ID no. 12371318
  misc_feature: MA Experiment ID: 20000234 Result: Up-regulated in Transcription
  misc_feature: MA Experiment 20000234 PARAMETER Experiment Name: At_Siliques_P Parameter: Age (day) Value: 21
  misc_feature: MA Experiment 20000234 PARAMETER Experiment Name: At_Siliques_P Parameter: Organism Value: A. thaliana
  misc_feature: MA Experiment 20000234 PARAMETER Experiment Name: At_Siliques_P Parameter: Plant Line Value: WS
  misc_feature: MA Experiment 20000234 PARAMETER Experiment Name: At_Siliques_P Parameter: Tissue Value: Less Than 5mm Siliques vs. Whole Plant
attttttccaaaaaaataaaaaacagaaaaaattcgtggaaacgccattaacgagatctagcacaaactcgtagtgtggtgtagaagaagacaaaagcaaggagcttcataataaaaccctagagatatttgtttctccaatttcaaaagacgagacgtgaagaagacgatcgaagatgaacattttcagattagctggtgatatgactcacctagccagtgttcttgtcttgcttctcaagatccacaccatcaaatcctgcgctggtgtttcattgaagactcaagaactctatgccattgtctttgcgacgcgttatttggatattttcacgagttttgtgtctctgtacaacacctctatgaagttggtgtttttaggaagttctttttcgattgtgtggtacatgaagtatcataaggccgtccacaggacttacgacagagagcaagatacgtttcgtcattggttccttgtgcttccttgctttctcttagctcttttgatacatgaaaagtttacctttcttgaggtattgtggacgtcttcattgtacttggaggctgttgccatattacctcagcttgtcttgttgcaaaggactagaaatattgacaacttgaccggacaatatatatttctccttggggggtaccgtggattatacatcctcaactggatctaccgttacttcactgagccgcactttgttcactggataacatggatcgccgggtttgttcaaacactgctctatgccgacttcttctattattatttcctaagctggaagaacaacaaaaagctccaattaccagcttaatttctaaagtttcaatgctcgggaaccctacggattcgatttggtgcccgacaaaacatctaccggaatgttaccaatttactctgttggtggttattagaggagaacgagcatagatgtgtaaactccagcaatctaacttattacactttctttagactttctcgtctctcatcttttttttggtcgacttagtgttactaaatatttcgacgcgacagtaatatattcaccacaattc

SEQ ID NO: 35467 - protein, 215 aa, Arabidopsis thaliana
  peptide (1)..(215): Ceres Seq. ID no. 12371319
  misc_feature (1)..(205): Pfam Name: ER lumen protein retaining receptor Pfam Description: ER lumen protein retaining receptor
  misc_feature (1)..(214): Homolog of NCBI NO: 22656361 NR Description: endoplasmic reticulum retention receptor
  misc_feature (1)..(215): Homolog of NCBI NO: 17137442 NR Description: KDEL receptor CG5183-PA [Drosophila melanogaster]
  misc_feature (1)..(215): Homolog of NCBI NO: 31196307 NR Description: ENSANGP00000012108 [Anopheles gambiae]
  misc_feature (1)..(215): Homolog of NCBI NO: 18397049 NR Description: ER lumen protein retaining receptor
  misc_feature (1)..(215): Homolog of NCBI NO: 14285310 NR Description: ERD2 protein [Scherffelia dubia]
  misc_feature (1)..(214): Homolog of NCBI NO: 21743051 NR Description: OSJNBa0083D01.1 [Oryza sativa (japonica
  misc_feature (1)..(215): Homolog of NCBI NO: 6685428 NR Description: ER lumen protein retaining receptor (HDEL
  misc_feature (1)..(215): Homolog of NCBI NO: 9293986 NR Description: ER lumen protein-retaining receptor-like protein
  misc_feature (1)..(215): Homolog of NCBI NO: 21592401 NR Description: ER lumen retaining receptor (HDEL receptor),
  misc_feature (1)..(215): Homolog of NCBI NO: 18404390 NR Description: ER lumen retaining receptor (HDEL receptor),
MNIFRLAGDMTHLASVLVLLLKIHTIKSCAGVSLKTQELYAIVFATRYLDIFTSFVSLYNTSMKLVFLGSSFSIVWYMKYHKAVHRTYDREQDTFRHWFLVLPCFLLALLIHEKFTFLEVLWTSSLYLEAVAILPQLVLLQRTRNIDNLTGQYIFLLGGYRGLYILNWIYRYFTEPHFVHWITWIAGFVQTLLYADFFYYYFLSWKNNKKLQLPA

SEQ ID NO: 35468 - protein, 206 aa, Arabidopsis thaliana
  peptide (1)..(206): Ceres Seq. ID no. 12371320
  misc_feature (1)..(196): Pfam Name: ER lumen protein retaining receptor Pfam Description: ER lumen protein retaining receptor
  misc_feature (1)..(205): Homolog of NCBI NO: 22656361 NR Description: endoplasmic reticulum retention receptor
  misc_feature (1)..(206): Homolog of NCBI NO: 17137442 NR Description: KDEL receptor CG5183-PA [Drosophila melanogaster]
  misc_feature (1)..(206): Homolog of NCBI NO: 31196307 NR Description: ENSANGP00000012108 [Anopheles gambiae]
  misc_feature (1)..(206): Homolog of NCBI NO: 18397049 NR Description: ER lumen protein retaining receptor
  misc_feature (1)..(206): Homolog of NCBI NO: 14285310 NR Description: ERD2 protein [Scherffelia dubia]
  misc_feature (1)..(205): Homolog of NCBI NO: 21743051 NR Description: OSJNBa0083D01.1 [Oryza sativa (japonica
  misc_feature (1)..(206): Homolog of NCBI NO: 6685428 NR Description: ER lumen protein retaining receptor (HDEL
  misc_feature (1)..(206): Homolog of NCBI NO: 9293986 NR Description: ER lumen protein-retaining receptor-like protein
  misc_feature (1)..(206): Homolog of NCBI NO: 21592401 NR Description: ER lumen retaining receptor (HDEL receptor),
  misc_feature (1)..(206): Homolog of NCBI NO: 18404390 NR Description: ER lumen retaining receptor (HDEL receptor),
MTHLASVLVLLLKIHTIKSCAGVSLKTQELYAIVFATRYLDIFTSFVSLYNTSMKLVFLGSSFSIVWYMKYHKAVHRTYDREQDTFRHWFLVLPCFLLALLIHEKFTFLEVLWTSSLYLEAVAILPQLVLLQRTRNIDNLTGQYIFLLGGYRGLYILNWIYRYFTEPHFVHWITWIAGFVQTLLYADFFYYYFLSWKNNKKLQLPA

SEQ ID NO: 35469 - protein, 153 aa, Arabidopsis thaliana
  peptide (1)..(153): Ceres Seq. ID no. 12371321
  misc_feature (1)..(143): Pfam Name: ER lumen protein retaining receptor Pfam Description: ER lumen protein retaining receptor
  misc_feature (1)..(152): Homolog of NCBI NO: 22656361 NR Description: endoplasmic reticulum retention receptor
  misc_feature (1)..(153): Homolog of NCBI NO: 17137442 NR Description: KDEL receptor CG5183-PA [Drosophila melanogaster]
  misc_feature (1)..(153): Homolog of NCBI NO: 31196307 NR Description: ENSANGP00000012108 [Anopheles gambiae]
  misc_feature (1)..(153): Homolog of NCBI NO: 18397049 NR Description: ER lumen protein retaining receptor
  misc_feature (1)..(153): Homolog of NCBI NO: 14285310 NR Description: ERD2 protein [Scherffelia dubia]
  misc_feature (1)..(152): Homolog of NCBI NO: 21743051 NR Description: OSJNBa0083D01.1 [Oryza sativa (japonica
  misc_feature (1)..(153): Homolog of NCBI NO: 6685428 NR Description: ER lumen protein retaining receptor (HDEL
  misc_feature (1)..(153): Homolog of NCBI NO: 9293986 NR Description: ER lumen protein-retaining receptor-like protein
  misc_feature (1)..(153): Homolog of NCBI NO: 21592401 NR Description: ER lumen retaining receptor (HDEL receptor),
  misc_feature (1)..(153): Homolog of NCBI NO: 18404390 NR Description: ER lumen retaining receptor (HDEL receptor),
MKLVFLGSSFSIVWYMKYHKAVHRTYDREQDTFRHWFLVLPCFLLALLIHEKFTFLEVLWTSSLYLEAVAILPQLVLLQRTRNIDNLTGQYIFLLGGYRGLYILNWIYRYFTEPHFVHWITWIAGFVQTLLYADFFYYYFLSWKNNKKLQLPA

SEQ ID NO: 35470 - DNA, 1229 bp, Arabidopsis thaliana
  misc_feature (1)..(1229): Ceres Seq. ID no. 12385455
  misc_feature: MA Experiment ID: 108434 Result: Down-regulated in Transcription
  misc_feature: MA Experiment 108434 PARAMETER Experiment Name: At_Root_Tips_cDNA_P Parameter: Tissue Value: Root Tips
  misc_feature: MA Experiment ID: 108464 Result: Up-regulated in Transcription
  misc_feature: MA Experiment 108464 PARAMETER Experiment Name: At_Germinating_Seeds_cDNA_P Parameter: Age (day) Value: 4 vs. 0
  misc_feature: MA Experiment 108464 PARAMETER Experiment Name: At_Germinating_Seeds_cDNA_P Parameter: Tissue Value: Germinating Seeds
  misc_feature: MA Experiment ID: 108469 Result: Up-regulated in Transcription
  misc_feature: MA Experiment ID: 108574 Result: Up-regulated in Transcription
  misc_feature: MA Experiment 108574 PARAMETER Experiment Name: At_Wounding__cDNA_P Parameter: Timepoint (hr) Value: 1
  misc_feature: MA Experiment 108574 PARAMETER Experiment Name: At_Wounding__cDNA_P Parameter: Tissue Value: Aerial
  misc_feature: MA Experiment 108574 PARAMETER Experiment Name: At_Wounding__cDNA_P Parameter: Treatment Value: Wounding vs. No Wounding
  misc_feature: MA Experiment ID: 108577 Result: Down-regulated in Transcription
  misc_feature: MA Experiment 108577 PARAMETER Experiment Name: At_42deg_Heat_cDNA_P Parameter: Temperature (deg C) Value: 42 vs. 22
  misc_feature: MA Experiment 108577 PARAMETER Experiment Name: At_42deg_Heat_cDNA_P Parameter: Timepoint (hr) Value: 6
  misc_feature: MA Experiment 108577 PARAMETER Experiment Name: At_42deg_Heat_cDNA_P Parameter: Tissue Value: Aerial
  misc_feature: MA Experiment ID: 108579 Result: Up-regulated in Transcription
  misc_feature: MA Experiment 108579 PARAMETER Experiment Name: At_4deg_Cold_cDNA_P Parameter: Temperature (deg C) Value: 4 vs. 22
  misc_feature: MA Experiment 108579 PARAMETER Experiment Name: At_4deg_Cold_cDNA_P Parameter: Timepoint (hr) Value: 6
  misc_feature: MA Experiment 108579 PARAMETER Experiment Name: At_4deg_Cold_cDNA_P Parameter: Tissue Value: Aerial
  misc_feature: MA Experiment ID: 108585 Result: Up-regulated in Transcription
  misc_feature: MA Experiment 108585 PARAMETER Experiment Name: At_5mM_NaNP_cDNA_P Parameter: Timepoint (hr) Value: 6
  misc_feature: MA Experiment 108585 PARAMETER Experiment Name: At_5mM_NaNP_cDNA_P Parameter: Tissue Value: Aerial
  misc_feature: MA Experiment 108585 PARAMETER Experiment Name: At_5mM_NaNP_cDNA_P Parameter: Treatment Value: null
  misc_feature: MA Experiment ID: 108595 Result: Up-regulated in Transcription
  misc_feature: MA Experiment 108595 PARAMETER Experiment Name: At_Ler-pi_Ovule_cDNA_P Parameter: Plant Line Value: null
  misc_feature: MA Experiment ID: 108667 Result: Up-regulated in Transcription
  misc_feature: MA Experiment 108667 PARAMETER Experiment Name: At_2mM_SA_cDNA_P Parameter: Plant Line Value: WS
  misc_feature: MA Experiment 108667 PARAMETER Experiment Name: At_2mM_SA_cDNA_P Parameter: Timepoint (hr) Value: 1
  misc_feature: MA Experiment 108667 PARAMETER Experiment Name: At_2mM_SA_cDNA_P Parameter: Treatment Value: 2mM SA vs. No Treatment
  misc_feature: MA Experiment ID: 108668 Result: Up-regulated in Transcription
  misc_feature: MA Experiment 108668 PARAMETER Experiment Name: At_2mM_SA_cDNA_P Parameter: Plant Line Value: WS
  misc_feature: MA Experiment 108668 PARAMETER Experiment Name: At_2mM_SA_cDNA_P Parameter: Timepoint (hr) Value: 6
  misc_feature: MA Experiment 108668 PARAMETER Experiment Name: At_2mM_SA_cDNA_P Parameter: Treatment Value: 2mM SA vs. No Treatment
  misc_feature: MA Experiment ID: 20000069 Result: Up-regulated in Transcription
  misc_feature: MA Experiment 20000069 PARAMETER Experiment Name: At_100uM_ABA_Mutants_cDNA_P Parameter: Plant Line Value: CS23
  misc_feature: MA Experiment 20000069 PARAMETER Experiment Name: At_100uM_ABA_Mutants_cDNA_P Parameter: Timepoint (hr) Value: 6
  misc_feature: MA Experiment 20000069 PARAMETER Experiment Name: At_100uM_ABA_Mutants_cDNA_P Parameter: Tissue Value: Aerial
  misc_feature: MA Experiment 20000069 PARAMETER Experiment Name: At_100uM_ABA_Mutants_cDNA_P Parameter: Treatment Value: 100uM ABA vs. No Treatment
  misc_feature: MA Experiment ID: 20000070 Result: Up-regulated in Transcription
  misc_feature: MA Experiment 20000070 PARAMETER Experiment Name: At_100uM_ABA_Mutants_cDNA_P Parameter: Plant Line Value: CS24
  misc_feature: MA Experiment 20000070 PARAMETER Experiment Name: At_100uM_ABA_Mutants_cDNA_P Parameter: Timepoint (hr) Value: 6
  misc_feature: MA Experiment 20000070 PARAMETER Experiment Name: At_100uM_ABA_Mutants_cDNA_P Parameter: Tissue Value: Aerial
  misc_feature: MA Experiment 20000070 PARAMETER Experiment Name: At_100uM_ABA_Mutants_cDNA_P Parameter: Treatment Value: 100uM ABA vs. No Treatment
  misc_feature: MA Experiment ID: 20000087 Result: Up-regulated in Transcription
  misc_feature: MA Experiment 20000087 PARAMETER Experiment Name: At_100uM_ABA_Mutants_cDNA_P Parameter: Plant Line Value: WS
  misc_feature: MA Experiment 20000087 PARAMETER Experiment Name: At_100uM_ABA_Mutants_cDNA_P Parameter: Timepoint (hr) Value: 6
  misc_feature: MA Experiment 20000087 PARAMETER Experiment Name: At_100uM_ABA_Mutants_cDNA_P Parameter: Tissue Value: Aerial
  misc_feature: MA Experiment 20000087 PARAMETER Experiment Name: At_100uM_ABA_Mutants_cDNA_P Parameter: Treatment Value: 100uM ABA vs. No Treatment
  misc_feature: MA Experiment ID: 20000089 Result: Up-regulated in Transcription
  misc_feature: MA Experiment ID: 20000090 Result: Up-regulated in Transcription
  misc_feature: MA Experiment ID: 20000113 Result: Up-regulated in Transcription
  misc_feature: MA Experiment 20000113 PARAMETER Experiment Name: At_42deg_Heat_cDNA_P Parameter: Temperature (deg C) Value: 42 vs. 22
  misc_feature: MA Experiment 20000113 PARAMETER Experiment Name: At_42deg_Heat_cDNA_P Parameter: Timepoint (hr) Value: 8
  misc_feature: MA Experiment 20000113 PARAMETER Experiment Name: At_42deg_Heat_cDNA_P Parameter: Tissue Value: Aerial
  misc_feature: MA Experiment ID: 20000117 Result: Up-regulated in Transcription
  misc_feature: MA Experiment 20000117 PARAMETER Experiment Name: At_100uM_ABA_Mutants_cDNA_P Parameter: Plant Line Value: Columbia
  misc_feature: MA Experiment 20000117 PARAMETER Experiment Name: At_100uM_ABA_Mutants_cDNA_P Parameter: Timepoint (hr) Value: 6
  misc_feature: MA Experiment 20000117 PARAMETER Experiment Name: At_100uM_ABA_Mutants_cDNA_P Parameter: Tissue Value: Aerial
  misc_feature: MA Experiment 20000117 PARAMETER Experiment Name: At_100uM_ABA_Mutants_cDNA_P Parameter: Treatment Value: 100uM ABA vs. No Treatment
  misc_feature: MA Experiment ID: 20000173 Result: Down-regulated in Transcription
  misc_feature: MA Experiment 20000173 PARAMETER Experiment Name: At_42deg_Heat_P Parameter: Age (day) Value: 14
  misc_feature: MA Experiment 20000173 PARAMETER Experiment Name: At_42deg_Heat_P Parameter: Organism Value: A. thaliana
  misc_feature: MA Experiment 20000173 PARAMETER Experiment Name: At_42deg_Heat_P Parameter: Plant Line Value: WS
  misc_feature: MA Experiment 20000173 PARAMETER Experiment Name: At_42deg_Heat_P Parameter: Temperature (deg C) Value: 42 vs. 22
  misc_feature: MA Experiment 20000173 PARAMETER Experiment Name: At_42deg_Heat_P Parameter: Timepoint (hr) Value: 6
  misc_feature: MA Experiment 20000173 PARAMETER Experiment Name: At_42deg_Heat_P Parameter: Tissue Value: Aerial
  misc_feature: MA Experiment ID: 20000179 Result: Down-regulated in Transcription
  misc_feature: MA Experiment 20000179 PARAMETER Experiment Name: At_Germinating_Seeds_P Parameter: Age (hr) Value: 6 vs. 0
  misc_feature: MA Experiment 20000179 PARAMETER Experiment Name: At_Germinating_Seeds_P Parameter: Tissue Value: Germinating Seeds
  misc_feature: MA Experiment ID: 20000180 Result: Down-regulated in Transcription
  misc_feature: MA Experiment 20000180 PARAMETER Experiment Name: At_Germinating_Seeds_P Parameter: Age (hr) Value: 24 vs. 0
  misc_feature: MA Experiment 20000180 PARAMETER Experiment Name: At_Germinating_Seeds_P Parameter: Tissue Value: Germinating Seeds
  misc_feature: MA Experiment ID: 20000182 Result: Up-regulated in Transcription
  misc_feature: MA Experiment 20000182 PARAMETER Experiment Name: At_2mM_SA_P Parameter: Age (day) Value: 14
  misc_feature: MA Experiment 20000182 PARAMETER Experiment Name: At_2mM_SA_P Parameter: Organism Value: A. thaliana
  misc_feature: MA Experiment 20000182 PARAMETER Experiment Name: At_2mM_SA_P Parameter: Plant Line Value: WS
  misc_feature: MA Experiment 20000182 PARAMETER Experiment Name: At_2mM_SA_P Parameter: Timepoint (hr) Value: 6
  misc_feature: MA Experiment 20000182 PARAMETER Experiment Name: At_2mM_SA_P Parameter: Tissue Value: Aerial
  misc_feature: MA Experiment 20000182 PARAMETER Experiment Name: At_2mM_SA_P Parameter: Treatment Value: 2mM SA vs. No Treatment
  misc_feature: MA Experiment ID: 20000184 Result: Down-regulated in Transcription
  misc_feature: MA Experiment 20000184 PARAMETER Experiment Name: At_Shoots__P Parameter: Age (day) Value: 7
  misc_feature: MA Experiment 20000184 PARAMETER Experiment Name: At_Shoots__P Parameter: Tissue Value: Shoots vs. Whole Plant
  misc_feature: MA Experiment ID: 20000224 Result: Up-regulated in Transcription
  misc_feature: MA Experiment ID: 20000234 Result: Down-regulated in Transcription
  misc_feature: MA Experiment 20000234 PARAMETER Experiment Name: At_Siliques_P Parameter: Age (day) Value: 21
  misc_feature: MA Experiment 20000234 PARAMETER Experiment Name: At_Siliques_P Parameter: Organism Value: A. thaliana
  misc_feature: MA Experiment 20000234 PARAMETER Experiment Name: At_Siliques_P Parameter: Plant Line Value: WS
  misc_feature: MA Experiment 20000234 PARAMETER Experiment Name: At_Siliques_P Parameter: Tissue Value: Less Than 5mm Siliques vs. Whole Plant
  misc_feature: MA Experiment ID: 20000264 Result: Down-regulated in Transcription
  misc_feature: MA Experiment 20000264 PARAMETER Experiment Name: At_Open_Flower_P Parameter: Age (day) Value: 21
  misc_feature: MA Experiment 20000264 PARAMETER Experiment Name: At_Open_Flower_P Parameter: Plant Line Value: WS
  misc_feature: MA Experiment 20000264 PARAMETER Experiment Name: At_Open_Flower_P Parameter: Tissue Value: Open Flower vs. Whole Plant
  misc_feature: MA Experiment ID: 20000265 Result: Down-regulated in Transcription
  misc_feature: MA Experiment 20000265 PARAMETER Experiment Name: At_Open_Flower_P Parameter: Age (day) Value: 21
  misc_feature: MA Experiment 20000265 PARAMETER Experiment Name: At_Open_Flower_P Parameter: Plant Line Value: WS
  misc_feature: MA Experiment 20000265 PARAMETER Experiment Name: At_Open_Flower_P Parameter: Tissue Value: Closed Flower vs. Whole Plant
  misc_feature: MA Experiment ID: 20000286 Result: Down-regulated in Transcription
  misc_feature: MA Experiment 20000286 PARAMETER Experiment Name: At_Open_Flower_P Parameter: Age (day) Value: 21
  misc_feature: MA Experiment 20000286 PARAMETER Experiment Name: At_Open_Flower_P Parameter: Plant Line Value: WS
  misc_feature: MA Experiment 20000286 PARAMETER Experiment Name: At_Open_Flower_P Parameter: Tissue Value: Half Open vs. Whole Plant
  misc_feature: MA Experiment ID: 20000438 Result: Down-regulated in Transcription
  misc_feature: MA Experiment 20000438 PARAMETER Experiment Name: At_Shoots__P Parameter: Age (day) Value: 14
  misc_feature: MA Experiment 20000438 PARAMETER Experiment Name: At_Shoots__P Parameter: Tissue Value: Shoots vs. Whole Plant
  misc_feature: MA Experiment ID: 20000441 Result: Up-regulated in Transcription
  misc_feature: MA Experiment 20000441 PARAMETER Experiment Name: At_1uM_BR-BRZ__P Parameter: Tissue Value: Shoot Apices
  misc_feature: MA Experiment 20000441 PARAMETER Experiment Name: At_1uM_BR-BRZ__P Parameter: Treatment Value: 1uM BR vs. No Treatment
  misc_feature: MA Experiment ID: 20000443 Result: Up-regulated in Transcription
  misc_feature: MA Experiment 20000443 PARAMETER Experiment Name: At_1uM_BR-BRZ__P Parameter: Tissue Value: Shoot Apices
  misc_feature: MA Experiment 20000443 PARAMETER Experiment Name: At_1uM_BR-BRZ__P Parameter: Treatment Value: 1uM BRZ vs. No Treatment
  misc_feature: MA Experiment ID: 20000445 Result: Up-regulated in Transcription
  misc_feature: MA Experiment 20000445 PARAMETER Experiment Name: At_100uM_NAA__P Parameter: Age (day) Value: 14
  misc_feature: MA Experiment 20000445 PARAMETER Experiment Name: At_100uM_NAA__P Parameter: Organism Value: A. thaliana
  misc_feature: MA Experiment 20000445 PARAMETER Experiment Name: At_100uM_NAA__P Parameter: Plant Line Value: WS
  misc_feature: MA Experiment 20000445 PARAMETER Experiment Name: At_100uM_NAA__P Parameter: Timepoint (hr) Value: 6
  misc_feature: MA Experiment 20000445 PARAMETER Experiment Name: At_100uM_NAA__P Parameter: Tissue Value: Aerial
  misc_feature: MA Experiment 20000445 PARAMETER Experiment Name: At_100uM_NAA__P Parameter: Treatment Value: 100uM NAA vs. No Treatment
  misc_feature: MA Experiment ID: 20000452 Result: Up-regulated in Transcription
  misc_feature: MA Experiment 20000452 PARAMETER Experiment Name: At_CS6879_Shoots-Roots_P Parameter: Age (day) Value: 14
  misc_feature: MA Experiment 20000452 PARAMETER Experiment Name: At_CS6879_Shoots-Roots_P Parameter: Organism Value: A. thaliana
  misc_feature: MA Experiment 20000452 PARAMETER Experiment Name: At_CS6879_Shoots-Roots_P Parameter: Plant Line Value: CS6879 vs. WS
  misc_feature: MA Experiment 20000452 PARAMETER Experiment Name: At_CS6879_Shoots-Roots_P Parameter: Tissue Value: Shoots
  misc_feature: MA Experiment ID: 20000709 Result: Up-regulated in Transcription
  misc_feature: MA Experiment 20000709 PARAMETER Experiment Name: At_15mM_NH4NO3_L-to-H_P Parameter: Age (hr) Value: 14
  misc_feature: MA Experiment 20000709 PARAMETER Experiment Name: At_15mM_NH4NO3_L-to-H_P Parameter: Organism Value: A. thaliana
  misc_feature: MA Experiment 20000709 PARAMETER Experiment Name: At_15mM_NH4NO3_L-to-H_P Parameter: Plant Line Value: WS
  misc_feature: MA Experiment 20000709 PARAMETER Experiment Name: At_15mM_NH4NO3_L-to-H_P Parameter: Timepoint (hr) Value: 4
  misc_feature: MA Experiment 20000709 PARAMETER Experiment Name: At_15mM_NH4NO3_L-to-H_P Parameter: Tissue Value: Aerial
  misc_feature: MA Experiment 20000709 PARAMETER Experiment Name: At_15mM_NH4NO3_L-to-H_P Parameter: Treatment Value: 15mM NH4NO3 vs. 30mM Mannitol
  misc_feature: MA Experiment ID: 20001554 Result: Down-regulated in Transcription
  misc_feature: MA Experiment 20001554 PARAMETER Experiment Name: At_Drought_Soil_Dry_P Parameter: Age (day) Value: 21
  misc_feature: MA Experiment 20001554 PARAMETER Experiment Name: At_Drought_Soil_Dry_P Parameter: Organism Value: A. thaliana
  misc_feature: MA Experiment 20001554 PARAMETER Experiment Name: At_Drought_Soil_Dry_P Parameter: Plant Line Value: WS
  misc_feature: MA Experiment 20001554 PARAMETER Experiment Name: At_Drought_Soil_Dry_P Parameter: Post Timepoint (hr) Value: None
  misc_feature: MA Experiment 20001554 PARAMETER Experiment Name: At_Drought_Soil_Dry_P Parameter: Post-Treatment Value: None
  misc_feature: MA Experiment 20001554 PARAMETER Experiment Name: At_Drought_Soil_Dry_P Parameter: Timepoint (day) Value: 7
  misc_feature: MA Experiment 20001554 PARAMETER Experiment Name: At_Drought_Soil_Dry_P Parameter: Treatment Value: Drought vs. No Drought
  misc_feature: MA Experiment ID: 20001555 Result: Down-regulated in Transcription
  misc_feature: MA Experiment 20001555 PARAMETER Experiment Name: At_Drought_Soil_Dry_P Parameter: Age (day) Value: 24
  misc_feature: MA Experiment 20001555 PARAMETER Experiment Name: At_Drought_Soil_Dry_P Parameter: Organism Value: A. thaliana
  misc_feature: MA Experiment 20001555 PARAMETER Experiment Name: At_Drought_Soil_Dry_P Parameter: Plant Line Value: WS
  misc_feature: MA Experiment 20001555 PARAMETER Experiment Name: At_Drought_Soil_Dry_P Parameter: Post Timepoint (hr) Value: None
  misc_feature: MA Experiment 20001555 PARAMETER Experiment Name: At_Drought_Soil_Dry_P Parameter: Post-Treatment Value: None
  misc_feature: MA Experiment 20001555 PARAMETER Experiment Name: At_Drought_Soil_Dry_P Parameter: Timepoint (day) Value: 10
  misc_feature: MA Experiment 20001555 PARAMETER Experiment Name: At_Drought_Soil_Dry_P Parameter: Treatment Value: Drought vs. No Drought
  misc_feature: MA Experiment ID: 20001557 Result: Up-regulated in Transcription
  misc_feature: MA Experiment 20001557 PARAMETER Experiment Name: At_Drought_Soil_Dry_P Parameter: Age (day) Value: 27
  misc_feature: MA Experiment 20001557 PARAMETER Experiment Name: At_Drought_Soil_Dry_P Parameter: Organism Value: A. thaliana
  misc_feature: MA Experiment 20001557 PARAMETER Experiment Name: At_Drought_Soil_Dry_P Parameter: Plant Line Value: WS
  misc_feature: MA Experiment 20001557 PARAMETER Experiment Name: At_Drought_Soil_Dry_P Parameter: Post Timepoint (hr) Value: 3
  misc_feature: MA Experiment 20001557 PARAMETER Experiment Name: At_Drought_Soil_Dry_P Parameter: Post-Treatment Value: Re-Water vs. No Drought
  misc_feature: MA Experiment 20001557 PARAMETER Experiment Name: At_Drought_Soil_Dry_P Parameter: Timepoint (day) Value: 13
  misc_feature: MA Experiment 20001557 PARAMETER Experiment Name: At_Drought_Soil_Dry_P Parameter: Treatment Value: Drought vs. No Drought
gattacaatcttgagcagacgaagaaaacccaaaaaaaatccagatccagctgaaattgaattttcaaccaacgaagaagagatttttccaagagcaacagacaagaagaagagaatgaagtcggagctaaatttaccagctgggttccgattccatccaacggacgaggagcttgtgaaattctacttgtgccggaaatgtgcttccgagcagatctcggctccggttatcgccgagattgatctctacaagttcaatccttgggagcttccagagatgtctctgtacggagagaaagagtggtacttcttctcacctagagatcggaaatacccaaacggttcgcgtcctaaccgggcagcaggaaccggttattggaaagctaccggagcagataaaccgattggtaaaccgaagacgttgggtatcaagaaagcactcgtcttctacgcagggaaagctccaaaagggattaagaccaattggataatgcatgagtatcgtctcgctaatgttgatagatcagcttctgttaacaaaaagaacaacctacgacttgatgattgggttttatgtcgaatatacaacaagaaaggaaccatggagaagtatttccccgcggatgagaagccgaggaccacgacaatggctgaacagtcatcatcaccttttgatacatcagactcgacttacccgacattgcaagaggatgattccagcagctcaggtggtcacggtcacgtggtgtcaccggatgttttggaggttcagagcgagcctaaatggggagagcttgaggatgctttggaagcttttgatacttcaatgtttggtagttccatggagttgttgcagcctgacgcttttgtccctcagttcttgtatcagtctgattatttcacttccttccaggatccgcctgagcagaaaccattcttgaattggagttttgctccacaggggtaaaaacggaagagaccaaaaaaggtgtttgctagtagtactgtgatgtgccagagagaagagtctcatctcaactcatccctggctcttagtagtaaaagaagattgtagaatgttaatagcttttagcatcaatgtctcattagcaggcacattcttgttctttcatgagaagtttatatgaaaactaaaaatttatattcaaattcttcaagatgttgcacttatgtagatactgatattaaataacaacctaacctttatg

SEQ ID NO: 35471 - protein, 321 aa, Arabidopsis thaliana
  peptide (1)..(321): Ceres Seq. ID no. 12385456
  misc_feature (45)..(170): Pfam Name: No apical meristem (NAM) protein Pfam Description: No apical meristem (NAM) protein
  misc_feature (39)..(186): Homolog of NCBI NO: 26452827 NR Description: putative ATAF2 protein [Arabidopsis thaliana]
  misc_feature (39)..(262): Homolog of NCBI NO: 15223456 NR Description: NAC domain protein, putative
  misc_feature (206)..(312): Homolog of NCBI NO: 40647397 NR Description: NAC domain protein [Lycopersicon esculentum]
  misc_feature (42)..(218): Homolog of NCBI NO: 40647397 NR Description: NAC domain protein [Lycopersicon esculentum]
  misc_feature (38)..(321): Homolog of NCBI NO: 23397338 NR Description: unknown protein [Arabidopsis thaliana]
  misc_feature (39)..(321): Homolog of NCBI NO: 10177060 NR Description: contains similarity to NAC-domain
  misc_feature (38)..(321): Homolog of NCBI NO: 30697896 NR Description: No apical meristem (NAM) protein family
  misc_feature (99)..(276): Homolog of NCBI NO: 1345504 NR Description: ATAF2 [Arabidopsis thaliana]
  misc_feature (93)..(276): Homolog of NCBI NO: 1076294 NR Description: ATAF2 protein - Arabidopsis thaliana
  misc_feature (39)..(321): Homolog of NCBI NO: 22326685 NR Description: Expressed protein
ITILSRRRKPKKNPDPAEIEFSTNEEEIFPRATDKKKRMKSELNLPAGFRFHPTDEELVKFYLCRKCASEQISAPVIAEIDLYKFNPWELPEMSLYGEKEWYFFSPRDRKYPNGSRPNRAAGTGYWKATGADKPIGKPKTLGIKKALVFYAGKAPKGIKTNWIMHEYRLANVDRSASVNKKNNLRLDDWVLCRIYNKKGTMEKYFPADEKPRTTTMAEQSSSPFDTSDSTYPTLQEDDSSSSGGHGHVVSPDVLEVQSEPKWGELEDALEAFDTSMFGSSMELLQPDAFVPQFLYQSDYFTSFQDPPEQKPFLNWSFAPQG

SEQ ID NO: 35472 - protein, 283 aa, Arabidopsis thaliana
  peptide (1)..(283): Ceres Seq. ID no. 12385457
  misc_feature (7)..(132): Pfam Name: No apical meristem (NAM) protein Pfam Description: No apical meristem (NAM) protein
  misc_feature (1)..(148): Homolog of NCBI NO: 26452827 NR Description: putative ATAF2 protein [Arabidopsis thaliana]
  misc_feature (1)..(224): Homolog of NCBI NO: 15223456 NR Description: NAC domain protein, putative
  misc_feature (168)..(274): Homolog of NCBI NO: 40647397 NR Description: NAC domain protein [Lycopersicon esculentum]
  misc_feature (4)..(180): Homolog of NCBI NO: 40647397 NR Description: NAC domain protein [Lycopersicon esculentum]
  misc_feature (1)..(283): Homolog of NCBI NO: 23397338 NR Description: unknown protein [Arabidopsis thaliana]
  misc_feature (1)..(283): Homolog of NCBI NO: 10177060 NR Description: contains similarity to NAC-domain
  misc_feature (1)..(283): Homolog of NCBI NO: 30697896 NR Description: No apical meristem (NAM) protein family
  misc_feature (61)..(238): Homolog of NCBI NO: 1345504 NR Description: ATAF2 [Arabidopsis thaliana]
  misc_feature (55)..(238): Homolog of NCBI NO: 1076294 NR Description: ATAF2 protein - Arabidopsis thaliana
  misc_feature (1)..(283): Homolog of NCBI NO: 22326685 NR Description: Expressed protein
MKSELNLPAGFRFHPTDEELVKFYLCRKCASEQISAPVIAEIDLYKFNPWELPEMSLYGEKEWYFFSPRDRKYPNGSRPNRAAGTGYWKATGADKPIGKPKTLGIKKALVFYAGKAPKGIKTNWIMHEYRLANVDRSASVNKKNNLRLDDWVLCRIYNKKGTMEKYFPADEKPRTTTMAEQSSSPFDTSDSTYPTLQEDDSSSSGGHGHVVSPDVLEVQSEPKWGELEDALEAFDTSMFGSSMELLQPDAFVPQFLYQSDYFTSFQDPPEQKPFLNWSFAPQG

SEQ ID NO: 35473 - protein, 229 aa, Arabidopsis thaliana
  peptide (1)..(229): Ceres Seq. ID no. 12385458
  misc_feature (1)..(78): Pfam Name: No apical meristem (NAM) protein Pfam Description: No apical meristem (NAM) protein
  misc_feature (1)..(94): Homolog of NCBI NO: 26452827 NR Description: putative ATAF2 protein [Arabidopsis thaliana]
  misc_feature (1)..(170): Homolog of NCBI NO: 15223456 NR Description: NAC domain protein, putative
  misc_feature (114)..(220): Homolog of NCBI NO: 40647397 NR Description: NAC domain protein [Lycopersicon esculentum]
  misc_feature (1)..(126): Homolog of NCBI NO: 40647397 NR Description: NAC domain protein [Lycopersicon esculentum]
  misc_feature (1)..(229): Homolog of NCBI NO: 23397338 NR Description: unknown protein [Arabidopsis thaliana]
  misc_feature (1)..(229): Homolog of NCBI NO: 10177060 NR Description: contains similarity to NAC-domain
  misc_feature (1)..(229): Homolog of NCBI NO: 30697896 NR Description: No apical meristem (NAM) protein family
  misc_feature (7)..(184): Homolog of NCBI NO: 1345504 NR Description: ATAF2 [Arabidopsis thaliana]
  misc_feature (1)..(184): Homolog of NCBI NO: 1076294 NR Description: ATAF2 protein - Arabidopsis thaliana
  misc_feature (1)..(229): Homolog of NCBI NO: 22326685 NR Description: Expressed protein
MSLYGEKEWYFFSPRDRKYPNGSRPNRAAGTGYWKATGADKPIGKPKTLGIKKALVFYAGKAPKGIKTNWIMHEYRLANVDRSASVNKKNNLRLDDWVLCRIYNKKGTMEKYFPADEKPRTTTMAEQSSSPFDTSDSTYPTLQEDDSSSSGGHGHVVSPDVLEVQSEPKWGELEDALEAFDTSMFGSSMELLQPDAFVPQFLYQSDYFTSFQDPPEQKPFLNWSFAPQG

SEQ ID NO: 35474 - DNA, 1287 bp, Arabidopsis thaliana
  misc_feature (1)..(1287): Ceres Seq. ID no. 13494261
  misc_feature: MA Experiment ID: 108434 Result: Down-regulated in Transcription
  misc_feature: MA Experiment 108434 PARAMETER Experiment Name: At_Root_Tips_cDNA_P Parameter: Tissue Value: Root Tips
  misc_feature: MA Experiment ID: 108435 Result: Down-regulated in Transcription
  misc_feature: MA Experiment 108435 PARAMETER Experiment Name: At_stm_Mutants_cDNA_P Parameter: Plant Line Value: wt Landsburg vs stm
  misc_feature: MA Experiment 108435 PARAMETER Experiment Name: At_stm_Mutants_cDNA_P Parameter: Tissue Value: Shoot Apical Meristem Region
  misc_feature: MA Experiment ID: 108462 Result: Up-regulated in Transcription
  misc_feature: MA Experiment 108462 PARAMETER Experiment Name: At_Germinating_Seeds_cDNA_P Parameter: Age (day) Value: 2 vs. 0
  misc_feature: MA Experiment 108462 PARAMETER Experiment Name: At_Germinating_Seeds_cDNA_P Parameter: Tissue Value: Germinating Seeds
  misc_feature: MA Experiment ID: 108464 Result: Up-regulated in Transcription
  misc_feature: MA Experiment 108464 PARAMETER Experiment Name: At_Germinating_Seeds_cDNA_P Parameter: Age (day) Value: 4 vs. 0
  misc_feature: MA Experiment 108464 PARAMETER Experiment Name: At_Germinating_Seeds_cDNA_P Parameter: Tissue Value: Germinating Seeds
  misc_feature: MA Experiment ID: 108569 Result: Up-regulated in Transcription
  misc_feature: MA Experiment 108569 PARAMETER Experiment Name: At_0.001%_MeJA__cDNA_P Parameter: Timepoint (hr) Value: 6
  misc_feature: MA Experiment 108569 PARAMETER Experiment Name: At_0.001%_MeJA__cDNA_P Parameter: Tissue Value: Aerial
  misc_feature: MA Experiment 108569 PARAMETER Experiment Name: At_0.001%_MeJA__cDNA_P Parameter: Treatment Value: 0.001% MeJA vs. No Treatment
  misc_feature: MA Experiment ID: 108572 Result: Down-regulated in Transcription
  misc_feature: MA Experiment 108572 PARAMETER Experiment Name: At_Drought_cDNA_P Parameter: Timepoint (hr) Value: 1
  misc_feature: MA Experiment 108572 PARAMETER Experiment Name: At_Drought_cDNA_P Parameter: Tissue Value: Aerial
  misc_feature: MA Experiment 108572 PARAMETER Experiment Name: At_Drought_cDNA_P Parameter: Treatment Value: Drought vs. No Drought
  misc_feature: MA Experiment ID: 108573 Result: Down-regulated in Transcription
  misc_feature: MA Experiment 108573 PARAMETER Experiment Name: At_Drought_cDNA_P Parameter: Timepoint (hr) Value: 6
  misc_feature: MA Experiment 108573 PARAMETER Experiment Name: At_Drought_cDNA_P Parameter: Tissue Value: Aerial
  misc_feature: MA Experiment 108573 PARAMETER Experiment Name: At_Drought_cDNA_P Parameter: Treatment Value: Drought vs. No Drought
  misc_feature: MA Experiment ID: 108585 Result: Up-regulated in Transcription
  misc_feature: MA Experiment 108585 PARAMETER Experiment Name: At_5mM_NaNP_cDNA_P Parameter: Timepoint (hr) Value: 6
  misc_feature: MA Experiment 108585 PARAMETER Experiment Name: At_5mM_NaNP_cDNA_P Parameter: Tissue Value: Aerial
  misc_feature: MA Experiment 108585 PARAMETER Experiment Name: At_5mM_NaNP_cDNA_P Parameter: Treatment Value: null
  misc_feature: MA Experiment ID: 108594 Result: Down-regulated in Transcription
  misc_feature: MA Experiment 108594 PARAMETER Experiment Name: At_Ler-rhl_Root_cDNA_P Parameter: Plant Line Value: null
  misc_feature: MA Experiment ID: 108595 Result: Up-regulated in Transcription
  misc_feature: MA Experiment 108595 PARAMETER Experiment Name: At_Ler-pi_Ovule_cDNA_P Parameter: Plant Line Value: null
  misc_feature: MA Experiment ID: 108668 Result: Up-regulated in Transcription
  misc_feature: MA Experiment 108668 PARAMETER Experiment Name: At_2mM_SA_cDNA_P Parameter: Plant Line Value: WS
  misc_feature: MA Experiment 108668 PARAMETER Experiment Name: At_2mM_SA_cDNA_P Parameter: Timepoint (hr) Value: 6
  misc_feature: MA Experiment 108668 PARAMETER Experiment Name: At_2mM_SA_cDNA_P Parameter: Treatment Value: 2mM SA vs. No Treatment
  misc_feature: MA Experiment ID: 20000070 Result: Up-regulated in Transcription
  misc_feature: MA Experiment 20000070 PARAMETER Experiment Name: At_100uM_ABA_Mutants_cDNA_P Parameter: Plant Line Value: CS24
  misc_feature: MA Experiment 20000070 PARAMETER Experiment Name: At_100uM_ABA_Mutants_cDNA_P Parameter: Timepoint (hr) Value: 6
  misc_feature: MA Experiment 20000070 PARAMETER Experiment Name: At_100uM_ABA_Mutants_cDNA_P Parameter: Tissue Value: Aerial
  misc_feature: MA Experiment 20000070 PARAMETER Experiment Name: At_100uM_ABA_Mutants_cDNA_P Parameter: Treatment Value: 100uM ABA vs. No Treatment
  misc_feature: MA Experiment ID: 20000087 Result: Up-regulated in Transcription
  misc_feature: MA Experiment 20000087 PARAMETER Experiment Name: At_100uM_ABA_Mutants_cDNA_P Parameter: Plant Line Value: WS
  misc_feature: MA Experiment 20000087 PARAMETER Experiment Name: At_100uM_ABA_Mutants_cDNA_P Parameter: Timepoint (hr) Value: 6
  misc_feature: MA Experiment 20000087 PARAMETER Experiment Name: At_100uM_ABA_Mutants_cDNA_P Parameter: Tissue Value: Aerial
  misc_feature: MA Experiment 20000087 PARAMETER Experiment Name: At_100uM_ABA_Mutants_cDNA_P Parameter: Treatment Value: 100uM ABA vs. No Treatment
  misc_feature: MA Experiment ID: 20000089 Result: Up-regulated in Transcription
  misc_feature: MA Experiment ID: 20000090 Result: Up-regulated in Transcription
  misc_feature: MA Experiment ID: 20000180 Result: Up-regulated in Transcription
  misc_feature: MA Experiment 20000180 PARAMETER Experiment Name: At_Germinating_Seeds_P Parameter: Age (hr) Value: 24 vs. 0
  misc_feature: MA Experiment 20000180 PARAMETER Experiment Name: At_Germinating_Seeds_P Parameter: Tissue Value: Germinating Seeds
  misc_feature: MA Experiment ID: 20000182 Result: Up-regulated in Transcription
  misc_feature: MA Experiment 20000182 PARAMETER Experiment Name: At_2mM_SA_P Parameter: Age (day) Value: 14
  misc_feature: MA Experiment 20000182 PARAMETER Experiment Name: At_2mM_SA_P Parameter: Organism Value: A. thaliana
  misc_feature: MA Experiment 20000182 PARAMETER Experiment Name: At_2mM_SA_P Parameter: Plant Line Value: WS
  misc_feature: MA Experiment 20000182 PARAMETER Experiment Name: At_2mM_SA_P Parameter: Timepoint (hr) Value: 6
  misc_feature: MA Experiment 20000182 PARAMETER Experiment Name: At_2mM_SA_P Parameter: Tissue Value: Aerial
  misc_feature: MA Experiment 20000182 PARAMETER Experiment Name: At_2mM_SA_P Parameter: Treatment Value: 2mM SA vs. No Treatment
  misc_feature: MA Experiment ID: 20000185 Result: Up-regulated in Transcription
  misc_feature: MA Experiment 20000185 PARAMETER Experiment Name: At_Roots__P Parameter: Age (day) Value: 7 vs. 21
  misc_feature: MA Experiment 20000185 PARAMETER Experiment Name: At_Roots__P Parameter: Organism Value: A. thaliana
  misc_feature: MA Experiment 20000185 PARAMETER Experiment Name: At_Roots__P Parameter: Tissue Value: Roots vs. Whole Plant
  misc_feature: MA Experiment ID: 20000224 Result: Up-regulated in Transcription
  misc_feature: MA Experiment ID: 20000227 Result: Down-regulated in Transcription
  misc_feature: MA Experiment 20000227 PARAMETER Experiment Name: At_Root-Tips-vs-Tops_P Parameter: Tissue Value: Root Tips vs. Root Tops
  misc_feature: MA Experiment ID: 20000265 Result: Down-regulated in Transcription
  misc_feature: MA Experiment 20000265 PARAMETER Experiment Name: At_Open_Flower_P Parameter: Age (day) Value: 21
  misc_feature: MA Experiment 20000265 PARAMETER Experiment Name: At_Open_Flower_P Parameter: Plant Line Value: WS
  misc_feature: MA Experiment 20000265 PARAMETER Experiment Name: At_Open_Flower_P Parameter: Tissue Value: Closed Flower vs. Whole Plant
  misc_feature: MA Experiment ID: 20000267 Result: Down-regulated in Transcription
  misc_feature: MA Experiment 20000267 PARAMETER Experiment Name: At_Drought_P Parameter: Age (day) Value: 7
  misc_feature: MA Experiment 20000267 PARAMETER Experiment Name: At_Drought_P Parameter: Organism Value: A. thaliana
  misc_feature: MA Experiment 20000267 PARAMETER Experiment Name: At_Drought_P Parameter: Plant Line Value: WS
  misc_feature: MA Experiment 20000267 PARAMETER Experiment Name: At_Drought_P Parameter: Timepoint (hr) Value: 6
  misc_feature: MA Experiment 20000267 PARAMETER Experiment Name: At_Drought_P Parameter: Tissue Value: Whole Plant
  misc_feature: MA Experiment 20000267 PARAMETER Experiment Name: At_Drought_P Parameter: Treatment Value: Drought vs. No Drought
  misc_feature: MA Experiment ID: 20000268 Result: Down-regulated in Transcription
  misc_feature: MA Experiment 20000268 PARAMETER Experiment Name: At_100mM_NaCl__P Parameter: Age (day) Value: 14
  misc_feature: MA Experiment 20000268 PARAMETER Experiment Name: At_100mM_NaCl__P Parameter: Organism Value: A. thaliana
  misc_feature: MA Experiment 20000268 PARAMETER Experiment Name: At_100mM_NaCl__P Parameter: Plant Line Value: WS
  misc_feature: MA Experiment 20000268 PARAMETER Experiment Name: At_100mM_NaCl__P Parameter: Timepoint (hr) Value: 6
  misc_feature: MA Experiment 20000268 PARAMETER Experiment Name: At_100mM_NaCl__P Parameter: Tissue Value: Whole Plant
  misc_feature: MA Experiment 20000268 PARAMETER Experiment Name: At_100mM_NaCl__P Parameter: Treatment Value: 100mM NaCl vs. No Treatment
  misc_feature: MA Experiment ID: 20000436 Result: Down-regulated in Transcription
  misc_feature: MA Experiment 20000436 PARAMETER Experiment Name: At_Drought_P Parameter: Age (day) Value: 7
  misc_feature: MA Experiment 20000436 PARAMETER Experiment Name: At_Drought_P Parameter: Organism Value: A. thaliana
  misc_feature: MA Experiment 20000436 PARAMETER Experiment Name: At_Drought_P Parameter: Plant Line Value: WS
  misc_feature: MA Experiment 20000436 PARAMETER Experiment Name: At_Drought_P Parameter: Timepoint (hr) Value: 12
  misc_feature: MA Experiment 20000436 PARAMETER Experiment Name: At_Drought_P Parameter: Tissue Value: Whole Plant
  misc_feature: MA Experiment 20000436 PARAMETER Experiment Name: At_Drought_P Parameter: Treatment Value: Drought vs. No Drought
  misc_feature: MA Experiment ID: 20000437 Result: Down-regulated in Transcription
  misc_feature: MA Experiment 20000437 PARAMETER Experiment Name: At_Drought_P Parameter: Age (day) Value: 8
  misc_feature: MA Experiment 20000437 PARAMETER Experiment Name: At_Drought_P Parameter: Organism Value: A. thaliana
  misc_feature: MA Experiment 20000437 PARAMETER Experiment Name: At_Drought_P Parameter: Plant Line Value: WS
  misc_feature: MA Experiment 20000437 PARAMETER Experiment Name: At_Drought_P Parameter: Timepoint (hr) Value: 24
  misc_feature: MA Experiment 20000437 PARAMETER Experiment Name: At_Drought_P Parameter: Tissue Value: Whole Plant
  misc_feature: MA Experiment 20000437 PARAMETER Experiment Name: At_Drought_P Parameter: Treatment Value: Drought vs. No Drought
  misc_feature: MA Experiment ID: 20000439 Result: Up-regulated in Transcription
  misc_feature: MA Experiment 20000439 PARAMETER Experiment Name: At_Roots__P Parameter: Age (day) Value: 14 vs. 21
  misc_feature: MA Experiment 20000439 PARAMETER Experiment Name: At_Roots__P Parameter: Organism Value: A. thaliana
  misc_feature: MA Experiment 20000439 PARAMETER Experiment Name: At_Roots__P Parameter: Tissue Value: Roots vs. Whole Plant
  misc_feature: MA Experiment ID: 20000441 Result: Up-regulated in Transcription
  misc_feature: MA Experiment 20000441 PARAMETER Experiment Name: At_1uM_BR-BRZ__P Parameter: Tissue Value: Shoot Apices
  misc_feature: MA Experiment 20000441 PARAMETER Experiment Name: At_1uM_BR-BRZ__P Parameter: Treatment Value: 1uM BR vs. No Treatment
  misc_feature: MA Experiment ID: 20000443 Result: Up-regulated in Transcription
  misc_feature: MA Experiment 20000443 PARAMETER Experiment Name: At_1uM_BR-BRZ__P Parameter: Tissue Value: Shoot Apices
  misc_feature: MA Experiment 20000443 PARAMETER Experiment Name: At_1uM_BR-BRZ__P Parameter: Treatment Value: 1uM BRZ vs. No Treatment
  misc_feature: MA Experiment ID: 20000573 Result: Up-regulated in Transcription
  misc_feature: MA Experiment 20000573 PARAMETER Experiment Name: At_100uM_ABA_Mutants__P Parameter: Organism Value: A. thaliana
  misc_feature: MA Experiment 20000573 PARAMETER Experiment Name: At_100uM_ABA_Mutants__P Parameter: Plant Line Value: CS22 vs. Ler wt
  misc_feature: MA Experiment 20000573 PARAMETER Experiment Name: At_100uM_ABA_Mutants__P Parameter: Timepoint (hr) Value: N/A
  misc_feature: MA Experiment 20000573 PARAMETER Experiment Name: At_100uM_ABA_Mutants__P Parameter: Tissue Value: Whole Plant
  misc_feature: MA Experiment 20000573 PARAMETER Experiment Name: At_100uM_ABA_Mutants__P Parameter: Treatment Value: None
  misc_feature: MA Experiment ID: 20000574 Result: Up-regulated in Transcription
  misc_feature: MA Experiment 20000574 PARAMETER Experiment Name: At_100uM_ABA_Mutants__P Parameter: Organism Value: A. thaliana
  misc_feature: MA Experiment 20000574 PARAMETER Experiment Name: At_100uM_ABA_Mutants__P Parameter: Plant Line Value: CS23 vs. Ler wt
  misc_feature: MA Experiment 20000574 PARAMETER Experiment Name: At_100uM_ABA_Mutants__P Parameter: Timepoint (hr) Value: N/A
  misc_feature: MA Experiment 20000574 PARAMETER Experiment Name: At_100uM_ABA_Mutants__P Parameter: Tissue Value: Whole Plant
  misc_feature: MA Experiment 20000574 PARAMETER Experiment Name: At_100uM_ABA_Mutants__P Parameter: Treatment Value: None
  misc_feature: MA Experiment ID: 20000576 Result: Down-regulated in Transcription
  misc_feature: MA Experiment 20000576 PARAMETER Experiment Name: At_100uM_ABA_Mutants__P Parameter: Organism Value: A. thaliana
  misc_feature: MA Experiment 20000576 PARAMETER Experiment Name: At_100uM_ABA_Mutants__P Parameter: Plant Line Value: CS23
  misc_feature: MA Experiment 20000576 PARAMETER Experiment Name: At_100uM_ABA_Mutants__P Parameter: Timepoint (hr) Value: 6
  misc_feature: MA Experiment 20000576 PARAMETER Experiment Name: At_100uM_ABA_Mutants__P Parameter: Tissue Value: Whole Plant
  misc_feature: MA Experiment 20000576 PARAMETER Experiment Name: At_100uM_ABA_Mutants__P Parameter: Treatment Value: 1uM ABA vs. No Treatment
  misc_feature: MA Experiment ID: 20000709 Result: Down-regulated in Transcription
  misc_feature: MA Experiment 20000709 PARAMETER Experiment Name: At_15mM_NH4NO3_L-to-H_P Parameter: Age (hr) Value: 14
  misc_feature: MA Experiment 20000709 PARAMETER Experiment Name: At_15mM_NH4NO3_L-to-H_P Parameter: Organism Value: A. thaliana
  misc_feature: MA Experiment 20000709 PARAMETER Experiment Name: At_15mM_NH4NO3_L-to-H_P Parameter: Plant Line Value: WS
  misc_feature: MA Experiment 20000709 PARAMETER Experiment Name: At_15mM_NH4NO3_L-to-H_P Parameter: Timepoint (hr) Value: 4
  misc_feature: MA Experiment 20000709 PARAMETER Experiment Name: At_15mM_NH4NO3_L-to-H_P Parameter: Tissue Value: Aerial
  misc_feature: MA Experiment 20000709 PARAMETER Experiment Name: At_15mM_NH4NO3_L-to-H_P Parameter: Treatment Value: 15mM NH4NO3 vs. 30mM Mannitol
  misc_feature: MA Experiment ID: 20001451 Result: Down-regulated in Transcription
  misc_feature: MA Experiment 20001451 PARAMETER Experiment Name: At_Far-red-induction_P Parameter: Age (day) Value: 7
  misc_feature: MA Experiment 20001451 PARAMETER Experiment Name: At_Far-red-induction_P Parameter: Light Value: Far-red vs. White
  misc_feature: MA Experiment 20001451 PARAMETER Experiment Name: At_Far-red-induction_P Parameter: Organism Value: A. thaliana
  misc_feature: MA Experiment 20001451 PARAMETER Experiment Name: At_Far-red-induction_P Parameter: Plant Line Value: Columbia
  misc_feature: MA Experiment 20001451 PARAMETER Experiment Name: At_Far-red-induction_P Parameter: Timepoint (hr) Value: 24
  misc_feature: MA Experiment 20001451 PARAMETER Experiment Name: At_Far-red-induction_P Parameter: Tissue Value: Whole Plant
  misc_feature: MA Experiment ID: 20001554 Result: Down-regulated in Transcription
  misc_feature: MA Experiment 20001554 PARAMETER Experiment Name: At_Drought_Soil_Dry_P Parameter: Age (day) Value: 21
  misc_feature: MA Experiment 20001554 PARAMETER Experiment Name: At_Drought_Soil_Dry_P Parameter: Organism Value: A. thaliana
  misc_feature: MA Experiment 20001554 PARAMETER Experiment Name: At_Drought_Soil_Dry_P Parameter: Plant Line Value: WS
  misc_feature: MA Experiment 20001554 PARAMETER Experiment Name: At_Drought_Soil_Dry_P Parameter: Post Timepoint (hr) Value: None
  misc_feature: MA Experiment 20001554 PARAMETER Experiment Name: At_Drought_Soil_Dry_P Parameter: Post-Treatment Value: None
  misc_feature: MA Experiment 20001554 PARAMETER Experiment Name: At_Drought_Soil_Dry_P Parameter: Timepoint (day) Value: 7
  misc_feature: MA Experiment 20001554 PARAMETER Experiment Name: At_Drought_Soil_Dry_P Parameter: Treatment Value: Drought vs. No Drought
  misc_feature: MA Experiment ID: 20001556 Result: Down-regulated in Transcription
  misc_feature: MA Experiment 20001556 PARAMETER Experiment Name: At_Drought_Soil_Dry_P Parameter: Age (day) Value: 26
  misc_feature: MA Experiment 20001556 PARAMETER Experiment Name: At_Drought_Soil_Dry_P Parameter: Organism Value: A. thaliana
  misc_feature: MA Experiment 20001556 PARAMETER Experiment Name: At_Drought_Soil_Dry_P Parameter: Plant Line Value: WS
  misc_feature: MA Experiment 20001556 PARAMETER Experiment Name: At_Drought_Soil_Dry_P Parameter: Post Timepoint (hr) Value: None
  misc_feature: MA Experiment 20001556 PARAMETER Experiment Name: At_Drought_Soil_Dry_P Parameter: Post-Treatment Value: None
  misc_feature: MA Experiment 20001556 PARAMETER Experiment Name: At_Drought_Soil_Dry_P Parameter: Timepoint (day) Value: 12
  misc_feature: MA Experiment 20001556 PARAMETER Experiment Name: At_Drought_Soil_Dry_P Parameter: Treatment Value: Drought vs. No Drought
  misc_feature: MA Experiment ID: 20001557 Result: Up-regulated in Transcription
  misc_feature: MA Experiment 20001557 PARAMETER Experiment Name: At_Drought_Soil_Dry_P Parameter: Age (day) Value: 27
  misc_feature: MA Experiment 20001557 PARAMETER Experiment Name: At_Drought_Soil_Dry_P Parameter: Organism Value: A. thaliana
  misc_feature: MA Experiment 20001557 PARAMETER Experiment Name: At_Drought_Soil_Dry_P Parameter: Plant Line Value: WS
  misc_feature: MA Experiment 20001557 PARAMETER Experiment Name: At_Drought_Soil_Dry_P Parameter: Post Timepoint (hr) Value: 3
  misc_feature: MA Experiment 20001557 PARAMETER Experiment Name: At_Drought_Soil_Dry_P Parameter: Post-Treatment Value: Re-Water vs. No Drought
  misc_feature: MA Experiment 20001557 PARAMETER Experiment Name: At_Drought_Soil_Dry_P Parameter: Timepoint (day) Value: 13
  misc_feature: MA Experiment 20001557 PARAMETER Experiment Name: At_Drought_Soil_Dry_P Parameter: Treatment Value: Drought vs. No Drought
  misc_feature: MA Experiment ID: 20001558 Result: Up-regulated in Transcription
  misc_feature: MA Experiment 20001558 PARAMETER Experiment Name: At_Drought_Soil_Dry_P Parameter: Age (day) Value: 27
  misc_feature: MA Experiment 20001558 PARAMETER Experiment Name: At_Drought_Soil_Dry_P Parameter: Organism Value: A. thaliana
  misc_feature: MA Experiment 20001558 PARAMETER Experiment Name: At_Drought_Soil_Dry_P Parameter: Plant Line Value: WS
  misc_feature: MA Experiment 20001558 PARAMETER Experiment Name: At_Drought_Soil_Dry_P Parameter: Post Timepoint (hr) Value: 6
  misc_feature: MA Experiment 20001558 PARAMETER Experiment Name: At_Drought_Soil_Dry_P Parameter: Post-Treatment Value: Re-Water vs. No Drought
  misc_feature: MA Experiment 20001558 PARAMETER Experiment Name: At_Drought_Soil_Dry_P Parameter: Timepoint (day) Value: 13
  misc_feature: MA Experiment 20001558 PARAMETER Experiment Name: At_Drought_Soil_Dry_P Parameter: Treatment Value: Drought vs. No Drought
  misc_feature: MA Experiment ID: 20001560 Result: Up-regulated in Transcription
  misc_feature: MA Experiment 20001560 PARAMETER Experiment Name: At_Drought_Soil_Dry_P Parameter: Age (day) Value: 28
  misc_feature: MA Experiment 20001560 PARAMETER Experiment Name: At_Drought_Soil_Dry_P Parameter: Organism Value: A. thaliana
  misc_feature: MA Experiment 20001560 PARAMETER Experiment Name: At_Drought_Soil_Dry_P Parameter: Plant Line Value: WS
  misc_feature: MA Experiment 20001560 PARAMETER Experiment Name: At_Drought_Soil_Dry_P Parameter: Post Timepoint (hr) Value: None
  misc_feature: MA Experiment 20001560 PARAMETER Experiment Name: At_Drought_Soil_Dry_P Parameter: Post-Treatment Value: None
  misc_feature: MA Experiment 20001560 PARAMETER Experiment Name: At_Drought_Soil_Dry_P Parameter: Timepoint (day) Value: 14
  misc_feature: MA Experiment 20001560 PARAMETER Experiment Name: At_Drought_Soil_Dry_P Parameter: Treatment Value: Drought vs. No Drought
  misc_feature: MA Experiment ID: 20001904 Result: Down-regulated in Transcription
  misc_feature: MA Experiment 20001904 PARAMETER Experiment Name: At_Drought_Reproduction_P Parameter: Age (day) Value: 37
  misc_feature: MA Experiment 20001904 PARAMETER Experiment Name: At_Drought_Reproduction_P Parameter: Organism Value: A. thaliana
  misc_feature: MA Experiment 20001904 PARAMETER Experiment Name: At_Drought_Reproduction_P Parameter: Plant Line Value: WS
  misc_feature: MA Experiment 20001904 PARAMETER Experiment Name: At_Drought_Reproduction_P Parameter: Timepoint (day) Value: 7
  misc_feature: MA Experiment 20001904 PARAMETER Experiment Name: At_Drought_Reproduction_P Parameter: Tissue Value: Rosettes
  misc_feature: MA Experiment 20001904 PARAMETER Experiment Name: At_Drought_Reproduction_P Parameter: Treatment Value: Drought vs. No Drought
  misc_feature: MA Experiment ID: 20001910 Result: Down-regulated in Transcription
  misc_feature: MA Experiment 20001910 PARAMETER Experiment Name: At_Drought_Reproduction_P Parameter: Age (day) Value: 37
  misc_feature: MA Experiment 20001910 PARAMETER Experiment Name: At_Drought_Reproduction_P Parameter: Organism Value: A. thaliana
  misc_feature: MA Experiment 20001910 PARAMETER Experiment Name: At_Drought_Reproduction_P Parameter: Plant Line Value: WS
  misc_feature: MA Experiment 20001910 PARAMETER Experiment Name: At_Drought_Reproduction_P Parameter: Timepoint (day) Value: 7
  misc_feature: MA Experiment 20001910 PARAMETER Experiment Name: At_Drought_Reproduction_P Parameter: Tissue Value: Flowers
  misc_feature: MA Experiment 20001910 PARAMETER Experiment Name: At_Drought_Reproduction_P Parameter: Treatment Value: Drought vs. No Drought
aactataacttaaacacacacttcatcttctctaaaaccctaaaatttaaacacaagatgggtttggttagatcattgtgcttattaataaccttccttaattgtctcatcatctcggttcatggccaagccaccgcaaggcctggtcctgtttccggcactaggattgggttttacttaactacgtgtcctagagctgagactattgtccgaaacgccgtgaatgctggtttcagttctgaccccagaatcgcacccggaatactgagaatgcatttccacgactgttttgtccaaggttgtgacggttcgatccttatatccggagctaacaccgagagaaccgccggtccgaacctcaatctccaaggatttgaagtcatagacaacgccaaaacgcagctcgaagccgcgtgtcctggagttgtctcttgtgctgatattttagcattagccgctcgtgacacagtcattctcactcaaggaacaggctggcaagtaccaacgggacgtagagatggtagagtttctttggcttcgaatgctaacaatctccctggtccccgtgactccgttgccgttcaacaacagaaattctccgccttgggactcaatactcgtgatctcgtcgtcctcgtcggaggacacacgatcggaacagcaggatgtggtgtattcaggaacaggctattcaataccaccggacaaaccgcagatccaaccatcgacccaacatttttggcgcagcttcaaacacaatgtccccaaaacggcgacggttcagtgcgcgtggatctcgacaccggaagcggaagcacttgggacacttcttactacaacaacctaagccgtgggcgtggagttctccaatccgatcaagtcctttggaccgatccagccactagacccatagtgcaacaattgatggctcctagaagcaccttcaacgttgagtttgcgaggtcaatggtcagaatgagtaatatcggtgtggttaccggagctaatggggaaatccgtagggtttgctctgcggttaattaattaaccgattagaatctgtcgtgataaactttcatgacgcaaagtacttgtttcgagtgtggttttaatctgaacaataaataaaccaatagaaaacgacatacaaagaaaaaacccaaaagtgggttgatgaaaattgtatctataaggtgttggtattcgatttcttttggttttagttaaaaaaaactgtaatgtcttcacaaaaatattataatgagtttggtcctagtttggattcct

SEQ ID NO: 35475 - protein, 347 aa, Arabidopsis thaliana
  peptide (1)..(347): Ceres Seq. ID no. 13494262
  misc_feature (70)..(311): Pfam Name: Peroxidase Pfam Description: Peroxidase
  misc_feature (26)..(347): Homolog of NCBI NO: 1232069 NR Description: cationic peroxidase [Stylosanthes humilis]
  misc_feature (53)..(347): Homolog of NCBI NO: 5381255 NR Description: peroxidase [Nicotiana tabacum]
  misc_feature (53)..(347): Homolog of NCBI NO: 19698452 NR Description: bacterial-induced gaiacol peroxidase [Gossypium
  misc_feature (35)..(347): Homolog of NCBI NO: 129808 NR Description: Cationic peroxidase 2 precursor (PNPC2)
  misc_feature (18)..(347): Homolog of NCBI NO: 7433065 NR Description: peroxidase (EC 1.11.1.7) precursor,
  misc_feature (92)..(347): Homolog of NCBI NO: 1890313 NR Description: peroxidase ATP24a [Arabidopsis thaliana]
  misc_feature (53)..(347): Homolog of NCBI NO: 18558997 NR Description: bacterial-induced peroxidase [Gossypium hirsutum]
  misc_feature (20)..(347): Homolog of NCBI NO: 15241812 NR Description: peroxidase, putative [Arabidopsis thaliana]
  misc_feature (20)..(347): Homolog of NCBI NO: 21592403 NR Description: peroxidase [Arabidopsis thaliana]
  misc_feature (20)..(347): Homolog of NCBI NO: 15237615 NR Description: peroxidase, putative [Arabidopsis thaliana]
NYNLNTHFIFSKTLKFKHKMGLVRSLCLLITFLNCLIISVHGQATARPGPVSGTRIGFYLTTCPRAETIVRNAVNAGFSSDPRIAPGILRMHFHDCFVQGCDGSILISGANTERTAGPNLNLQGFEVIDNAKTQLEAACPGVVSCADILALAARDTVILTQGTGWQVPTGRRDGRVSLASNANNLPGPRDSVAVQQQKFSALGLNTRDLVVLVGGHTIGTAGCGVFRNRLFNTTGQTADPTIDPTFLAQLQTQCPQNGDGSVRVDLDTGSGSTWDTSYYNNLSRGRGVLQSDQVLWTDPATRPIVQQLMAPRSTFNVEFARSMVRMSNIGVVTGANGEIRRVCSAVN

SEQ ID NO: 35476 - protein, 328 aa, Arabidopsis thaliana
  peptide (1)..(328): Ceres Seq. ID no. 13494263
  misc_feature (51)..(292): Pfam Name: Peroxidase Pfam Description: Peroxidase
  misc_feature (7)..(328): Homolog of NCBI NO: 1232069 NR Description: cationic peroxidase [Stylosanthes humilis]
  misc_feature (34)..(328): Homolog of NCBI NO: 5381255 NR Description: peroxidase [Nicotiana tabacum]
  misc_feature (34)..(328): Homolog of NCBI NO: 19698452 NR Description: bacterial-induced gaiacol peroxidase [Gossypium
  misc_feature (16)..(328): Homolog of NCBI NO: 129808 NR Description: Cationic peroxidase 2 precursor (PNPC2)
  misc_feature (1)..(328): Homolog of NCBI NO: 7433065 NR Description: peroxidase (EC 1.11.1.7) precursor,
  misc_feature (73)..(328): Homolog of NCBI NO: 1890313 NR Description: peroxidase ATP24a [Arabidopsis thaliana]
  misc_feature (34)..(328): Homolog of NCBI NO: 18558997 NR Description: bacterial-induced peroxidase [Gossypium hirsutum]
  misc_feature (1)..(328): Homolog of NCBI NO: 15241812 NR Description: peroxidase, putative [Arabidopsis thaliana]
  misc_feature (1)..(328): Homolog of NCBI NO: 21592403 NR Description: peroxidase [Arabidopsis thaliana]
  misc_feature (1)..(328): Homolog of NCBI NO: 15237615 NR Description: peroxidase, putative [Arabidopsis thaliana]
MGLVRSLCLLITFLNCLIISVHGQATARPGPVSGTRIGFYLTTCPRAETIVRNAVNAGFSSDPRIAPGILRMHFHDCFVQGCDGSILISGANTERTAGPNLNLQGFEVIDNAKTQLEAACPGVVSCADILALAARDTVILTQGTGWQVPTGRRDGRVSLASNANNLPGPRDSVAVQQQKFSALGLNTRDLVVLVGGHTIGTAGCGVFRNRLFNTTGQTADPTIDPTFLAQLQTQCPQNGDGSVRVDLDTGSGSTWDTSYYNNLSRGRGVLQSDQVLWTDPATRPIVQQLMAPRSTFNVEFARSMVRMSNIGVVTGANGEIRRVCSAVN

SEQ ID NO: 35477 - protein, 257 aa, Arabidopsis thaliana
  peptide (1)..(257): Ceres Seq. ID no. 13494264
  misc_feature (1)..(221): Pfam Name: Peroxidase Pfam Description: Peroxidase
  misc_feature (1)..(257): Homolog of NCBI NO: 1232069 NR Description: cationic peroxidase [Stylosanthes humilis]
  misc_feature (1)..(257): Homolog of NCBI NO: 5381255 NR Description: peroxidase [Nicotiana tabacum]
  misc_feature (1)..(257): Homolog of NCBI NO: 19698452 NR Description: bacterial-induced gaiacol peroxidase [Gossypium
  misc_feature (1)..(257): Homolog of NCBI NO: 129808 NR Description: Cationic peroxidase 2 precursor (PNPC2)
  misc_feature (1)..(257): Homolog of NCBI NO: 7433065 NR Description: peroxidase (EC 1.11.1.7) precursor,
  misc_feature (2)..(257): Homolog of NCBI NO: 1890313 NR Description: peroxidase ATP24a [Arabidopsis thaliana]
  misc_feature (1)..(257): Homolog of NCBI NO: 18558997 NR Description: bacterial-induced peroxidase [Gossypium hirsutum]
  misc_feature (1)..(257): Homolog of NCBI NO: 15241812 NR Description: peroxidase, putative [Arabidopsis thaliana]
  misc_feature (1)..(257): Homolog of NCBI NO: 21592403 NR Description: peroxidase [Arabidopsis thaliana]
  misc_feature (1)..(257): Homolog of NCBI NO: 15237615 NR Description: peroxidase, putative [Arabidopsis thaliana]
MHFHDCFVQGCDGSILISGANTERTAGPNLNLQGFEVIDNAKTQLEAACPGVVSCADILALAARDTVILTQGTGWQVPTGRRDGRVSLASNANNLPGPRDSVAVQQQKFSALGLNTRDLVVLVGGHTIGTAGCGVFRNRLFNTTGQTADPTIDPTFLAQLQTQCPQNGDGSVRVDLDTGSGSTWDTSYYNNLSRGRGVLQSDQVLWTDPATRPIVQQLMAPRSTFNVEFARSMVRMSNIGVVTGANGEIRRVCSAVN

SEQ ID NO: 35478 - DNA, 952 bp, Arabidopsis thaliana
  misc_feature (1)..(952): Ceres Seq. ID no. 13497003
  misc_feature: MA Experiment ID: 108595 Result: Down-regulated in Transcription
  misc_feature: MA Experiment 108595 PARAMETER Experiment Name: At_Ler-pi_Ovule_cDNA_P Parameter: Plant Line Value: null
  misc_feature: MA Experiment ID: 20000070 Result: Down-regulated in Transcription
  misc_feature: MA Experiment 20000070 PARAMETER Experiment Name: At_100uM_ABA_Mutants_cDNA_P Parameter: Plant Line Value: CS24
  misc_feature: MA Experiment 20000070 PARAMETER Experiment Name: At_100uM_ABA_Mutants_cDNA_P Parameter: Timepoint (hr) Value: 6
  misc_feature: MA Experiment 20000070 PARAMETER Experiment Name: At_100uM_ABA_Mutants_cDNA_P Parameter: Tissue Value: Aerial
  misc_feature: MA Experiment 20000070 PARAMETER Experiment Name: At_100uM_ABA_Mutants_cDNA_P Parameter: Treatment Value: 100uM ABA vs. No Treatment
  misc_feature: MA Experiment ID: 20000071 Result: Down-regulated in Transcription
  misc_feature: MA Experiment 20000071 PARAMETER Experiment Name: At_100uM_ABA_Mutants_cDNA_P Parameter: Plant Line Value: CS8104
  misc_feature: MA Experiment 20000071 PARAMETER Experiment Name: At_100uM_ABA_Mutants_cDNA_P Parameter: Timepoint (hr) Value: 6
  misc_feature: MA Experiment 20000071 PARAMETER Experiment Name: At_100uM_ABA_Mutants_cDNA_P Parameter: Tissue Value: Aerial
  misc_feature: MA Experiment 20000071 PARAMETER Experiment Name: At_100uM_ABA_Mutants_cDNA_P Parameter: Treatment Value: 100uM ABA vs. No Treatment
  misc_feature: MA Experiment ID: 20000072 Result: Down-regulated in Transcription
  misc_feature: MA Experiment 20000072 PARAMETER Experiment Name: At_100uM_ABA_Mutants_cDNA_P Parameter: Plant Line Value: CS8105
  misc_feature: MA Experiment 20000072 PARAMETER Experiment Name: At_100uM_ABA_Mutants_cDNA_P Parameter: Timepoint (hr) Value: 6
  misc_feature: MA Experiment 20000072 PARAMETER Experiment Name: At_100uM_ABA_Mutants_cDNA_P Parameter: Tissue Value: Aerial
  misc_feature: MA Experiment 20000072 PARAMETER Experiment Name: At_100uM_ABA_Mutants_cDNA_P Parameter: Treatment Value: 100uM ABA vs. No Treatment
  misc_feature: MA Experiment ID: 20000185 Result: Down-regulated in Transcription
  misc_feature: MA Experiment 20000185 PARAMETER Experiment Name: At_Roots__P Parameter: Age (day) Value: 7 vs. 21
  misc_feature: MA Experiment 20000185 PARAMETER Experiment Name: At_Roots__P Parameter: Organism Value: A. thaliana
  misc_feature: MA Experiment 20000185 PARAMETER Experiment Name: At_Roots__P Parameter: Tissue Value: Roots vs. Whole Plant
  misc_feature: MA Experiment ID: 20000437 Result: Down-regulated in Transcription
  misc_feature: MA Experiment 20000437 PARAMETER Experiment Name: At_Drought_P Parameter: Age (day) Value: 8
  misc_feature: MA Experiment 20000437 PARAMETER Experiment Name: At_Drought_P Parameter: Organism Value: A. thaliana
  misc_feature: MA Experiment 20000437 PARAMETER Experiment Name: At_Drought_P Parameter: Plant Line Value: WS
  misc_feature: MA Experiment 20000437 PARAMETER Experiment Name: At_Drought_P Parameter: Timepoint (hr) Value: 24
  misc_feature: MA Experiment 20000437 PARAMETER Experiment Name: At_Drought_P Parameter: Tissue Value: Whole Plant
  misc_feature: MA Experiment 20000437 PARAMETER Experiment Name: At_Drought_P Parameter: Treatment Value: Drought vs. No Drought
  misc_feature: MA Experiment ID: 20000439 Result: Down-regulated in Transcription
  misc_feature: MA Experiment 20000439 PARAMETER Experiment Name: At_Roots__P Parameter: Age (day) Value: 14 vs. 21
  misc_feature: MA Experiment 20000439 PARAMETER Experiment Name: At_Roots__P Parameter: Organism Value: A. thaliana
  misc_feature: MA Experiment 20000439 PARAMETER Experiment Name: At_Roots__P Parameter: Tissue Value: Roots vs. Whole Plant
  misc_feature: MA Experiment ID: 20000495 Result: Down-regulated in Transcription
  misc_feature: MA Experiment 20000495 PARAMETER Experiment Name: At_Guard_Cells_P Parameter: Harvest Date Value: 8/2/2002
  misc_feature: MA Experiment 20000495 PARAMETER Experiment Name: At_Guard_Cells_P Parameter: Organism Value: A. thaliana
  misc_feature: MA Experiment 20000495 PARAMETER Experiment Name: At_Guard_Cells_P Parameter: Tissue Value: Guard Cells vs. Leaves
  misc_feature: MA Experiment ID: 20001450 Result: Down-regulated in Transcription
  misc_feature: MA Experiment 20001450 PARAMETER Experiment Name: At_Far-red-induction_P Parameter: Age (day) Value: 7
  misc_feature: MA Experiment 20001450 PARAMETER Experiment Name: At_Far-red-induction_P Parameter: Light Value: Far-red vs. White
  misc_feature: MA Experiment 20001450 PARAMETER Experiment Name: At_Far-red-induction_P Parameter: Organism Value: A. thaliana
  misc_feature: MA Experiment 20001450 PARAMETER Experiment Name: At_Far-red-induction_P Parameter: Plant Line Value: Columbia
  misc_feature: MA Experiment 20001450 PARAMETER Experiment Name: At_Far-red-induction_P Parameter: Timepoint (hr) Value: 8
  misc_feature: MA Experiment 20001450 PARAMETER Experiment Name: At_Far-red-induction_P Parameter: Tissue Value: Whole Plant
  misc_feature: MA Experiment ID: 20001451 Result: Down-regulated in Transcription
  misc_feature: MA Experiment 20001451 PARAMETER Experiment Name: At_Far-red-induction_P Parameter: Age (day) Value: 7
  misc_feature: MA Experiment 20001451 PARAMETER Experiment Name: At_Far-red-induction_P Parameter: Light Value: Far-red vs. White
  misc_feature: MA Experiment 20001451 PARAMETER Experiment Name: At_Far-red-induction_P Parameter: Organism Value: A. thaliana
  misc_feature: MA Experiment 20001451 PARAMETER Experiment Name: At_Far-red-induction_P Parameter: Plant Line Value: Columbia
  misc_feature: MA Experiment 20001451 PARAMETER Experiment Name: At_Far-red-induction_P Parameter: Timepoint (hr) Value: 24
  misc_feature: MA Experiment 20001451 PARAMETER Experiment Name: At_Far-red-induction_P Parameter: Tissue Value: Whole Plant
  misc_feature: MA Experiment ID: 20001905 Result: Down-regulated in Transcription
  misc_feature: MA Experiment 20001905 PARAMETER Experiment Name: At_Drought_Reproduction_P Parameter: Age (day) Value: 40
  misc_feature: MA Experiment 20001905 PARAMETER Experiment Name: At_Drought_Reproduction_P Parameter: Organism Value: A. thaliana
  misc_feature: MA Experiment 20001905 PARAMETER Experiment Name: At_Drought_Reproduction_P Parameter: Plant Line Value: WS
  misc_feature: MA Experiment 20001905 PARAMETER Experiment Name: At_Drought_Reproduction_P Parameter: Timepoint (day) Value: 10
  misc_feature: MA Experiment 20001905 PARAMETER Experiment Name: At_Drought_Reproduction_P Parameter: Tissue Value: Rosettes
  misc_feature: MA Experiment 20001905 PARAMETER Experiment Name: At_Drought_Reproduction_P Parameter: Treatment Value: Drought vs. No Drought
  misc_feature: MA Experiment ID: 20001911 Result: Down-regulated in Transcription
  misc_feature: MA Experiment 20001911 PARAMETER Experiment Name: At_Drought_Reproduction_P Parameter: Age (day) Value: 40
  misc_feature: MA Experiment 20001911 PARAMETER Experiment Name: At_Drought_Reproduction_P Parameter: Organism Value: A. thaliana
  misc_feature: MA Experiment 20001911 PARAMETER Experiment Name: At_Drought_Reproduction_P Parameter: Plant Line Value: WS
  misc_feature: MA Experiment 20001911 PARAMETER Experiment Name: At_Drought_Reproduction_P Parameter: Timepoint (day) Value: 10
  misc_feature: MA Experiment 20001911 PARAMETER Experiment Name: At_Drought_Reproduction_P Parameter: Tissue Value: Flowers
  misc_feature: MA Experiment 20001911 PARAMETER Experiment Name: At_Drought_Reproduction_P Parameter: Treatment Value: Drought vs. No Drought
atggataaccctcaagaagaagctgctgaagaagaaacctcatccttcgaacgttaagaggaagaagaataagagaaatcgattcgtggttttgggaaaattcaatggcggtttctactgtatcgtcgtttctattgccatctttcggcattccaagctcttcgccttcttctaccagactcaaagtctctctgctgccttcatcttctacccatggcggccttagttcctgcgtccttacgaaaccatccgtctcgcttacgaaggtcttcgctgttcccgataccctagatccaactccagaaattctcgatgaacccgcctctgaggttccgagctcttcatccatcagtgtagacgcggataagatggcgccaaagcaaaagattaggatcaagcttagatcatactgggtgcctcttattgaggactcatgcaagcagatacttgatgctgcgagaaacaccaatgcaaagacgatgggtcctgttccattgccaaccaagaagcgtatctactgtgttctcaagtctcctcacgttcacaaggatgctaggttccattttgaaatccggacacaccagcgcatgattgatattctctacccgactgctcaaactatcgattctttgatgcaacttgatcttcctgctggtgtcgatgtggaagtgaagctctgaagaagaagcgtaactacaatgatgtgatgggcacttttgcattgaatgaacagactgtttcagatcaactacattgcttagaactggtaagccttgtatcatcttttttgagaacctttgtaacgaaaatgtaagttgtattatctggtccttggaatctatctttagcgatgcttggttcttagttgatgaacatatccttaattaagcaagttcaaaggaatttgtttttgttttactaattgttatgcagtttgcctgtgtccattatg

SEQ ID NO: 35479 - protein, 191 aa, Arabidopsis thaliana
  peptide (1)..(191): Ceres Seq. ID no. 13497004
  misc_feature (94)..(189): Pfam Name: Ribosomal protein S10p/S20e Pfam Description: Ribosomal protein S10p/S20e
  misc_feature (92)..(191): Homolog of NCBI NO: 37523498 NR Description: 30S ribosomal protein S10 [Gloeobacter violaceus]
  misc_feature (92)..(191): Homolog of NCBI NO: 11467745 NR Description: ribosomal protein S10 [Guillardia theta]
  misc_feature (92)..(191): Homolog of NCBI NO: 17231828 NR Description: 30S ribosomal protein S10 [Nostoc sp. PCC 7120]
  misc_feature (92)..(191): Homolog of NCBI NO: 16330912 NR Description: 30S ribosomal protein S10 [Synechocystis sp. PCC
  misc_feature (92)..(191): Homolog of NCBI NO: 1350919 NR Description: 30S ribosomal protein S10
  misc_feature (92)..(191): Homolog of NCBI NO: 23125142 NR Description: hypothetical protein [Nostoc punctiforme]
  misc_feature (94)..(191): Homolog of NCBI NO: 11465752 NR Description: ribosomal protein S10 [Porphyra purpurea]
  misc_feature (89)..(191): Homolog of NCBI NO: 11467349 NR Description: ribosomal protein S10 [Cyanophora paradoxa]
  misc_feature (1)..(191): Homolog of NCBI NO: 7578929 NR Description: plastid ribosomal protein S10 precursor
  misc_feature (1)..(191): Homolog of NCBI NO: 15231154 NR Description: chloroplast 30S ribosomal protein S10, putative
MAVSTVSSFLLPSFGIPSSSPSSTRLKVSLLPSSSTHGGLSSCVLTKPSVSLTKVFAVPDTLDPTPEILDEPASEVPSSSSISVDADKMAPKQKIRIKLRSYWVPLIEDSCKQILDAARNTNAKTMGPVPLPTKKRIYCVLKSPHVHKDARFHFEIRTHQRMIDILYPTAQTIDSLMQLDLPAGVDVEVKL

SEQ ID NO: 35480 - protein, 103 aa, Arabidopsis thaliana
  peptide (1)..(103): Ceres Seq. ID no. 13497005
  misc_feature (6)..(101): Pfam Name: Ribosomal protein S10p/S20e Pfam Description: Ribosomal protein S10p/S20e
  misc_feature (4)..(103): Homolog of NCBI NO: 37523498 NR Description: 30S ribosomal protein S10 [Gloeobacter violaceus]
  misc_feature (4)..(103): Homolog of NCBI NO: 11467745 NR Description: ribosomal protein S10 [Guillardia theta]
  misc_feature (4)..(103): Homolog of NCBI NO: 17231828 NR Description: 30S ribosomal protein S10 [Nostoc sp. PCC 7120]
  misc_feature (4)..(103): Homolog of NCBI NO: 16330912 NR Description: 30S ribosomal protein S10 [Synechocystis sp. PCC
  misc_feature (4)..(103): Homolog of NCBI NO: 1350919 NR Description: 30S ribosomal protein S10
  misc_feature (4)..(103): Homolog of NCBI NO: 23125142 NR Description: hypothetical protein [Nostoc punctiforme]
  misc_feature (6)..(103): Homolog of NCBI NO: 11465752 NR Description: ribosomal protein S10 [Porphyra purpurea]
  misc_feature (1)..(103): Homolog of NCBI NO: 11467349 NR Description: ribosomal protein S10 [Cyanophora paradoxa]
  misc_feature (1)..(103): Homolog of NCBI NO: 7578929 NR Description: plastid ribosomal protein S10 precursor
  misc_feature (1)..(103): Homolog of NCBI NO: 15231154 NR Description: chloroplast 30S ribosomal protein S10, putative
MAPKQKIRIKLRSYWVPLIEDSCKQILDAARNTNAKTMGPVPLPTKKRIYCVLKSPHVHKDARFHFEIRTHQRMIDILYPTAQTIDSLMQLDLPAGVDVEVKL

SEQ ID NO: 35481 - DNA, 783 bp, Arabidopsis thaliana
  misc_feature (1)..(783): Ceres Seq. ID no. 12580494
  misc_feature: MA Experiment ID: 108434 Result: Down-regulated in Transcription
  misc_feature: MA Experiment 108434 PARAMETER Experiment Name: At_Root_Tips_cDNA_P Parameter: Tissue Value: Root Tips
  misc_feature: MA Experiment ID: 108462 Result: Up-regulated in Transcription
  misc_feature: MA Experiment 108462 PARAMETER Experiment Name: At_Germinating_Seeds_cDNA_P Parameter: Age (day) Value: 2 vs. 0
  misc_feature: MA Experiment 108462 PARAMETER Experiment Name: At_Germinating_Seeds_cDNA_P Parameter: Tissue Value: Germinating Seeds
  misc_feature: MA Experiment ID: 108463 Result: Up-regulated in Transcription
  misc_feature: MA Experiment 108463 PARAMETER Experiment Name: At_Germinating_Seeds_cDNA_P Parameter: Age (day) Value: 3 vs. 0
  misc_feature: MA Experiment 108463 PARAMETER Experiment Name: At_Germinating_Seeds_cDNA_P Parameter: Tissue Value: Germinating Seeds
  misc_feature: MA Experiment ID: 108464 Result: Up-regulated in Transcription
  misc_feature: MA Experiment 108464 PARAMETER Experiment Name: At_Germinating_Seeds_cDNA_P Parameter: Age (day) Value: 4 vs. 0
  misc_feature: MA Experiment 108464 PARAMETER Experiment Name: At_Germinating_Seeds_cDNA_P Parameter: Tissue Value: Germinating Seeds
  misc_feature: MA Experiment ID: 108469 Result: Up-regulated in Transcription
  misc_feature: MA Experiment ID: 108561 Result: Up-regulated in Transcription
  misc_feature: MA Experiment 108561 PARAMETER Experiment Name: At_100uM_ABA_cDNA_P Parameter: Timepoint (hr) Value: 6
  misc_feature: MA Experiment 108561 PARAMETER Experiment Name: At_100uM_ABA_cDNA_P Parameter: Tissue Value: Aerial
  misc_feature: MA Experiment 108561 PARAMETER Experiment Name: At_100uM_ABA_cDNA_P Parameter: Treatment Value: 100uM ABA vs. No Treatment
  misc_feature: MA Experiment ID: 108573 Result: Up-regulated in Transcription
  misc_feature: MA Experiment 108573 PARAMETER Experiment Name: At_Drought_cDNA_P Parameter: Timepoint (hr) Value: 6
  misc_feature: MA Experiment 108573 PARAMETER Experiment Name: At_Drought_cDNA_P Parameter: Tissue Value: Aerial
  misc_feature: MA Experiment 108573 PARAMETER Experiment Name: At_Drought_cDNA_P Parameter: Treatment Value: Drought vs. No Drought
  misc_feature: MA Experiment ID: 108577 Result: Down-regulated in Transcription
  misc_feature: MA Experiment 108577 PARAMETER Experiment Name: At_42deg_Heat_cDNA_P Parameter: Temperature (deg C) Value: 42 vs. 22
  misc_feature: MA Experiment 108577 PARAMETER Experiment Name: At_42deg_Heat_cDNA_P Parameter: Timepoint (hr) Value: 6
  misc_feature: MA Experiment 108577 PARAMETER Experiment Name: At_42deg_Heat_cDNA_P Parameter: Tissue Value: Aerial
  misc_feature: MA Experiment ID: 108585 Result: Up-regulated in Transcription
  misc_feature: MA Experiment 108585 PARAMETER Experiment Name: At_5mM_NaNP_cDNA_P Parameter: Timepoint (hr) Value: 6
  misc_feature: MA Experiment 108585 PARAMETER Experiment Name: At_5mM_NaNP_cDNA_P Parameter: Tissue Value: Aerial
  misc_feature: MA Experiment 108585 PARAMETER Experiment Name: At_5mM_NaNP_cDNA_P Parameter: Treatment Value: null
  misc_feature: MA Experiment ID: 108605 Result: Up-regulated in Transcription
  misc_feature: MA Experiment 108605 PARAMETER Experiment Name: At_100uM_ABA_cDNA_P Parameter: Timepoint (hr) Value: 6
  misc_feature: MA Experiment 108605 PARAMETER Experiment Name: At_100uM_ABA_cDNA_P Parameter: Tissue Value: Aerial
  misc_feature: MA Experiment 108605 PARAMETER Experiment Name: At_100uM_ABA_cDNA_P Parameter: Treatment Value: 100uM ABA vs. No Treatment
  misc_feature: MA Experiment ID: 108607 Result: Up-regulated in Transcription
  misc_feature: MA Experiment 108607 PARAMETER Experiment Name: At_100uM_ABA_cDNA_P Parameter: Timepoint (hr) Value: 4
  misc_feature: MA Experiment 108607 PARAMETER Experiment Name: At_100uM_ABA_cDNA_P Parameter: Tissue Value: Aerial
  misc_feature: MA Experiment 108607 PARAMETER Experiment Name: At_100uM_ABA_cDNA_P Parameter: Treatment Value: 100uM ABA vs. No Treatment
  misc_feature: MA Experiment ID: 108608 Result: Up-regulated in Transcription
  misc_feature: MA Experiment 108608 PARAMETER Experiment Name: At_100uM_ABA_cDNA_P Parameter: Timepoint (hr) Value: 1
  misc_feature: MA Experiment 108608 PARAMETER Experiment Name: At_100uM_ABA_cDNA_P Parameter: Tissue Value: Aerial
  misc_feature: MA Experiment 108608 PARAMETER Experiment Name: At_100uM_ABA_cDNA_P Parameter: Treatment Value: 100uM ABA vs. No Treatment
  misc_feature: MA Experiment ID: 108609 Result: Up-regulated in Transcription
  misc_feature: MA Experiment 108609 PARAMETER Experiment Name: At_100uM_ABA_cDNA_P Parameter: Timepoint (hr) Value: 24
  misc_feature: MA Experiment 108609 PARAMETER Experiment Name: At_100uM_ABA_cDNA_P Parameter: Tissue Value: Aerial
  misc_feature: MA Experiment 108609 PARAMETER Experiment Name: At_100uM_ABA_cDNA_P Parameter: Treatment Value: 100uM ABA vs. No Treatment
  misc_feature: MA Experiment ID: 108668 Result: Up-regulated in Transcription
  misc_feature: MA Experiment 108668 PARAMETER Experiment Name: At_2mM_SA_cDNA_P Parameter: Plant Line Value: WS
  misc_feature: MA Experiment 108668 PARAMETER Experiment Name: At_2mM_SA_cDNA_P Parameter: Timepoint (hr) Value: 6
  misc_feature: MA Experiment 108668 PARAMETER Experiment Name: At_2mM_SA_cDNA_P Parameter: Treatment Value: 2mM SA vs. No Treatment
  misc_feature: MA Experiment ID: 20000069 Result: Up-regulated in Transcription
  misc_feature: MA Experiment 20000069 PARAMETER Experiment Name: At_100uM_ABA_Mutants_cDNA_P Parameter: Plant Line Value: CS23
  misc_feature: MA Experiment 20000069 PARAMETER Experiment Name: At_100uM_ABA_Mutants_cDNA_P Parameter: Timepoint (hr) Value: 6
  misc_feature: MA Experiment 20000069 PARAMETER Experiment Name: At_100uM_ABA_Mutants_cDNA_P Parameter: Tissue Value: Aerial
  misc_feature: MA Experiment 20000069 PARAMETER Experiment Name: At_100uM_ABA_Mutants_cDNA_P Parameter: Treatment Value: 100uM ABA vs. No Treatment
  misc_feature: MA Experiment ID: 20000070 Result: Up-regulated in Transcription
  misc_feature: MA Experiment 20000070 PARAMETER Experiment Name: At_100uM_ABA_Mutants_cDNA_P Parameter: Plant Line Value: CS24
  misc_feature: MA Experiment 20000070 PARAMETER Experiment Name: At_100uM_ABA_Mutants_cDNA_P Parameter: Timepoint (hr) Value: 6
  misc_feature: MA Experiment 20000070 PARAMETER Experiment Name: At_100uM_ABA_Mutants_cDNA_P Parameter: Tissue Value: Aerial
  misc_feature: MA Experiment 20000070 PARAMETER Experiment Name: At_100uM_ABA_Mutants_cDNA_P Parameter: Treatment Value: 100uM ABA vs. No Treatment
  misc_feature: MA Experiment ID: 20000071 Result: Up-regulated in Transcription
  misc_feature: MA Experiment 20000071 PARAMETER Experiment Name: At_100uM_ABA_Mutants_cDNA_P Parameter: Plant Line Value: CS8104
  misc_feature: MA Experiment 20000071 PARAMETER Experiment Name: At_100uM_ABA_Mutants_cDNA_P Parameter: Timepoint (hr) Value: 6
  misc_feature: MA Experiment 20000071 PARAMETER Experiment Name: At_100uM_ABA_Mutants_cDNA_P Parameter: Tissue Value: Aerial
  misc_feature: MA Experiment 20000071 PARAMETER Experiment Name: At_100uM_ABA_Mutants_cDNA_P Parameter: Treatment Value: 100uM ABA vs. No Treatment
  misc_feature: MA Experiment ID: 20000072 Result: Up-regulated in Transcription
  misc_feature: MA Experiment 20000072 PARAMETER Experiment Name: At_100uM_ABA_Mutants_cDNA_P Parameter: Plant Line Value: CS8105
  misc_feature: MA Experiment 20000072 PARAMETER Experiment Name: At_100uM_ABA_Mutants_cDNA_P Parameter: Timepoint (hr) Value: 6
  misc_feature: MA Experiment 20000072 PARAMETER Experiment Name: At_100uM_ABA_Mutants_cDNA_P Parameter: Tissue Value: Aerial
  misc_feature: MA Experiment 20000072 PARAMETER Experiment Name: At_100uM_ABA_Mutants_cDNA_P Parameter: Treatment Value: 100uM ABA vs. No Treatment
  misc_feature: MA Experiment ID: 20000086 Result: Up-regulated in Transcription
  misc_feature: MA Experiment 20000086 PARAMETER Experiment Name: At_100uM_ABA_Mutants_cDNA_P Parameter: Plant Line Value: CS22
  misc_feature: MA Experiment 20000086 PARAMETER Experiment Name: At_100uM_ABA_Mutants_cDNA_P Parameter: Timepoint (hr) Value: 6
  misc_feature: MA Experiment 20000086 PARAMETER Experiment Name: At_100uM_ABA_Mutants_cDNA_P Parameter: Tissue Value: Aerial
  misc_feature: MA Experiment 20000086 PARAMETER Experiment Name: At_100uM_ABA_Mutants_cDNA_P Parameter: Treatment Value: 100uM ABA vs. No Treatment
  misc_feature: MA Experiment ID: 20000087 Result: Up-regulated in Transcription
  misc_feature: MA Experiment 20000087 PARAMETER Experiment Name: At_100uM_ABA_Mutants_cDNA_P Parameter: Plant Line Value: WS
  misc_feature: MA Experiment 20000087 PARAMETER Experiment Name: At_100uM_ABA_Mutants_cDNA_P Parameter: Timepoint (hr) Value: 6
  misc_feature: MA Experiment 20000087 PARAMETER Experiment Name: At_100uM_ABA_Mutants_cDNA_P Parameter: Tissue Value: Aerial
  misc_feature: MA Experiment 20000087 PARAMETER Experiment Name: At_100uM_ABA_Mutants_cDNA_P Parameter: Treatment Value: 100uM ABA vs. No Treatment
  misc_feature: MA Experiment ID: 20000088 Result: Up-regulated in Transcription
  misc_feature: MA Experiment 20000088 PARAMETER Experiment Name: At_100uM_ABA_Mutants_cDNA_P Parameter: Plant Line Value: Landsberg
  misc_feature: MA Experiment 20000088 PARAMETER Experiment Name: At_100uM_ABA_Mutants_cDNA_P Parameter: Timepoint (hr) Value: 6
  misc_feature: MA Experiment 20000088 PARAMETER Experiment Name: At_100uM_ABA_Mutants_cDNA_P Parameter: Tissue Value: Aerial
  misc_feature: MA Experiment 20000088 PARAMETER Experiment Name: At_100uM_ABA_Mutants_cDNA_P Parameter: Treatment Value: 100uM ABA vs. No Treatment
  misc_feature: MA Experiment ID: 20000090 Result: Up-regulated in Transcription
  misc_feature: MA Experiment ID: 20000111 Result: Down-regulated in Transcription
  misc_feature: MA Experiment 20000111 PARAMETER Experiment Name: At_42deg_Heat_cDNA_P Parameter: Temperature (deg C) Value: 42 vs. 22
  misc_feature: MA Experiment 20000111 PARAMETER Experiment Name: At_42deg_Heat_cDNA_P Parameter: Timepoint (hr) Value: 6
  misc_feature: MA Experiment 20000111 PARAMETER Experiment Name: At_42deg_Heat_cDNA_P Parameter: Tissue Value: Aerial
  misc_feature: MA Experiment ID: 20000113 Result: Down-regulated in Transcription
  misc_feature: MA Experiment 20000113 PARAMETER Experiment Name: At_42deg_Heat_cDNA_P Parameter: Temperature (deg C) Value: 42 vs. 22
  misc_feature: MA Experiment 20000113 PARAMETER Experiment Name: At_42deg_Heat_cDNA_P Parameter: Timepoint (hr) Value: 8
  misc_feature: MA Experiment 20000113 PARAMETER Experiment Name: At_42deg_Heat_cDNA_P Parameter: Tissue Value: Aerial
  misc_feature: MA Experiment ID: 20000117 Result: Up-regulated in Transcription
  misc_feature: MA Experiment 20000117 PARAMETER Experiment Name: At_100uM_ABA_Mutants_cDNA_P Parameter: Plant Line Value: Columbia
  misc_feature: MA Experiment 20000117 PARAMETER Experiment Name: At_100uM_ABA_Mutants_cDNA_P Parameter: Timepoint (hr) Value: 6
  misc_feature: MA Experiment 20000117 PARAMETER Experiment Name: At_100uM_ABA_Mutants_cDNA_P Parameter: Tissue Value: Aerial
  misc_feature: MA Experiment 20000117 PARAMETER Experiment Name: At_100uM_ABA_Mutants_cDNA_P Parameter: Treatment Value: 100uM ABA vs. No Treatment
  misc_feature: MA Experiment ID: 20000144 Result: Down-regulated in Transcription
  misc_feature: MA Experiment 20000144 PARAMETER Experiment Name: At_42deg_Heat_cDNA_P Parameter: Temperature (deg C) Value: 42 vs. 22
  misc_feature: MA Experiment 20000144 PARAMETER Experiment Name: At_42deg_Heat_cDNA_P Parameter: Timepoint (hr) Value: 1
  misc_feature: MA Experiment 20000144 PARAMETER Experiment Name: At_42deg_Heat_cDNA_P Parameter: Tissue Value: Aerial
  misc_feature: MA Experiment ID: 20000166 Result: Up-regulated in Transcription
  misc_feature: MA Experiment 20000166 PARAMETER Experiment Name: At_100uM_ABA_P Parameter: Age (day) Value: 14
  misc_feature: MA Experiment 20000166 PARAMETER Experiment Name: At_100uM_ABA_P Parameter: Organism Value: A. thaliana
  misc_feature: MA Experiment 20000166 PARAMETER Experiment Name: At_100uM_ABA_P Parameter: Plant Line Value: WS
  misc_feature: MA Experiment 20000166 PARAMETER Experiment Name: At_100uM_ABA_P Parameter: Timepoint (hr) Value: 1
  misc_feature: MA Experiment 20000166 PARAMETER Experiment Name: At_100uM_ABA_P Parameter: Tissue Value: Aerial
  misc_feature: MA Experiment 20000166 PARAMETER Experiment Name: At_100uM_ABA_P Parameter: Treatment Value: 100uM ABA vs. No Treatment
  misc_feature: MA Experiment ID: 20000169 Result: Up-regulated in Transcription
  misc_feature: MA Experiment 20000169 PARAMETER Experiment Name: At_100uM_ABA_P Parameter: Age (day) Value: 14
  misc_feature: MA Experiment 20000169 PARAMETER Experiment Name: At_100uM_ABA_P Parameter: Organism Value: A. thaliana
  misc_feature: MA Experiment 20000169 PARAMETER Experiment Name: At_100uM_ABA_P Parameter: Plant Line Value: WS
  misc_feature: MA Experiment 20000169 PARAMETER Experiment Name: At_100uM_ABA_P Parameter: Timepoint (hr) Value: 6
  misc_feature: MA Experiment 20000169 PARAMETER Experiment Name: At_100uM_ABA_P Parameter: Tissue Value: Aerial
  misc_feature: MA Experiment 20000169 PARAMETER Experiment Name: At_100uM_ABA_P Parameter: Treatment Value: 100uM ABA vs. No Treatment
  misc_feature: MA Experiment ID: 20000171 Result: Down-regulated in Transcription
  misc_feature: MA Experiment 20000171 PARAMETER Experiment Name: At_42deg_Heat_P Parameter: Age (day) Value: 14
  misc_feature: MA Experiment 20000171 PARAMETER Experiment Name: At_42deg_Heat_P Parameter: Organism Value: A. thaliana
  misc_feature: MA Experiment 20000171 PARAMETER Experiment Name: At_42deg_Heat_P Parameter: Plant Line Value: WS
  misc_feature: MA Experiment 20000171 PARAMETER Experiment Name: At_42deg_Heat_P Parameter: Temperature (deg C) Value: 42 vs. 22
  misc_feature: MA Experiment 20000171 PARAMETER Experiment Name: At_42deg_Heat_P Parameter: Timepoint (hr) Value: 1
  misc_feature: MA Experiment 20000171 PARAMETER Experiment Name: At_42deg_Heat_P Parameter: Tissue Value: Aerial
  misc_feature: MA Experiment ID: 20000173 Result: Down-regulated in Transcription
  misc_feature: MA Experiment 20000173 PARAMETER Experiment Name: At_42deg_Heat_P Parameter: Age (day) Value: 14
  misc_feature: MA Experiment 20000173 PARAMETER Experiment Name: At_42deg_Heat_P Parameter: Organism Value: A. thaliana
  misc_feature: MA Experiment 20000173 PARAMETER Experiment Name: At_42deg_Heat_P Parameter: Plant Line Value: WS
  misc_feature: MA Experiment 20000173 PARAMETER Experiment Name: At_42deg_Heat_P Parameter: Temperature (deg C) Value: 42 vs. 22
  misc_feature: MA Experiment 20000173 PARAMETER Experiment Name: At_42deg_Heat_P Parameter: Timepoint (hr) Value: 6
  misc_feature: MA Experiment 20000173 PARAMETER Experiment Name: At_42deg_Heat_P Parameter: Tissue Value: Aerial
  misc_feature: MA Experiment ID: 20000182 Result: Up-regulated in Transcription
  misc_feature: MA Experiment 20000182 PARAMETER Experiment Name: At_2mM_SA_P Parameter: Age (day) Value: 14
  misc_feature: MA Experiment 20000182 PARAMETER Experiment Name: At_2mM_SA_P Parameter: Organism Value: A. thaliana
  misc_feature: MA Experiment 20000182 PARAMETER Experiment Name: At_2mM_SA_P Parameter: Plant Line Value: WS
  misc_feature: MA Experiment 20000182 PARAMETER Experiment Name: At_2mM_SA_P Parameter: Timepoint (hr) Value: 6
  misc_feature: MA Experiment 20000182 PARAMETER Experiment Name: At_2mM_SA_P Parameter: Tissue Value: Aerial
  misc_feature: MA Experiment 20000182 PARAMETER Experiment Name: At_2mM_SA_P Parameter: Treatment Value: 2mM SA vs. No Treatment
  misc_feature: MA Experiment ID: 20000185 Result: Up-regulated in Transcription
  misc_feature: MA Experiment 20000185 PARAMETER Experiment Name: At_Roots__P Parameter: Age (day) Value: 7 vs. 21
  misc_feature: MA Experiment 20000185 PARAMETER Experiment Name: At_Roots__P Parameter: Organism Value: A. thaliana
  misc_feature: MA Experiment 20000185 PARAMETER Experiment Name: At_Roots__P Parameter: Tissue Value: Roots vs. Whole Plant
  misc_feature: MA Experiment ID: 20000224 Result: Up-regulated in Transcription
  misc_feature: MA Experiment ID: 20000234 Result: Down-regulated in Transcription
  misc_feature: MA Experiment 20000234 PARAMETER Experiment Name: At_Siliques_P Parameter: Age (day) Value: 21
  misc_feature: MA Experiment 20000234 PARAMETER Experiment Name: At_Siliques_P Parameter: Organism Value: A. thaliana
  misc_feature: MA Experiment 20000234 PARAMETER Experiment Name: At_Siliques_P Parameter: Plant Line Value: WS
  misc_feature: MA Experiment 20000234 PARAMETER Experiment Name: At_Siliques_P Parameter: Tissue Value: Less Than 5mm Siliques vs. Whole Plant
  misc_feature: MA Experiment ID: 20000235 Result: Down-regulated in Transcription
  misc_feature: MA Experiment 20000235 PARAMETER Experiment Name: At_Siliques_P Parameter: Age (day) Value: 21
  misc_feature: MA Experiment 20000235 PARAMETER Experiment Name: At_Siliques_P Parameter: Organism Value: A. thaliana
  misc_feature: MA Experiment 20000235 PARAMETER Experiment Name: At_Siliques_P Parameter: Plant Line Value: WS
  misc_feature: MA Experiment 20000235 PARAMETER Experiment Name: At_Siliques_P Parameter: Tissue Value: 5-10mm Siliques vs. Whole Plant
  misc_feature: MA Experiment ID: 20000264 Result: Down-regulated in Transcription
  misc_feature: MA Experiment 20000264 PARAMETER Experiment Name: At_Open_Flower_P Parameter: Age (day) Value: 21
  misc_feature: MA Experiment 20000264 PARAMETER Experiment Name: At_Open_Flower_P Parameter: Plant Line Value: WS
  misc_feature: MA Experiment 20000264 PARAMETER Experiment Name: At_Open_Flower_P Parameter: Tissue Value: Open Flower vs. Whole Plant
  misc_feature: MA Experiment ID: 20000265 Result: Down-regulated in Transcription
  misc_feature: MA Experiment 20000265 PARAMETER Experiment Name: At_Open_Flower_P Parameter: Age (day) Value: 21
  misc_feature: MA Experiment 20000265 PARAMETER Experiment Name: At_Open_Flower_P Parameter: Plant Line Value: WS
  misc_feature: MA Experiment 20000265 PARAMETER Experiment Name: At_Open_Flower_P Parameter: Tissue Value: Closed Flower vs. Whole Plant
  misc_feature: MA Experiment ID: 20000267 Result: Up-regulated in Transcription
  misc_feature: MA Experiment 20000267 PARAMETER Experiment Name: At_Drought_P Parameter: Age (day) Value: 7
  misc_feature: MA Experiment 20000267 PARAMETER Experiment Name: At_Drought_P Parameter: Organism Value: A. thaliana
  misc_feature: MA Experiment 20000267 PARAMETER Experiment Name: At_Drought_P Parameter: Plant Line Value: WS
  misc_feature: MA Experiment 20000267 PARAMETER Experiment Name: At_Drought_P Parameter: Timepoint (hr) Value: 6
  misc_feature: MA Experiment 20000267 PARAMETER Experiment Name: At_Drought_P Parameter: Tissue Value: Whole Plant
  misc_feature: MA Experiment 20000267 PARAMETER Experiment Name: At_Drought_P Parameter: Treatment Value: Drought vs. No Drought
  misc_feature: MA Experiment ID: 20000286 Result: Down-regulated in Transcription
  misc_feature: MA Experiment 20000286 PARAMETER Experiment Name: At_Open_Flower_P Parameter: Age (day) Value: 21
  misc_feature: MA Experiment 20000286 PARAMETER Experiment Name: At_Open_Flower_P Parameter: Plant Line Value: WS
  misc_feature: MA Experiment 20000286 PARAMETER Experiment Name: At_Open_Flower_P Parameter: Tissue Value: Half Open vs. Whole Plant
  misc_feature: MA Experiment ID: 20000436 Result: Up-regulated in Transcription
  misc_feature: MA Experiment 20000436 PARAMETER Experiment Name: At_Drought_P Parameter: Age (day) Value: 7
  misc_feature: MA Experiment 20000436 PARAMETER Experiment Name: At_Drought_P Parameter: Organism Value: A. thaliana
  misc_feature: MA Experiment 20000436 PARAMETER Experiment Name: At_Drought_P Parameter: Plant Line Value: WS
  misc_feature: MA Experiment 20000436 PARAMETER Experiment Name: At_Drought_P Parameter: Timepoint (hr) Value: 12
  misc_feature: MA Experiment 20000436 PARAMETER Experiment Name: At_Drought_P Parameter: Tissue Value: Whole Plant
  misc_feature: MA Experiment 20000436 PARAMETER Experiment Name: At_Drought_P Parameter: Treatment Value: Drought vs. No Drought
  misc_feature: MA Experiment ID: 20000438 Result: Down-regulated in Transcription
  misc_feature: MA Experiment 20000438 PARAMETER Experiment Name: At_Shoots__P Parameter: Age (day) Value: 14
  misc_feature: MA Experiment 20000438 PARAMETER Experiment Name: At_Shoots__P Parameter: Tissue Value: Shoots vs. Whole Plant
  misc_feature: MA Experiment ID: 20000439 Result: Up-regulated in Transcription
  misc_feature: MA Experiment 20000439 PARAMETER Experiment Name: At_Roots__P Parameter: Age (day) Value: 14 vs. 21
  misc_feature: MA Experiment 20000439 PARAMETER Experiment Name: At_Roots__P Parameter: Organism Value: A. thaliana
  misc_feature: MA Experiment 20000439 PARAMETER Experiment Name: At_Roots__P Parameter: Tissue Value: Roots vs. Whole Plant
  misc_feature: MA Experiment ID: 20000453 Result: Up-regulated in Transcription
  misc_feature: MA Experiment 20000453 PARAMETER Experiment Name: At_100uM_ABA_P Parameter: Age (day) Value: 15
  misc_feature: MA Experiment 20000453 PARAMETER Experiment Name: At_100uM_ABA_P Parameter: Organism Value: A. thaliana
  misc_feature: MA Experiment 20000453 PARAMETER Experiment Name: At_100uM_ABA_P Parameter: Plant Line Value: WS
  misc_feature: MA Experiment 20000453 PARAMETER Experiment Name: At_100uM_ABA_P Parameter: Timepoint (hr) Value: 24
  misc_feature: MA Experiment 20000453 PARAMETER Experiment Name: At_100uM_ABA_P Parameter: Tissue Value: Aerial
  misc_feature: MA Experiment 20000453 PARAMETER Experiment Name: At_100uM_ABA_P Parameter: Treatment Value: 100uM ABA vs. No Treatment
  misc_feature: MA Experiment ID: 20000455 Result: Up-regulated in Transcription
  misc_feature: MA Experiment 20000455 PARAMETER Experiment Name: At_100uM_ABA_P Parameter: Age (day) Value: 16
  misc_feature: MA Experiment 20000455 PARAMETER Experiment Name: At_100uM_ABA_P Parameter: Organism Value: A. thaliana
  misc_feature: MA Experiment 20000455 PARAMETER Experiment Name: At_100uM_ABA_P Parameter: Plant Line Value: WS
  misc_feature: MA Experiment 20000455 PARAMETER Experiment Name: At_100uM_ABA_P Parameter: Timepoint (hr) Value: 48
  misc_feature: MA Experiment 20000455 PARAMETER Experiment Name: At_100uM_ABA_P Parameter: Tissue Value: Aerial
  misc_feature: MA Experiment 20000455 PARAMETER Experiment Name: At_100uM_ABA_P Parameter: Treatment Value: 100uM ABA vs. No Treatment
  misc_feature: MA Experiment ID: 20000506 Result: Up-regulated in Transcription
  misc_feature: MA Experiment 20000506 PARAMETER Experiment Name: At_Wounding_P Parameter: Organism Value: A. thaliana
  misc_feature: MA Experiment 20000506 PARAMETER Experiment Name: At_Wounding_P Parameter: Plant Line Value: WS
  misc_feature: MA Experiment 20000506 PARAMETER Experiment Name: At_Wounding_P Parameter: Timepoint (hr) Value: 6
  misc_feature: MA Experiment 20000506 PARAMETER Experiment Name: At_Wounding_P Parameter: Tissue Value: Aerial
  misc_feature: MA Experiment 20000506 PARAMETER Experiment Name: At_Wounding_P Parameter: Treatment Value: Wounding vs. No Wounding
  misc_feature: MA Experiment ID: 20000527 Result: Down-regulated in Transcription
  misc_feature: MA Experiment 20000527 PARAMETER Experiment Name: At_10percent_PEG_P Parameter: Age (day) Value: 20
  misc_feature: MA Experiment 20000527 PARAMETER Experiment Name: At_10percent_PEG_P Parameter: Organism Value: A. thaliana
  misc_feature: MA Experiment 20000527 PARAMETER Experiment Name: At_10percent_PEG_P Parameter: Plant Line Value: WS
  misc_feature: MA Experiment 20000527 PARAMETER Experiment Name: At_10percent_PEG_P Parameter: Timepoint (day) Value: 20
  misc_feature: MA Experiment 20000527 PARAMETER Experiment Name: At_10percent_PEG_P Parameter: Tissue Value: Whole Plant
  misc_feature: MA Experiment 20000527 PARAMETER Experiment Name: At_10percent_PEG_P Parameter: Treatment Value: 10percent PEG vs. No Treatment
  misc_feature: MA Experiment ID: 20000709 Result: Down-regulated in Transcription
  misc_feature: MA Experiment 20000709 PARAMETER Experiment Name: At_15mM_NH4NO3_L-to-H_P Parameter: Age (hr) Value: 14
  misc_feature: MA Experiment 20000709 PARAMETER Experiment Name: At_15mM_NH4NO3_L-to-H_P Parameter: Organism Value: A. thaliana
  misc_feature: MA Experiment 20000709 PARAMETER Experiment Name: At_15mM_NH4NO3_L-to-H_P Parameter: Plant Line Value: WS
  misc_feature: MA Experiment 20000709 PARAMETER Experiment Name: At_15mM_NH4NO3_L-to-H_P Parameter: Timepoint (hr) Value: 4
  misc_feature: MA Experiment 20000709 PARAMETER Experiment Name: At_15mM_NH4NO3_L-to-H_P Parameter: Tissue Value: Aerial
  misc_feature: MA Experiment 20000709 PARAMETER Experiment Name: At_15mM_NH4NO3_L-to-H_P Parameter: Treatment Value: 15mM NH4NO3 vs. 30mM Mannitol
  misc_feature: MA Experiment ID: 20000794 Result: Down-regulated in Transcription
  misc_feature: MA Experiment 20000794 PARAMETER Experiment Name: At_Petals_P Parameter: Age (day) Value: 23-25 days
  misc_feature: MA Experiment 20000794 PARAMETER Experiment Name: At_Petals_P Parameter: Plant Line Value: WS
  misc_feature: MA Experiment 20000794 PARAMETER Experiment Name: At_Petals_P Parameter: Tissue Value: Petals vs. Whole plant
  misc_feature: MA Experiment ID: 20001450 Result: Down-regulated in Transcription
  misc_feature: MA Experiment 20001450 PARAMETER Experiment Name: At_Far-red-induction_P Parameter: Age (day) Value: 7
  misc_feature: MA Experiment 20001450 PARAMETER Experiment Name: At_Far-red-induction_P Parameter: Light Value: Far-red vs. White
  misc_feature: MA Experiment 20001450 PARAMETER Experiment Name: At_Far-red-induction_P Parameter: Organism Value: A. thaliana
  misc_feature: MA Experiment 20001450 PARAMETER Experiment Name: At_Far-red-induction_P Parameter: Plant Line Value: Columbia
  misc_feature: MA Experiment 20001450 PARAMETER Experiment Name: At_Far-red-induction_P Parameter: Timepoint (hr) Value: 8
  misc_feature: MA Experiment 20001450 PARAMETER Experiment Name: At_Far-red-induction_P Parameter: Tissue Value: Whole Plant
  misc_feature: MA Experiment ID: 20001554 Result: Up-regulated in Transcription
  misc_feature: MA Experiment 20001554 PARAMETER Experiment Name: At_Drought_Soil_Dry_P Parameter: Age (day) Value: 21
  misc_feature: MA Experiment 20001554 PARAMETER Experiment Name: At_Drought_Soil_Dry_P Parameter: Organism Value: A. thaliana
  misc_feature: MA Experiment 20001554 PARAMETER Experiment Name: At_Drought_Soil_Dry_P Parameter: Plant Line Value: WS
  misc_feature: MA Experiment 20001554 PARAMETER Experiment Name: At_Drought_Soil_Dry_P Parameter: Post Timepoint (hr) Value: None
  misc_feature: MA Experiment 20001554 PARAMETER Experiment Name: At_Drought_Soil_Dry_P Parameter: Post-Treatment Value: None
  misc_feature: MA Experiment 20001554 PARAMETER Experiment Name: At_Drought_Soil_Dry_P Parameter: Timepoint (day) Value: 7
  misc_feature: MA Experiment 20001554 PARAMETER Experiment Name: At_Drought_Soil_Dry_P Parameter: Treatment Value: Drought vs. No Drought
  misc_feature: MA Experiment ID: 20001761 Result: Down-regulated in Transcription
  misc_feature: MA Experiment 20001761 PARAMETER Experiment Name: At_50mM_NH4NO3_L-to-H_P Parameter: Timepoint (hr) Value: 4
  misc_feature: MA Experiment 20001761 PARAMETER Experiment Name: At_50mM_NH4NO3_L-to-H_P Parameter: Tissue Value: Siliques
  misc_feature: MA Experiment 20001761 PARAMETER Experiment Name: At_50mM_NH4NO3_L-to-H_P Parameter: Treatment Value: 50mM NH4NO3 vs 100mM Mannitol
  misc_feature: MA Experiment ID: 20001773 Result: Down-regulated in Transcription
  misc_feature: MA Experiment 20001773 PARAMETER Experiment Name: At_Far-red-enriched-adult_P Parameter: Age (day) Value: 30
  misc_feature: MA Experiment 20001773 PARAMETER Experiment Name: At_Far-red-enriched-adult_P Parameter: Light Value: Far-red enriched vs. White
  misc_feature: MA Experiment 20001773 PARAMETER Experiment Name: At_Far-red-enriched-adult_P Parameter: Organism Value: A. thaliana
  misc_feature: MA Experiment 20001773 PARAMETER Experiment Name: At_Far-red-enriched-adult_P Parameter: Plant Line Value: Columbia
  misc_feature: MA Experiment 20001773 PARAMETER Experiment Name: At_Far-red-enriched-adult_P Parameter: Timepoint (hr) Value: 48
  misc_feature: MA Experiment 20001773 PARAMETER Experiment Name: At_Far-red-enriched-adult_P Parameter: Tissue Value: Aerial
  misc_feature: MA Experiment ID: 20001904 Result: Up-regulated in Transcription
  misc_feature: MA Experiment 20001904 PARAMETER Experiment Name: At_Drought_Reproduction_P Parameter: Age (day) Value: 37
  misc_feature: MA Experiment 20001904 PARAMETER Experiment Name: At_Drought_Reproduction_P Parameter: Organism Value: A. thaliana
  misc_feature: MA Experiment 20001904 PARAMETER Experiment Name: At_Drought_Reproduction_P Parameter: Plant Line Value: WS
  misc_feature: MA Experiment 20001904 PARAMETER Experiment Name: At_Drought_Reproduction_P Parameter: Timepoint (day) Value: 7
  misc_feature: MA Experiment 20001904 PARAMETER Experiment Name: At_Drought_Reproduction_P Parameter: Tissue Value: Rosettes
  misc_feature: MA Experiment 20001904 PARAMETER Experiment Name: At_Drought_Reproduction_P Parameter: Treatment Value: Drought vs. No Drought
  misc_feature: MA Experiment ID: 20001905 Result: Up-regulated in Transcription
  misc_feature: MA Experiment 20001905 PARAMETER Experiment Name: At_Drought_Reproduction_P Parameter: Age (day) Value: 40
  misc_feature: MA Experiment 20001905 PARAMETER Experiment Name: At_Drought_Reproduction_P Parameter: Organism Value: A. thaliana
  misc_feature: MA Experiment 20001905 PARAMETER Experiment Name: At_Drought_Reproduction_P Parameter: Plant Line Value: WS
  misc_feature: MA Experiment 20001905 PARAMETER Experiment Name: At_Drought_Reproduction_P Parameter: Timepoint (day) Value: 10
  misc_feature: MA Experiment 20001905 PARAMETER Experiment Name: At_Drought_Reproduction_P Parameter: Tissue Value: Rosettes
  misc_feature: MA Experiment 20001905 PARAMETER Experiment Name: At_Drought_Reproduction_P Parameter: Treatment Value: Drought vs. No Drought
  misc_feature: MA Experiment ID: 20001906 Result: Up-regulated in Transcription
  misc_feature: MA Experiment 20001906 PARAMETER Experiment Name: At_Drought_Reproduction_P Parameter: Age (day) Value: 35
  misc_feature: MA Experiment 20001906 PARAMETER Experiment Name: At_Drought_Reproduction_P Parameter: Organism Value: A. thaliana
  misc_feature: MA Experiment 20001906 PARAMETER Experiment Name: At_Drought_Reproduction_P Parameter: Plant Line Value: WS
  misc_feature: MA Experiment 20001906 PARAMETER Experiment Name: At_Drought_Reproduction_P Parameter: Timepoint (day) Value: 5
  misc_feature: MA Experiment 20001906 PARAMETER Experiment Name: At_Drought_Reproduction_P Parameter: Tissue Value: Siliques
  misc_feature: MA Experiment 20001906 PARAMETER Experiment Name: At_Drought_Reproduction_P Parameter: Treatment Value: Drought vs. No Drought
  misc_feature: MA Experiment ID: 20001908 Result: Up-regulated in Transcription
  misc_feature: MA Experiment 20001908 PARAMETER Experiment Name: At_Drought_Reproduction_P Parameter: Age (day) Value: 40
  misc_feature: MA Experiment 20001908 PARAMETER Experiment Name: At_Drought_Reproduction_P Parameter: Organism Value: A. thaliana
  misc_feature: MA Experiment 20001908 PARAMETER Experiment Name: At_Drought_Reproduction_P Parameter: Plant Line Value: WS
  misc_feature: MA Experiment 20001908 PARAMETER Experiment Name: At_Drought_Reproduction_P Parameter: Timepoint (day) Value: 10
  misc_feature: MA Experiment 20001908 PARAMETER Experiment Name: At_Drought_Reproduction_P Parameter: Tissue Value: Siliques
  misc_feature: MA Experiment 20001908 PARAMETER Experiment Name: At_Drought_Reproduction_P Parameter: Treatment Value: Drought vs. No Drought
  misc_feature: MA Experiment ID: 20001910 Result: Up-regulated in Transcription
  misc_feature: MA Experiment 20001910 PARAMETER Experiment Name: At_Drought_Reproduction_P Parameter: Age (day) Value: 37
  misc_feature: MA Experiment 20001910 PARAMETER Experiment Name: At_Drought_Reproduction_P Parameter: Organism Value: A. thaliana
  misc_feature: MA Experiment 20001910 PARAMETER Experiment Name: At_Drought_Reproduction_P Parameter: Plant Line Value: WS
  misc_feature: MA Experiment 20001910 PARAMETER Experiment Name: At_Drought_Reproduction_P Parameter: Timepoint (day) Value: 7
  misc_feature: MA Experiment 20001910 PARAMETER Experiment Name: At_Drought_Reproduction_P Parameter: Tissue Value: Flowers
  misc_feature: MA Experiment 20001910 PARAMETER Experiment Name: At_Drought_Reproduction_P Parameter: Treatment Value: Drought vs. No Drought
  misc_feature: MA Experiment ID: 20001911 Result: Up-regulated in Transcription
  misc_feature: MA Experiment 20001911 PARAMETER Experiment Name: At_Drought_Reproduction_P Parameter: Age (day) Value: 40
  misc_feature: MA Experiment 20001911 PARAMETER Experiment Name: At_Drought_Reproduction_P Parameter: Organism Value: A. thaliana
  misc_feature: MA Experiment 20001911 PARAMETER Experiment Name: At_Drought_Reproduction_P Parameter: Plant Line Value: WS
  misc_feature: MA Experiment 20001911 PARAMETER Experiment Name: At_Drought_Reproduction_P Parameter: Timepoint (day) Value: 10
  misc_feature: MA Experiment 20001911 PARAMETER Experiment Name: At_Drought_Reproduction_P Parameter: Tissue Value: Flowers
  misc_feature: MA Experiment 20001911 PARAMETER Experiment Name: At_Drought_Reproduction_P Parameter: Treatment Value: Drought vs. No Drought
aatcaatcaacaaacataagaaaacaaactcaaaaggattcttcttcaaacacaacatctcaaggaaaacatgaaaatgggaatgggtttagtgttccttacagtttttatggctgagaagtcttctacaatggtctctgctcagtcaagctgcacaaacgcgttgattagcatgtcgccgtgtctcaactacataactggaaactctacctctcctaatcagcaatgctgtaatcagttgagtagagtagtccagtcttctcctgactgtttgtgtcaagtccttaacggtggaggctctcagcttgggatcaatattaaccaaacacaagctcttggtctgcctagggcttgtaatgttcagactcctcctgtcagtcgctgtaataccggtggtggtggtggtggttctacttctgactctcctgcagaatcaccaaactcttcaggaccaggtaatggatcgaaaaccgtaccagtaggagaaggagacggacccccatcgtctgatggaagctctatcaagttctcatttcctctcattgccttcttctccgcggtttcctacatggcaatcttctgagttactattttcccatacgcttttgtgccactcagattgcattctttatttgtccctatttattcacatttcgttgtgattttgtgtgatgtattttatgctctgtaaatccctactctccgggtgatattgctttgttgtaccaacggagagcattttggatctctttaccttttataataaacattactttccagaac

SEQ ID NO: 35482 - protein, 170 aa, Arabidopsis thaliana
  peptide (1)..(170): Ceres Seq. ID no. 12580495
  misc_feature (28)..(105): Pfam Name: Protease inhibitor/seed storage/LTP family Pfam Description: Protease inhibitor/seed storage/LTP family
  misc_feature (4)..(166): Homolog of NCBI NO: 25553595 NR Description: OJ1656_E11.26 [Oryza sativa (japonica
  misc_feature (23)..(143): Homolog of NCBI NO: 25553602 NR Description: OJ1656_E11.34 [Oryza sativa (japonica
  misc_feature (7)..(153): Homolog of NCBI NO: 18407534 NR Description: expressed protein
  misc_feature (7)..(153): Homolog of NCBI NO: 21592774 NR Description: unknown [Arabidopsis thaliana]
  misc_feature (23)..(169): Homolog of NCBI NO: 28269454 NR Description: putative protease inhibitor
  misc_feature (1)..(169): Homolog of NCBI NO: 18414320 NR Description: Expressed protein
  misc_feature (1)..(169): Homolog of NCBI NO: 21592722 NR Description: unknown [Arabidopsis thaliana]
  misc_feature (5)..(170): Homolog of NCBI NO: 21554014 NR Description: unknown [Arabidopsis thaliana]
  misc_feature (3)..(170): Homolog of NCBI NO: 24417478 NR Description: unknown [Arabidopsis thaliana]
  misc_feature (1)..(170): Homolog of NCBI NO: 18403453 NR Description: expressed protein
MKMGMGLVFLTVFMAEKSSTMVSAQSSCTNALISMSPCLNYITGNSTSPNQQCCNQLSRVVQSSPDCLCQVLNGGGSQLGININQTQALGLPRACNVQTPPVSRCNTGGGGGGSTSDSPAESPNSSGPGNGSKTVPVGEGDGPPSSDGSSIKFSFPLIAFFSAVSYMAIF

SEQ ID NO: 35483 - protein, 168 aa, Arabidopsis thaliana
  peptide (1)..(168): Ceres Seq. ID no. 12580496
  misc_feature (26)..(103): Pfam Name: Protease inhibitor/seed storage/LTP family Pfam Description: Protease inhibitor/seed storage/LTP family
  misc_feature (2)..(164): Homolog of NCBI NO: 25553595 NR Description: OJ1656_E11.26 [Oryza sativa (japonica
  misc_feature (21)..(141): Homolog of NCBI NO: 25553602 NR Description: OJ1656_E11.34 [Oryza sativa (japonica
  misc_feature (5)..(151): Homolog of NCBI NO: 18407534 NR Description: expressed protein
  misc_feature (5)..(151): Homolog of NCBI NO: 21592774 NR Description: unknown [Arabidopsis thaliana]
  misc_feature (21)..(167): Homolog of NCBI NO: 28269454 NR Description: putative protease inhibitor
  misc_feature (1)..(167): Homolog of NCBI NO: 18414320 NR Description: Expressed protein
  misc_feature (1)..(167): Homolog of NCBI NO: 21592722 NR Description: unknown [Arabidopsis thaliana]
  misc_feature (3)..(168): Homolog of NCBI NO: 21554014 NR Description: unknown [Arabidopsis thaliana]
  misc_feature (1)..(168): Homolog of NCBI NO: 24417478 NR Description: unknown [Arabidopsis thaliana]
  misc_feature (1)..(168): Homolog of NCBI NO: 18403453 NR Description: expressed protein
MGMGLVFLTVFMAEKSSTMVSAQSSCTNALISMSPCLNYITGNSTSPNQQCCNQLSRVVQSSPDCLCQVLNGGGSQLGININQTQALGLPRACNVQTPPVSRCNTGGGGGGSTSDSPAESPNSSGPGNGSKTVPVGEGDGPPSSDGSSIKFSFPLIAFFSAVSYMAIF

SEQ ID NO: 35484 - protein, 166 aa, Arabidopsis thaliana
  peptide (1)..(166): Ceres Seq. ID no. 12580497
  misc_feature (24)..(101): Pfam Name: Protease inhibitor/seed storage/LTP family Pfam Description: Protease inhibitor/seed storage/LTP family
  misc_feature (1)..(162): Homolog of NCBI NO: 25553595 NR Description: OJ1656_E11.26 [Oryza sativa (japonica
  misc_feature (19)..(139): Homolog of NCBI NO: 25553602 NR Description: OJ1656_E11.34 [Oryza sativa (japonica
  misc_feature (3)..(149): Homolog of NCBI NO: 18407534 NR Description: expressed protein
  misc_feature (3)..(149): Homolog of NCBI NO: 21592774 NR Description: unknown [Arabidopsis thaliana]
  misc_feature (19)..(165): Homolog of NCBI NO: 28269454 NR Description: putative protease inhibitor
  misc_feature (1)..(165): Homolog of NCBI NO: 18414320 NR Description: Expressed protein
  misc_feature (1)..(165): Homolog of NCBI NO: 21592722 NR Description: unknown [Arabidopsis thaliana]
  misc_feature (1)..(166): Homolog of NCBI NO: 21554014 NR Description: unknown [Arabidopsis thaliana]
  misc_feature (1)..(166): Homolog of NCBI NO: 24417478 NR Description: unknown [Arabidopsis thaliana]
  misc_feature (1)..(166): Homolog of NCBI NO: 18403453 NR Description: expressed protein
MGLVFLTVFMAEKSSTMVSAQSSCTNALISMSPCLNYITGNSTSPNQQCCNQLSRVVQSSPDCLCQVLNGGGSQLGININQTQALGLPRACNVQTPPVSRCNTGGGGGGSTSDSPAESPNSSGPGNGSKTVPVGEGDGPPSSDGSSIKFSFPLIAFFSAVSYMAIF

SEQ ID NO: 35485 - DNA, 1138 bp, Arabidopsis thaliana
  misc_feature (1)..(1138): Ceres Seq. ID no. 13492871
  misc_feature: MA Experiment ID: 20000235 Result: Down-regulated in Transcription
  misc_feature: MA Experiment 20000235 PARAMETER Experiment Name: At_Siliques_P Parameter: Age (day) Value: 21
  misc_feature: MA Experiment 20000235 PARAMETER Experiment Name: At_Siliques_P Parameter: Organism Value: A. thaliana
  misc_feature: MA Experiment 20000235 PARAMETER Experiment Name: At_Siliques_P Parameter: Plant Line Value: WS
  misc_feature: MA Experiment 20000235 PARAMETER Experiment Name: At_Siliques_P Parameter: Tissue Value: 5-10mm Siliques vs. Whole Plant
  misc_feature: MA Experiment ID: 20001248 Result: Up-regulated in Transcription
  misc_feature: MA Experiment 20001248 PARAMETER Experiment Name: At_Far-red-induction_P Parameter: Age (day) Value: 7
  misc_feature: MA Experiment 20001248 PARAMETER Experiment Name: At_Far-red-induction_P Parameter: Light Value: Far-red vs. White
  misc_feature: MA Experiment 20001248 PARAMETER Experiment Name: At_Far-red-induction_P Parameter: Organism Value: A. thaliana
  misc_feature: MA Experiment 20001248 PARAMETER Experiment Name: At_Far-red-induction_P Parameter: Plant Line Value: Columbia
  misc_feature: MA Experiment 20001248 PARAMETER Experiment Name: At_Far-red-induction_P Parameter: Timepoint (hr) Value: 4
  misc_feature: MA Experiment 20001248 PARAMETER Experiment Name: At_Far-red-induction_P Parameter: Tissue Value: Whole Plant
tcattcttcaaataaattaaaatcttcgttggcgttgttgttggttgcgttacagattttggactaatcattattttcgtgcctgcaaagtcagcacgacgatcgcgtttcgatcttcaaagtagaagaagacccgccacaatcacaaatcgcggtgcatatagtctaaagggtcaatggcctcttcttcggatccatggatgagagagtacaatgaggctttgaaactctctgaggatattaatggcatgatgtctgaaaggaatgcctccgggttaaccgggcctgatgctcaacgtcgtgcctctgcaattcgaagaaagatcaccattttggggactcgattagacagtctgcaatcccttcttgtcaaggttcctggcaagcagcatgtttcggagaaagagatgaatcgtcgcaaggatatggttgggaatttgagatcaaaaacaaatcaggtggcctctgctttgaatatgtcaaactttgcaaacagagacagcttgtttggaacagatttaaagccggatgatgcgataaatagagtctctggcatggacaaccaaggaattgttgtatttcaacggcaagttatgagagaacaagacgagggacttgagaagttggaggaaacagtcatgagtaccaaacacattgctctcgctgttaacgaggagctcaccctgcagacaaggcttattgatgacttagattacgatgtggatatcactgactctcgcttacggcgtgttcaaaagagccttgccttgatgaacaagagcatgaaaagtggttgctcatgcatgtctatgctcttgtctgtgcttggaatcgttggtcttgctcttgtaatttggctgctggttaagtacctgtaataatgccaatgtggtggcaacttgtgaaagctcatccttttctctcagcctatcctctgtgcttaatggttgttttctattccttctatcgattgattcgtgtctgtgaggcaaagaagaataccactgcgtgtaagaaaccctcagaagtacataatctgtattaccttcgtatcaaccacgaattgtaaactaagttgacatttgtctatatatggtatggctcctacttggttcaataaagagaactagtggcttgg

SEQ ID NO: 35486 - protein, 233 aa, Arabidopsis thaliana
  peptide (1)..(233): Ceres Seq. ID no. 13492872
  misc_feature (142)..(204): Pfam Name: SNARE domain Pfam Description: SNARE domain
  misc_feature (6)..(227): Homolog of NCBI NO: 9055356 NR Description: syntaxin 8; syntaxin-like protein 3I35 [Mus
  misc_feature (6)..(227): Homolog of NCBI NO: 13928908 NR Description: syntaxin 8; syntaxin-like protein 3I35 [Rattus
  misc_feature (1)..(196): Homolog of NCBI NO: 22329605 NR Description: hypothetical protein [Arabidopsis thaliana]
  misc_feature (1)..(175): Homolog of NCBI NO: 15219172 NR Description: hypothetical protein [Arabidopsis thaliana]
  misc_feature (1)..(232): Homolog of NCBI NO: 34902234 NR Description: Hypothetical protein [Oryza sativa (japonica
  misc_feature (1)..(233): Homolog of NCBI NO: 18394339 NR Description: syntaxin of plants 51 (SYP51) [Arabidopsis
  misc_feature (160)..(233): Homolog of NCBI NO: 25372945 NR Description: protein F20B17.2 [imported] - Arabidopsis
  misc_feature (1)..(175): Homolog of NCBI NO: 25372945 NR Description: protein F20B17.2 [imported] - Arabidopsis
  misc_feature (1)..(233): Homolog of NCBI NO: 21592406 NR Description: unknown [Arabidopsis thaliana]
  misc_feature (1)..(233): Homolog of NCBI NO: 18412435 NR Description: syntaxin of plants 52 (SYP52) [Arabidopsis
MASSSDPWMREYNEALKLSEDINGMMSERNASGLTGPDAQRRASAIRRKITILGTRLDSLQSLLVKVPGKQHVSEKEMNRRKDMVGNLRSKTNQVASALNMSNFANRDSLFGTDLKPDDAINRVSGMDNQGIVVFQRQVMREQDEGLEKLEETVMSTKHIALAVNEELTLQTRLIDDLDYDVDITDSRLRRVQKSLALMNKSMKSGCSCMSMLLSVLGIVGLALVIWLLVKYL

SEQ ID NO: 35487 - protein, 225 aa, Arabidopsis thaliana
  peptide (1)..(225): Ceres Seq. ID no. 13492873
  misc_feature (134)..(196): Pfam Name: SNARE domain Pfam Description: SNARE domain
  misc_feature (1)..(219): Homolog of NCBI NO: 9055356 NR Description: syntaxin 8; syntaxin-like protein 3I35 [Mus
  misc_feature (1)..(219): Homolog of NCBI NO: 13928908 NR Description: syntaxin 8; syntaxin-like protein 3I35 [Rattus
  misc_feature (1)..(188): Homolog of NCBI NO: 22329605 NR Description: hypothetical protein [Arabidopsis thaliana]
  misc_feature (1)..(167): Homolog of NCBI NO: 15219172 NR Description: hypothetical protein [Arabidopsis thaliana]
  misc_feature (1)..(224): Homolog of NCBI NO: 34902234 NR Description: Hypothetical protein [Oryza sativa (japonica
  misc_feature (1)..(225): Homolog of NCBI NO: 18394339 NR Description: syntaxin of plants 51 (SYP51) [Arabidopsis
  misc_feature (152)..(225): Homolog of NCBI NO: 25372945 NR Description: protein F20B17.2 [imported] - Arabidopsis
  misc_feature (1)..(167): Homolog of NCBI NO: 25372945 NR Description: protein F20B17.2 [imported] - Arabidopsis
  misc_feature (1)..(225): Homolog of NCBI NO: 21592406 NR Description: unknown [Arabidopsis thaliana]
  misc_feature (1)..(225): Homolog of NCBI NO: 18412435 NR Description: syntaxin of plants 52 (SYP52) [Arabidopsis
MREYNEALKLSEDINGMMSERNASGLTGPDAQRRASAIRRKITILGTRLDSLQSLLVKVPGKQHVSEKEMNRRKDMVGNLRSKTNQVASALNMSNFANRDSLFGTDLKPDDAINRVSGMDNQGIVVFQRQVMREQDEGLEKLEETVMSTKHIALAVNEELTLQTRLIDDLDYDVDITDSRLRRVQKSLALMNKSMKSGCSCMSMLLSVLGIVGLALVIWLLVKYL

SEQ ID NO: 35488 - protein, 209 aa, Arabidopsis thaliana
  peptide (1)..(209): Ceres Seq. ID no. 13492874
  misc_feature (118)..(180): Pfam Name: SNARE domain Pfam Description: SNARE domain
  misc_feature (1)..(203): Homolog of NCBI NO: 9055356 NR Description: syntaxin 8; syntaxin-like protein 3I35 [Mus
  misc_feature (1)..(203): Homolog of NCBI NO: 13928908 NR Description: syntaxin 8; syntaxin-like protein 3I35 [Rattus
  misc_feature (1)..(172): Homolog of NCBI NO: 22329605 NR Description: hypothetical protein [Arabidopsis thaliana]
  misc_feature (1)..(151): Homolog of NCBI NO: 15219172 NR Description: hypothetical protein [Arabidopsis thaliana]
  misc_feature (1)..(208): Homolog of NCBI NO: 34902234 NR Description: Hypothetical protein [Oryza sativa (japonica
  misc_feature (1)..(209): Homolog of NCBI NO: 18394339 NR Description: syntaxin of plants 51 (SYP51) [Arabidopsis
  misc_feature (136)..(209): Homolog of NCBI NO: 25372945 NR Description: protein F20B17.2 [imported] - Arabidopsis
  misc_feature (1)..(151): Homolog of NCBI NO: 25372945 NR Description: protein F20B17.2 [imported] - Arabidopsis
  misc_feature (1)..(209): Homolog of NCBI NO: 21592406 NR Description: unknown [Arabidopsis thaliana]
  misc_feature (1)..(209): Homolog of NCBI NO: 18412435 NR Description: syntaxin of plants 52 (SYP52) [Arabidopsis
MMSERNASGLTGPDAQRRASAIRRKITILGTRLDSLQSLLVKVPGKQHVSEKEMNRRKDMVGNLRSKTNQVASALNMSNFANRDSLFGTDLKPDDAINRVSGMDNQGIVVFQRQVMREQDEGLEKLEETVMSTKHIALAVNEELTLQTRLIDDLDYDVDITDSRLRRVQKSLALMNKSMKSGCSCMSMLLSVLGIVGLALVIWLLVKYL

SEQ ID NO: 35489 - DNA, 872 bp, Arabidopsis thaliana
  misc_feature (1)..(872): Ceres Seq. ID no. 12327663
  misc_feature: MA Experiment ID: 108434 Result: Up-regulated in Transcription
  misc_feature: MA Experiment 108434 PARAMETER Experiment Name: At_Root_Tips_cDNA_P Parameter: Tissue Value: Root Tips
  misc_feature: MA Experiment ID: 108462 Result: Down-regulated in Transcription
  misc_feature: MA Experiment 108462 PARAMETER Experiment Name: At_Germinating_Seeds_cDNA_P Parameter: Age (day) Value: 2 vs. 0
  misc_feature: MA Experiment 108462 PARAMETER Experiment Name: At_Germinating_Seeds_cDNA_P Parameter: Tissue Value: Germinating Seeds
  misc_feature: MA Experiment ID: 108463 Result: Down-regulated in Transcription
  misc_feature: MA Experiment 108463 PARAMETER Experiment Name: At_Germinating_Seeds_cDNA_P Parameter: Age (day) Value: 3 vs. 0
  misc_feature: MA Experiment 108463 PARAMETER Experiment Name: At_Germinating_Seeds_cDNA_P Parameter: Tissue Value: Germinating Seeds
  misc_feature: MA Experiment ID: 108464 Result: Down-regulated in Transcription
  misc_feature: MA Experiment 108464 PARAMETER Experiment Name: At_Germinating_Seeds_cDNA_P Parameter: Age (day) Value: 4 vs. 0
  misc_feature: MA Experiment 108464 PARAMETER Experiment Name: At_Germinating_Seeds_cDNA_P Parameter: Tissue Value: Germinating Seeds
  misc_feature: MA Experiment ID: 108489 Result: Up-regulated in Transcription
  misc_feature: MA Experiment ID: 108561 Result: Down-regulated in Transcription
  misc_feature: MA Experiment 108561 PARAMETER Experiment Name: At_100uM_ABA_cDNA_P Parameter: Timepoint (hr) Value: 6
  misc_feature: MA Experiment 108561 PARAMETER Experiment Name: At_100uM_ABA_cDNA_P Parameter: Tissue Value: Aerial
  misc_feature: MA Experiment 108561 PARAMETER Experiment Name: At_100uM_ABA_cDNA_P Parameter: Treatment Value: 100uM ABA vs. No Treatment
  misc_feature: MA Experiment ID: 108573 Result: Down-regulated in Transcription
  misc_feature: MA Experiment 108573 PARAMETER Experiment Name: At_Drought_cDNA_P Parameter: Timepoint (hr) Value: 6
  misc_feature: MA Experiment 108573 PARAMETER Experiment Name: At_Drought_cDNA_P Parameter: Tissue Value: Aerial
  misc_feature: MA Experiment 108573 PARAMETER Experiment Name: At_Drought_cDNA_P Parameter: Treatment Value: Drought vs. No Drought
  misc_feature: MA Experiment ID: 20000071 Result: Down-regulated in Transcription
  misc_feature: MA Experiment 20000071 PARAMETER Experiment Name: At_100uM_ABA_Mutants_cDNA_P Parameter: Plant Line Value: CS8104
  misc_feature: MA Experiment 20000071 PARAMETER Experiment Name: At_100uM_ABA_Mutants_cDNA_P Parameter: Timepoint (hr) Value: 6
  misc_feature: MA Experiment 20000071 PARAMETER Experiment Name: At_100uM_ABA_Mutants_cDNA_P Parameter: Tissue Value: Aerial
  misc_feature: MA Experiment 20000071 PARAMETER Experiment Name: At_100uM_ABA_Mutants_cDNA_P Parameter: Treatment Value: 100uM ABA vs. No Treatment
  misc_feature: MA Experiment ID: 20000087 Result: Down-regulated in Transcription
  misc_feature: MA Experiment 20000087 PARAMETER Experiment Name: At_100uM_ABA_Mutants_cDNA_P Parameter: Plant Line Value: WS
  misc_feature: MA Experiment 20000087 PARAMETER Experiment Name: At_100uM_ABA_Mutants_cDNA_P Parameter: Timepoint (hr) Value: 6
  misc_feature: MA Experiment 20000087 PARAMETER Experiment Name: At_100uM_ABA_Mutants_cDNA_P Parameter: Tissue Value: Aerial
  misc_feature: MA Experiment 20000087 PARAMETER Experiment Name: At_100uM_ABA_Mutants_cDNA_P Parameter: Treatment Value: 100uM ABA vs. No Treatment
  misc_feature: MA Experiment ID: 20000117 Result: Down-regulated in Transcription
  misc_feature: MA Experiment 20000117 PARAMETER Experiment Name: At_100uM_ABA_Mutants_cDNA_P Parameter: Plant Line Value: Columbia
  misc_feature: MA Experiment 20000117 PARAMETER Experiment Name: At_100uM_ABA_Mutants_cDNA_P Parameter: Timepoint (hr) Value: 6
  misc_feature: MA Experiment 20000117 PARAMETER Experiment Name: At_100uM_ABA_Mutants_cDNA_P Parameter: Tissue Value: Aerial
  misc_feature: MA Experiment 20000117 PARAMETER Experiment Name: At_100uM_ABA_Mutants_cDNA_P Parameter: Treatment Value: 100uM ABA vs. No Treatment
  misc_feature: MA Experiment ID: 20000180 Result: Down-regulated in Transcription
  misc_feature: MA Experiment 20000180 PARAMETER Experiment Name: At_Germinating_Seeds_P Parameter: Age (hr) Value: 24 vs. 0
  misc_feature: MA Experiment 20000180 PARAMETER Experiment Name: At_Germinating_Seeds_P Parameter: Tissue Value: Germinating Seeds
  misc_feature: MA Experiment ID: 20000234 Result: Up-regulated in Transcription
  misc_feature: MA Experiment 20000234 PARAMETER Experiment Name: At_Siliques_P Parameter: Age (day) Value: 21
  misc_feature: MA Experiment 20000234 PARAMETER Experiment Name: At_Siliques_P Parameter: Organism Value: A. thaliana
  misc_feature: MA Experiment 20000234 PARAMETER Experiment Name: At_Siliques_P Parameter: Plant Line Value: WS
  misc_feature: MA Experiment 20000234 PARAMETER Experiment Name: At_Siliques_P Parameter: Tissue Value: Less Than 5mm Siliques vs. Whole Plant
  misc_feature: MA Experiment ID: 20000264 Result: Up-regulated in Transcription
  misc_feature: MA Experiment 20000264 PARAMETER Experiment Name: At_Open_Flower_P Parameter: Age (day) Value: 21
  misc_feature: MA Experiment 20000264 PARAMETER Experiment Name: At_Open_Flower_P Parameter: Plant Line Value: WS
  misc_feature: MA Experiment 20000264 PARAMETER Experiment Name: At_Open_Flower_P Parameter: Tissue Value: Open Flower vs. Whole Plant
  misc_feature: MA Experiment ID: 20000437 Result: Down-regulated in Transcription
  misc_feature: MA Experiment 20000437 PARAMETER Experiment Name: At_Drought_P Parameter: Age (day) Value: 8
  misc_feature: MA Experiment 20000437 PARAMETER Experiment Name: At_Drought_P Parameter: Organism Value: A. thaliana
  misc_feature: MA Experiment 20000437 PARAMETER Experiment Name: At_Drought_P Parameter: Plant Line Value: WS
  misc_feature: MA Experiment 20000437 PARAMETER Experiment Name: At_Drought_P Parameter: Timepoint (hr) Value: 24
  misc_feature: MA Experiment 20000437 PARAMETER Experiment Name: At_Drought_P Parameter: Tissue Value: Whole Plant
  misc_feature: MA Experiment 20000437 PARAMETER Experiment Name: At_Drought_P Parameter: Treatment Value: Drought vs. No Drought
  misc_feature: MA Experiment ID: 20000496 Result: Up-regulated in Transcription
  misc_feature: MA Experiment 20000496 PARAMETER Experiment Name: At_Guard_Cells_P Parameter: Harvest Date Value: 7/19/2002
  misc_feature: MA Experiment 20000496 PARAMETER Experiment Name: At_Guard_Cells_P Parameter: Organism Value: Canola
  misc_feature: MA Experiment 20000496 PARAMETER Experiment Name: At_Guard_Cells_P Parameter: Tissue Value: Guard Cells vs. Leaves
  misc_feature: MA Experiment ID: 20000794 Result: Down-regulated in Transcription
  misc_feature: MA Experiment 20000794 PARAMETER Experiment Name: At_Petals_P Parameter: Age (day) Value: 23-25 days
  misc_feature: MA Experiment 20000794 PARAMETER Experiment Name: At_Petals_P Parameter: Plant Line Value: WS
  misc_feature: MA Experiment 20000794 PARAMETER Experiment Name: At_Petals_P Parameter: Tissue Value: Petals vs. Whole plant
  misc_feature: MA Experiment ID: 20001558 Result: Up-regulated in Transcription
  misc_feature: MA Experiment 20001558 PARAMETER Experiment Name: At_Drought_Soil_Dry_P Parameter: Age (day) Value: 27
  misc_feature: MA Experiment 20001558 PARAMETER Experiment Name: At_Drought_Soil_Dry_P Parameter: Organism Value: A. thaliana
  misc_feature: MA Experiment 20001558 PARAMETER Experiment Name: At_Drought_Soil_Dry_P Parameter: Plant Line Value: WS
  misc_feature: MA Experiment 20001558 PARAMETER Experiment Name: At_Drought_Soil_Dry_P Parameter: Post Timepoint (hr) Value: 6
  misc_feature: MA Experiment 20001558 PARAMETER Experiment Name: At_Drought_Soil_Dry_P Parameter: Post-Treatment Value: Re-Water vs. No Drought
  misc_feature: MA Experiment 20001558 PARAMETER Experiment Name: At_Drought_Soil_Dry_P Parameter: Timepoint (day) Value: 13
  misc_feature: MA Experiment 20001558 PARAMETER Experiment Name: At_Drought_Soil_Dry_P Parameter: Treatment Value: Drought vs. No Drought
  misc_feature: MA Experiment ID: 20001560 Result: Up-regulated in Transcription
  misc_feature: MA Experiment 20001560 PARAMETER Experiment Name: At_Drought_Soil_Dry_P Parameter: Age (day) Value: 28
  misc_feature: MA Experiment 20001560 PARAMETER Experiment Name: At_Drought_Soil_Dry_P Parameter: Organism Value: A. thaliana
  misc_feature: MA Experiment 20001560 PARAMETER Experiment Name: At_Drought_Soil_Dry_P Parameter: Plant Line Value: WS
  misc_feature: MA Experiment 20001560 PARAMETER Experiment Name: At_Drought_Soil_Dry_P Parameter: Post Timepoint (hr) Value: None
  misc_feature: MA Experiment 20001560 PARAMETER Experiment Name: At_Drought_Soil_Dry_P Parameter: Post-Treatment Value: None
  misc_feature: MA Experiment 20001560 PARAMETER Experiment Name: At_Drought_Soil_Dry_P Parameter: Timepoint (day) Value: 14
  misc_feature: MA Experiment 20001560 PARAMETER Experiment Name: At_Drought_Soil_Dry_P Parameter: Treatment Value: Drought vs. No Drought
  misc_feature: MA Experiment ID: 20001757 Result: Up-regulated in Transcription
  misc_feature: MA Experiment 20001757 PARAMETER Experiment Name: At_50mM_NH4NO3_L-to-H_P Parameter: Timepoint (hr) Value: 6
  misc_feature: MA Experiment 20001757 PARAMETER Experiment Name: At_50mM_NH4NO3_L-to-H_P Parameter: Tissue Value: Leaf
  misc_feature: MA Experiment 20001757 PARAMETER Experiment Name: At_50mM_NH4NO3_L-to-H_P Parameter: Treatment Value: 50mM NH4NO3 vs 100mM Mannitol
  misc_feature: Phenotype: WHOLE PLANT Size-Large
  misc_feature: Phenotype: WHOLE PLANT Size-Large
  misc_feature: Phenotype: WHOLE PLANT Size-Large
  misc_feature: Phenotype: WHOLE PLANT Size-Large
  misc_feature: Phenotype: ROSETTE LEAVES Shape-Serrate
  misc_feature: Phenotype: WHOLE PLANT Size-Small
  misc_feature: Phenotype: ROSETTE LEAVES Shape-Serrate
  misc_feature: Phenotype: WHOLE PLANT Size-Small
  misc_feature: Phenotype: ROSETTE LEAVES Shape-Serrate
  misc_feature: Phenotype: WHOLE PLANT Size-Small
  misc_feature: Phenotype: ROSETTE LEAVES Shape-Serrate
  misc_feature: Phenotype: WHOLE PLANT Size-Small
  misc_feature: Phenotype: ROSETTE LEAVES Shape-Serrate
  misc_feature: Phenotype: WHOLE PLANT Size-Small
  misc_feature: Phenotype: ROSETTE LEAVES Shape-Serrate
  misc_feature: Phenotype: WHOLE PLANT Size-Small
  misc_feature: Phenotype: ROSETTE LEAVES Shape-Serrate
  misc_feature: Phenotype: WHOLE PLANT Size-Small
  misc_feature: Phenotype: ROSETTE LEAVES Shape-Serrate
  misc_feature: Phenotype: WHOLE PLANT Size-Small
  misc_feature: Phenotype: ROSETTE LEAVES Disorganized Rosette-Disorganized Rosette
  misc_feature: Phenotype: ROSETTE LEAVES Other
  misc_feature: Phenotype: WHOLE PLANT Dwarf-Misc. Dwarf
  misc_feature: Phenotype: WHOLE PLANT Rosette Shape-Bushy
  misc_feature: Phenotype: WHOLE PLANT Size-Small
  misc_feature: Phenotype: INFLORESCENCE Height-Short
  misc_feature: Phenotype: FERTILITY Fertility-Reduced
  misc_feature: Phenotype: ROSETTE LEAVES Curled-Curled 2
  misc_feature: Phenotype: ROSETTE LEAVES Disorganized Rosette-Disorganized Rosette
  misc_feature: Phenotype: WHOLE PLANT Size-Small
  misc_feature: Phenotype: INFLORESCENCE Flowering Time-Late Flowering
  misc_feature: Phenotype: INFLORESCENCE Other
  misc_feature: Phenotype: ROSETTE LEAVES Other
  misc_feature: Phenotype: WHOLE PLANT Size-Small
  misc_feature: Phenotype: ROSETTE LEAVES Other
atcgaacattaaaacctgattttactgaaactgtgctgcgaaggagaagccgcaaaccattttttgtcaatctagggttcttcttcgtacttgcagatttcgcctccgttttcactacgatctgtgaagatgttctccgctcagaacaagatcaataaggacaagaatgctgagccaacagaatgcgaggagcaagttgctcaggctttgtttgatttggagaacactaaccaggagttgaaaagcgagttgaaagatctctacatcaaccaagctgttcacatggatatctctggaaaccgcaaagctgttgtgatttacgttccattcagattgaggaaagctttccgcaagattcatccccgtctcgtcagagagcttgagaagaagttcagtggaaaggatgttatctttgttaccacaagaaggatcatgcgtccccccaagaagggtgctgctgttcagaggccacgtaacagaactcttacctcagttcatgaagctatgcttgaagatgttgctttccccgctgagattgttggaaagcgtactcgctaccgtcttgatggttccaagatcatgaaggtctttttggatgccaaggaaaagaacaacacagagtacaagctcgagactatggtcggtgtgtaccgtaaacttactggcaaagatgttgtttttgagtacccagtcgaagcttgaaagaagatgatgaagaaccatcaggatagtgaaagagagcttttgtttatgttttgtggtatttaggatgaaggaaactctcttgattcagttccttgttcacaatctttaatgttctatttacaatgactactttttgtgtttttcaattttgaaacctctatgatttc

SEQ ID NO: 35490 - protein, 190 aa, Arabidopsis thaliana
  peptide (1)..(190): Ceres Seq. ID no. 12327664
  misc_feature (4)..(190): Pfam Name: Ribosomal protein S7e Pfam Description: Ribosomal protein S7e
  misc_feature (1)..(187): Homolog of NCBI NO: 1710775 NR Description: 40S RIBOSOMAL PROTEIN S7
  misc_feature (1)..(188): Homolog of NCBI NO: 14787424 NR Description: Ribosomal protein S7 [Hordeum vulgare subsp.
  misc_feature (1)..(188): Homolog of NCBI NO: 4588906 NR Description: ribosomal protein S7 [Secale cereale]
  misc_feature (1)..(188): Homolog of NCBI NO: 22671664 NR Description: ribosomal protein S7 [Oryza sativa (japonica
  misc_feature (1)..(188): Homolog of NCBI NO: 15221972 NR Description: 40S ribosomal protein S7 homolog, putative
  misc_feature (1)..(188): Homolog of NCBI NO: 20139964 NR Description: 40S ribosomal protein S7
  misc_feature (1)..(188): Homolog of NCBI NO: 20139962 NR Description: 40S ribosomal protein S7
  misc_feature (1)..(188): Homolog of NCBI NO: 15232926 NR Description: putative 40S ribosomal protein
  misc_feature (1)..(190): Homolog of NCBI NO: 15237278 NR Description: 40S ribosomal protein S7-like
  misc_feature (1)..(190): Homolog of NCBI NO: 21592413 NR Description: 40S ribosomal protein S7-like [Arabidopsis
MFSAQNKINKDKNAEPTECEEQVAQALFDLENTNQELKSELKDLYINQAVHMDISGNRKAVVIYVPFRLRKAFRKIHPRLVRELEKKFSGKDVIFVTTRRIMRPPKKGAAVQRPRNRTLTSVHEAMLEDVAFPAEIVGKRTRYRLDGSKIMKVFLDAKEKNNTEYKLETMVGVYRKLTGKDVVFEYPVEA

SEQ ID NO: 35491 - protein, 139 aa, Arabidopsis thaliana
  peptide (1)..(139): Ceres Seq. ID no. 12327665
  misc_feature (1)..(139): Pfam Name: Ribosomal protein S7e Pfam Description: Ribosomal protein S7e
  misc_feature (1)..(136): Homolog of NCBI NO: 1710775 NR Description: 40S RIBOSOMAL PROTEIN S7
  misc_feature (1)..(137): Homolog of NCBI NO: 14787424 NR Description: Ribosomal protein S7 [Hordeum vulgare subsp.
  misc_feature (1)..(137): Homolog of NCBI NO: 4588906 NR Description: ribosomal protein S7 [Secale cereale]
  misc_feature (1)..(137): Homolog of NCBI NO: 22671664 NR Description: ribosomal protein S7 [Oryza sativa (japonica
  misc_feature (1)..(137): Homolog of NCBI NO: 15221972 NR Description: 40S ribosomal protein S7 homolog, putative
  misc_feature (1)..(137): Homolog of NCBI NO: 20139964 NR Description: 40S ribosomal protein S7
  misc_feature (1)..(137): Homolog of NCBI NO: 20139962 NR Description: 40S ribosomal protein S7
  misc_feature (1)..(137): Homolog of NCBI NO: 15232926 NR Description: putative 40S ribosomal protein
  misc_feature (1)..(139): Homolog of NCBI NO: 15237278 NR Description: 40S ribosomal protein S7-like
  misc_feature (1)..(139): Homolog of NCBI NO: 21592413 NR Description: 40S ribosomal protein S7-like [Arabidopsis
MDISGNRKAVVIYVPFRLRKAFRKIHPRLVRELEKKFSGKDVIFVTTRRIMRPPKKGAAVQRPRNRTLTSVHEAMLEDVAFPAEIVGKRTRYRLDGSKIMKVFLDAKEKNNTEYKLETMVGVYRKLTGKDVVFEYPVEA

SEQ ID NO: 35492 - DNA, 873 bp, Arabidopsis thaliana; identical to SEQ ID NO: 21755
  misc_feature (1)..(873): Ceres Seq. ID no. 13497760
  misc_feature: MA Experiment ID: 108488 Result: Down-regulated in Transcription
  misc_feature: MA Experiment ID: 20000069 Result: Up-regulated in Transcription
  misc_feature: MA Experiment 20000069 PARAMETER Experiment Name: At_100uM_ABA_Mutants_cDNA_P Parameter: Plant Line Value: CS23
  misc_feature: MA Experiment 20000069 PARAMETER Experiment Name: At_100uM_ABA_Mutants_cDNA_P Parameter: Timepoint (hr) Value: 6
  misc_feature: MA Experiment 20000069 PARAMETER Experiment Name: At_100uM_ABA_Mutants_cDNA_P Parameter: Tissue Value: Aerial
  misc_feature: MA Experiment 20000069 PARAMETER Experiment Name: At_100uM_ABA_Mutants_cDNA_P Parameter: Treatment Value: 100uM ABA vs. No Treatment
  misc_feature: MA Experiment ID: 20000070 Result: Up-regulated in Transcription
  misc_feature: MA Experiment 20000070 PARAMETER Experiment Name: At_100uM_ABA_Mutants_cDNA_P Parameter: Plant Line Value: CS24
  misc_feature: MA Experiment 20000070 PARAMETER Experiment Name: At_100uM_ABA_Mutants_cDNA_P Parameter: Timepoint (hr) Value: 6
  misc_feature: MA Experiment 20000070 PARAMETER Experiment Name: At_100uM_ABA_Mutants_cDNA_P Parameter: Tissue Value: Aerial
  misc_feature: MA Experiment 20000070 PARAMETER Experiment Name: At_100uM_ABA_Mutants_cDNA_P Parameter: Treatment Value: 100uM ABA vs. No Treatment
  misc_feature: MA Experiment ID: 20000071 Result: Up-regulated in Transcription
  misc_feature: MA Experiment 20000071 PARAMETER Experiment Name: At_100uM_ABA_Mutants_cDNA_P Parameter: Plant Line Value: CS8104
  misc_feature: MA Experiment 20000071 PARAMETER Experiment Name: At_100uM_ABA_Mutants_cDNA_P Parameter: Timepoint (hr) Value: 6
  misc_feature: MA Experiment 20000071 PARAMETER Experiment Name: At_100uM_ABA_Mutants_cDNA_P Parameter: Tissue Value: Aerial
  misc_feature: MA Experiment 20000071 PARAMETER Experiment Name: At_100uM_ABA_Mutants_cDNA_P Parameter: Treatment Value: 100uM ABA vs. No Treatment
  misc_feature: MA Experiment ID: 20000072 Result: Up-regulated in Transcription
  misc_feature: MA Experiment 20000072 PARAMETER Experiment Name: At_100uM_ABA_Mutants_cDNA_P Parameter: Plant Line Value: CS8105
  misc_feature: MA Experiment 20000072 PARAMETER Experiment Name: At_100uM_ABA_Mutants_cDNA_P Parameter: Timepoint (hr) Value: 6
  misc_feature: MA Experiment 20000072 PARAMETER Experiment Name: At_100uM_ABA_Mutants_cDNA_P Parameter: Tissue Value: Aerial
  misc_feature: MA Experiment 20000072 PARAMETER Experiment Name: At_100uM_ABA_Mutants_cDNA_P Parameter: Treatment Value: 100uM ABA vs. No Treatment
  misc_feature: MA Experiment ID: 20000086 Result: Up-regulated in Transcription
  misc_feature: MA Experiment 20000086 PARAMETER Experiment Name: At_100uM_ABA_Mutants_cDNA_P Parameter: Plant Line Value: CS22
  misc_feature: MA Experiment 20000086 PARAMETER Experiment Name: At_100uM_ABA_Mutants_cDNA_P Parameter: Timepoint (hr) Value: 6
  misc_feature: MA Experiment 20000086 PARAMETER Experiment Name: At_100uM_ABA_Mutants_cDNA_P Parameter: Tissue Value: Aerial
  misc_feature: MA Experiment 20000086 PARAMETER Experiment Name: At_100uM_ABA_Mutants_cDNA_P Parameter: Treatment Value: 100uM ABA vs. No Treatment
  misc_feature: MA Experiment ID: 20000087 Result: Up-regulated in Transcription
  misc_feature: MA Experiment 20000087 PARAMETER Experiment Name: At_100uM_ABA_Mutants_cDNA_P Parameter: Plant Line Value: WS
  misc_feature: MA Experiment 20000087 PARAMETER Experiment Name: At_100uM_ABA_Mutants_cDNA_P Parameter: Timepoint (hr) Value: 6
  misc_feature: MA Experiment 20000087 PARAMETER Experiment Name: At_100uM_ABA_Mutants_cDNA_P Parameter: Tissue Value: Aerial
  misc_feature: MA Experiment 20000087 PARAMETER Experiment Name: At_100uM_ABA_Mutants_cDNA_P Parameter: Treatment Value: 100uM ABA vs. No Treatment
  misc_feature: MA Experiment ID: 20000089 Result: Up-regulated in Transcription
  misc_feature: MA Experiment ID: 20000090 Result: Up-regulated in Transcription
  misc_feature: MA Experiment ID: 20000117 Result: Up-regulated in Transcription
  misc_feature: MA Experiment 20000117 PARAMETER Experiment Name: At_100uM_ABA_Mutants_cDNA_P Parameter: Plant Line Value: Columbia
  misc_feature: MA Experiment 20000117 PARAMETER Experiment Name: At_100uM_ABA_Mutants_cDNA_P Parameter: Timepoint (hr) Value: 6
  misc_feature: MA Experiment 20000117 PARAMETER Experiment Name: At_100uM_ABA_Mutants_cDNA_P Parameter: Tissue Value: Aerial
  misc_feature: MA Experiment 20000117 PARAMETER Experiment Name: At_100uM_ABA_Mutants_cDNA_P Parameter: Treatment Value: 100uM ABA vs. No Treatment
  misc_feature: MA Experiment ID: 20000171 Result: Down-regulated in Transcription
  misc_feature: MA Experiment 20000171 PARAMETER Experiment Name: At_42deg_Heat_P Parameter: Age (day) Value: 14
  misc_feature: MA Experiment 20000171 PARAMETER Experiment Name: At_42deg_Heat_P Parameter: Organism Value: A. thaliana
  misc_feature: MA Experiment 20000171 PARAMETER Experiment Name: At_42deg_Heat_P Parameter: Plant Line Value: WS
  misc_feature: MA Experiment 20000171 PARAMETER Experiment Name: At_42deg_Heat_P Parameter: Temperature (deg C) Value: 42 vs. 22
  misc_feature: MA Experiment 20000171 PARAMETER Experiment Name: At_42deg_Heat_P Parameter: Timepoint (hr) Value: 1
  misc_feature: MA Experiment 20000171 PARAMETER Experiment Name: At_42deg_Heat_P Parameter: Tissue Value: Aerial
  misc_feature: MA Experiment ID: 20000173 Result: Down-regulated in Transcription
  misc_feature: MA Experiment 20000173 PARAMETER Experiment Name: At_42deg_Heat_P Parameter: Age (day) Value: 14
  misc_feature: MA Experiment 20000173 PARAMETER Experiment Name: At_42deg_Heat_P Parameter: Organism Value: A. thaliana
  misc_feature: MA Experiment 20000173 PARAMETER Experiment Name: At_42deg_Heat_P Parameter: Plant Line Value: WS
  misc_feature: MA Experiment 20000173 PARAMETER Experiment Name: At_42deg_Heat_P Parameter: Temperature (deg C) Value: 42 vs. 22
  misc_feature: MA Experiment 20000173 PARAMETER Experiment Name: At_42deg_Heat_P Parameter: Timepoint (hr) Value: 6
  misc_feature: MA Experiment 20000173 PARAMETER Experiment Name: At_42deg_Heat_P Parameter: Tissue Value: Aerial
  misc_feature: MA Experiment ID: 20000184 Result: Down-regulated in Transcription
  misc_feature: MA Experiment 20000184 PARAMETER Experiment Name: At_Shoots__P Parameter: Age (day) Value: 7
  misc_feature: MA Experiment 20000184 PARAMETER Experiment Name: At_Shoots__P Parameter: Tissue Value: Shoots vs. Whole Plant
  misc_feature: MA Experiment ID: 20000234 Result: Down-regulated in Transcription
  misc_feature: MA Experiment 20000234 PARAMETER Experiment Name: At_Siliques_P Parameter: Age (day) Value: 21
  misc_feature: MA Experiment 20000234 PARAMETER Experiment Name: At_Siliques_P Parameter: Organism Value: A. thaliana
  misc_feature: MA Experiment 20000234 PARAMETER Experiment Name: At_Siliques_P Parameter: Plant Line Value: WS
  misc_feature: MA Experiment 20000234 PARAMETER Experiment Name: At_Siliques_P Parameter: Tissue Value: Less Than 5mm Siliques vs. Whole Plant
  misc_feature: MA Experiment ID: 20000235 Result: Down-regulated in Transcription
  misc_feature: MA Experiment 20000235 PARAMETER Experiment Name: At_Siliques_P Parameter: Age (day) Value: 21
  misc_feature: MA Experiment 20000235 PARAMETER Experiment Name: At_Siliques_P Parameter: Organism Value: A. thaliana
  misc_feature: MA Experiment 20000235 PARAMETER Experiment Name: At_Siliques_P Parameter: Plant Line Value: WS
  misc_feature: MA Experiment 20000235 PARAMETER Experiment Name: At_Siliques_P Parameter: Tissue Value: 5-10mm Siliques vs. Whole Plant
  misc_feature: MA Experiment ID: 20000436 Result: Up-regulated in Transcription
  misc_feature: MA Experiment 20000436 PARAMETER Experiment Name: At_Drought_P Parameter: Age (day) Value: 7
  misc_feature: MA Experiment 20000436 PARAMETER Experiment Name: At_Drought_P Parameter: Organism Value: A. thaliana
  misc_feature: MA Experiment 20000436 PARAMETER Experiment Name: At_Drought_P Parameter: Plant Line Value: WS
  misc_feature: MA Experiment 20000436 PARAMETER Experiment Name: At_Drought_P Parameter: Timepoint (hr) Value: 12
  misc_feature: MA Experiment 20000436 PARAMETER Experiment Name: At_Drought_P Parameter: Tissue Value: Whole Plant
  misc_feature: MA Experiment 20000436 PARAMETER Experiment Name: At_Drought_P Parameter: Treatment Value: Drought vs. No Drought
  misc_feature: MA Experiment ID: 20000437 Result: Up-regulated in Transcription
  misc_feature: MA Experiment 20000437 PARAMETER Experiment Name: At_Drought_P Parameter: Age (day) Value: 8
  misc_feature: MA Experiment 20000437 PARAMETER Experiment Name: At_Drought_P Parameter: Organism Value: A. thaliana
  misc_feature: MA Experiment 20000437 PARAMETER Experiment Name: At_Drought_P Parameter: Plant Line Value: WS
  misc_feature: MA Experiment 20000437 PARAMETER Experiment Name: At_Drought_P Parameter: Timepoint (hr) Value: 24
  misc_feature: MA Experiment 20000437 PARAMETER Experiment Name: At_Drought_P Parameter: Tissue Value: Whole Plant
  misc_feature: MA Experiment 20000437 PARAMETER Experiment Name: At_Drought_P Parameter: Treatment Value: Drought vs. No Drought
  misc_feature: MA Experiment ID: 20000438 Result: Down-regulated in Transcription
  misc_feature: MA Experiment 20000438 PARAMETER Experiment Name: At_Shoots__P Parameter: Age (day) Value: 14
  misc_feature: MA Experiment 20000438 PARAMETER Experiment Name: At_Shoots__P Parameter: Tissue Value: Shoots vs. Whole Plant
  misc_feature: MA Experiment ID: 20000439 Result: Down-regulated in Transcription
  misc_feature: MA Experiment 20000439 PARAMETER Experiment Name: At_Roots__P Parameter: Age (day) Value: 14 vs. 21
  misc_feature: MA Experiment 20000439 PARAMETER Experiment Name: At_Roots__P Parameter: Organism Value: A. thaliana
  misc_feature: MA Experiment 20000439 PARAMETER Experiment Name: At_Roots__P Parameter: Tissue Value: Roots vs. Whole Plant
  misc_feature: MA Experiment ID: 20000495 Result: Down-regulated in Transcription
  misc_feature: MA Experiment 20000495 PARAMETER Experiment Name: At_Guard_Cells_P Parameter: Harvest Date Value: 8/2/2002
  misc_feature: MA Experiment 20000495 PARAMETER Experiment Name: At_Guard_Cells_P Parameter: Organism Value: A. thaliana
  misc_feature: MA Experiment 20000495 PARAMETER Experiment Name: At_Guard_Cells_P Parameter: Tissue Value: Guard Cells vs. Leaves
  misc_feature: MA Experiment ID: 20001451 Result: Down-regulated in Transcription
  misc_feature: MA Experiment 20001451 PARAMETER Experiment Name: At_Far-red-induction_P Parameter: Age (day) Value: 7
  misc_feature: MA Experiment 20001451 PARAMETER Experiment Name: At_Far-red-induction_P Parameter: Light Value: Far-red vs. White
  misc_feature: MA Experiment 20001451 PARAMETER Experiment Name: At_Far-red-induction_P Parameter: Organism Value: A. thaliana
  misc_feature: MA Experiment 20001451 PARAMETER Experiment Name: At_Far-red-induction_P Parameter: Plant Line Value: Columbia
  misc_feature: MA Experiment 20001451 PARAMETER Experiment Name: At_Far-red-induction_P Parameter: Timepoint (hr) Value: 24
  misc_feature: MA Experiment 20001451 PARAMETER Experiment Name: At_Far-red-induction_P Parameter: Tissue Value: Whole Plant
  misc_feature: MA Experiment ID: 20001558 Result: Down-regulated in Transcription
  misc_feature: MA Experiment 20001558 PARAMETER Experiment Name: At_Drought_Soil_Dry_P Parameter: Age (day) Value: 27
  misc_feature: MA Experiment 20001558 PARAMETER Experiment Name: At_Drought_Soil_Dry_P Parameter: Organism Value: A. thaliana
  misc_feature: MA Experiment 20001558 PARAMETER Experiment Name: At_Drought_Soil_Dry_P Parameter: Plant Line Value: WS
  misc_feature: MA Experiment 20001558 PARAMETER Experiment Name: At_Drought_Soil_Dry_P Parameter: Post Timepoint (hr) Value: 6
  misc_feature: MA Experiment 20001558 PARAMETER Experiment Name: At_Drought_Soil_Dry_P Parameter: Post-Treatment Value: Re-Water vs. No Drought
  misc_feature: MA Experiment 20001558 PARAMETER Experiment Name: At_Drought_Soil_Dry_P Parameter: Timepoint (day) Value: 13
  misc_feature: MA Experiment 20001558 PARAMETER Experiment Name: At_Drought_Soil_Dry_P Parameter: Treatment Value: Drought vs. No Drought
  misc_feature: MA Experiment ID: 20001560 Result: Down-regulated in Transcription
  misc_feature: MA Experiment 20001560 PARAMETER Experiment Name: At_Drought_Soil_Dry_P Parameter: Age (day) Value: 28
  misc_feature: MA Experiment 20001560 PARAMETER Experiment Name: At_Drought_Soil_Dry_P Parameter: Organism Value: A. thaliana
  misc_feature: MA Experiment 20001560 PARAMETER Experiment Name: At_Drought_Soil_Dry_P Parameter: Plant Line Value: WS
  misc_feature: MA Experiment 20001560 PARAMETER Experiment Name: At_Drought_Soil_Dry_P Parameter: Post Timepoint (hr) Value: None
  misc_feature: MA Experiment 20001560 PARAMETER Experiment Name: At_Drought_Soil_Dry_P Parameter: Post-Treatment Value: None
  misc_feature: MA Experiment 20001560 PARAMETER Experiment Name: At_Drought_Soil_Dry_P Parameter: Timepoint (day) Value: 14
  misc_feature: MA Experiment 20001560 PARAMETER Experiment Name: At_Drought_Soil_Dry_P Parameter: Treatment Value: Drought vs. No Drought

SEQ ID NO: 35493 - protein, 200 aa, Arabidopsis thaliana; identical to SEQ ID NO: 21756
  peptide (1)..(200): Ceres Seq. ID no. 13497761
  misc_feature (113)..(154): Pfam Name: Zinc finger, C3HC4 type (RING finger) Pfam Description: Zinc finger, C3HC4 type (RING finger)
  misc_feature (113)..(154): Pfam Name: Zinc finger, C3HC4 type (RING finger) Pfam Description: Zinc finger, C3HC4 type (RING finger)
  misc_feature (113)..(154): Pfam Name: Zinc finger, C3HC4 type (RING finger) Pfam Description: Zinc finger, C3HC4 type (RING finger)
  misc_feature (10)..(182): Homolog of NCBI NO: 15222073 NR Description: RING-H2 finger protein RHA3a -related
  misc_feature (20)..(188): Homolog of NCBI NO: 9293902 NR Description: contains similarity to RING zinc finger
  misc_feature (6)..(167): Homolog of NCBI NO: 21555237 NR Description: putative RING zinc finger protein [Arabidopsis
  misc_feature (6)..(167): Homolog of NCBI NO: 15223041 NR Description: RING zinc finger protein -related [Arabidopsis
  misc_feature (1)..(164): Homolog of NCBI NO: 7489432 NR Description: probable ring finger protein - barley
  misc_feature (10)..(182): Homolog of NCBI NO: 15222073 NR Description: RING-H2 finger protein RHA3a -related
  misc_feature (6)..(167): Homolog of NCBI NO: 21555237 NR Description: putative RING zinc finger protein [Arabidopsis
  misc_feature (1)..(164): Homolog of NCBI NO: 7489432 NR Description: probable ring finger protein - barley
  misc_feature (6)..(167): Homolog of NCBI NO: 15223041 NR Description: RING zinc finger protein -related [Arabidopsis
  misc_feature (6)..(167): Homolog of NCBI NO: 21555237 NR Description: putative RING zinc finger protein [Arabidopsis
  misc_feature (20)..(188): Homolog of NCBI NO: 9293902 NR Description: contains similarity to RING zinc finger
  misc_feature (10)..(182): Homolog of NCBI NO: 15222073 NR Description: RING-H2 finger protein RHA3a -related
  misc_feature (1)..(200): Homolog of NCBI NO: 15237013 NR Description: RING-H2 finger protein RHA3b [Arabidopsis
  misc_feature (1)..(200): Homolog of NCBI NO: 15227839 NR Description: RING zinc finger protein -related [Arabidopsis
  misc_feature (10)..(181): Homolog of NCBI NO: 15218042 NR Description: RING zinc finger protein -related [Arabidopsis
  misc_feature (71)..(166): Homolog of NCBI NO: 37536508 NR Description: putative ring finger protein
  misc_feature (1)..(68): Homolog of NCBI NO: 37536508 NR Description: putative ring finger protein
  misc_feature (1)..(200): Homolog of NCBI NO: 15237013 NR Description: RING-H2 finger protein RHA3b [Arabidopsis
  misc_feature (1)..(200): Homolog of NCBI NO: 15227839 NR Description: RING zinc finger protein -related [Arabidopsis
  misc_feature (10)..(181): Homolog of NCBI NO: 15218042 NR Description: RING zinc finger protein -related [Arabidopsis
  misc_feature (71)..(166): Homolog of NCBI NO: 37536508 NR Description: putative ring finger protein
  misc_feature (1)..(68): Homolog of NCBI NO: 37536508 NR Description: putative ring finger protein
  misc_feature (1)..(164): Homolog of NCBI NO: 7489432 NR Description: probable ring finger protein - barley
  misc_feature (6)..(167): Homolog of NCBI NO: 15223041 NR Description: RING zinc finger protein -related [Arabidopsis
  misc_feature (20)..(188): Homolog of NCBI NO: 9293902 NR Description: contains similarity to RING zinc finger
  misc_feature (1)..(68): Homolog of NCBI NO: 37536508 NR Description: putative ring finger protein
  misc_feature (71)..(166): Homolog of NCBI NO: 37536508 NR Description: putative ring finger protein
  misc_feature (10)..(181): Homolog of NCBI NO: 15218042 NR Description: RING zinc finger protein -related [Arabidopsis
  misc_feature (1)..(200): Homolog of NCBI NO: 15227839 NR Description: RING zinc finger protein -related [Arabidopsis
  misc_feature (1)..(200): Homolog of NCBI NO: 15237013 NR Description: RING-H2 finger protein RHA3b [Arabidopsis

SEQ ID NO: 35494 - protein, 175 aa, Arabidopsis thaliana; identical to SEQ ID NO: 21757
  peptide (1)..(175): Ceres Seq. ID no. 13497762
  misc_feature (88)..(129): Pfam Name: Zinc finger, C3HC4 type (RING finger) Pfam Description: Zinc finger, C3HC4 type (RING finger)
  misc_feature (88)..(129): Pfam Name: Zinc finger, C3HC4 type (RING finger) Pfam Description: Zinc finger, C3HC4 type (RING finger)
  misc_feature (88)..(129): Pfam Name: Zinc finger, C3HC4 type (RING finger) Pfam Description: Zinc finger, C3HC4 type (RING finger)
  misc_feature (1)..(157): Homolog of NCBI NO: 15222073 NR Description: RING-H2 finger protein RHA3a -related
  misc_feature (1)..(163): Homolog of NCBI NO: 9293902 NR Description: contains similarity to RING zinc finger
  misc_feature (1)..(142): Homolog of NCBI NO: 21555237 NR Description: putative RING zinc finger protein [Arabidopsis
  misc_feature (1)..(142): Homolog of NCBI NO: 15223041 NR Description: RING zinc finger protein -related [Arabidopsis
  misc_feature (1)..(139): Homolog of NCBI NO: 7489432 NR Description: probable ring finger protein - barley
  misc_feature (1)..(157): Homolog of NCBI NO: 15222073 NR Description: RING-H2 finger protein RHA3a -related
  misc_feature (1)..(142): Homolog of NCBI NO: 21555237 NR Description: putative RING zinc finger protein [Arabidopsis
  misc_feature (1)..(139): Homolog of NCBI NO: 7489432 NR Description: probable ring finger protein - barley
  misc_feature (1)..(142): Homolog of NCBI NO: 15223041 NR Description: RING zinc finger protein -related [Arabidopsis
  misc_feature (1)..(142): Homolog of NCBI NO: 21555237 NR Description: putative RING zinc finger protein [Arabidopsis
  misc_feature (1)..(163): Homolog of NCBI NO: 9293902 NR Description: contains similarity to RING zinc finger
  misc_feature (1)..(157): Homolog of NCBI NO: 15222073 NR Description: RING-H2 finger protein RHA3a -related
  misc_feature (1)..(175): Homolog of NCBI NO: 15237013 NR Description: RING-H2 finger protein RHA3b [Arabidopsis
  misc_feature (1)..(175): Homolog of NCBI NO: 15227839 NR Description: RING zinc finger protein -related [Arabidopsis
  misc_feature (1)..(156): Homolog of NCBI NO: 15218042 NR Description: RING zinc finger protein -related [Arabidopsis
  misc_feature (46)..(141): Homolog of NCBI NO: 37536508 NR Description: putative ring finger protein
  misc_feature (1)..(43): Homolog of NCBI NO: 37536508 NR Description: putative ring finger protein
  misc_feature (1)..(175): Homolog of NCBI NO: 15237013 NR Description: RING-H2 finger protein RHA3b [Arabidopsis
  misc_feature (1)..(175): Homolog of NCBI NO: 15227839 NR Description: RING zinc finger protein -related [Arabidopsis
  misc_feature (1)..(156): Homolog of NCBI NO: 15218042 NR Description: RING zinc finger protein -related [Arabidopsis
  misc_feature (46)..(141): Homolog of NCBI NO: 37536508 NR Description: putative ring finger protein
  misc_feature (1)..(43): Homolog of NCBI NO: 37536508 NR Description: putative ring finger protein
  misc_feature (1)..(139): Homolog of NCBI NO: 7489432 NR Description: probable ring finger protein - barley
  misc_feature (1)..(142): Homolog of NCBI NO: 15223041 NR Description: RING zinc finger protein -related [Arabidopsis
  misc_feature (1)..(163): Homolog of NCBI NO: 9293902 NR Description: contains similarity to RING zinc finger
  misc_feature (1)..(43): Homolog of NCBI NO: 37536508 NR Description: putative ring finger protein
  misc_feature (46)..(141): Homolog of NCBI NO: 37536508 NR Description: putative ring finger protein
  misc_feature (1)..(156): Homolog of NCBI NO: 15218042 NR Description: RING zinc finger protein -related [Arabidopsis
  misc_feature (1)..(175): Homolog of NCBI NO: 15227839 NR Description: RING zinc finger protein -related [Arabidopsis
  misc_feature (1)..(175): Homolog of NCBI NO: 15237013 NR Description: RING-H2 finger protein RHA3b [Arabidopsis

SEQ ID NO: 35495 - DNA, 1259 bp, Arabidopsis thaliana
  misc_feature (1)..(1259): Ceres Seq. ID no. 12370424
  misc_feature: MA Experiment ID: 108572 Result: Up-regulated in Transcription
  misc_feature: MA Experiment 108572 PARAMETER Experiment Name: At_Drought_cDNA_P Parameter: Timepoint (hr) Value: 1
  misc_feature: MA Experiment 108572 PARAMETER Experiment Name: At_Drought_cDNA_P Parameter: Tissue Value: Aerial
  misc_feature: MA Experiment 108572 PARAMETER Experiment Name: At_Drought_cDNA_P Parameter: Treatment Value: Drought vs. No Drought
  misc_feature: MA Experiment ID: 108573 Result: Up-regulated in Transcription
  misc_feature: MA Experiment 108573 PARAMETER Experiment Name: At_Drought_cDNA_P Parameter: Timepoint (hr) Value: 6
  misc_feature: MA Experiment 108573 PARAMETER Experiment Name: At_Drought_cDNA_P Parameter: Tissue Value: Aerial
  misc_feature: MA Experiment 108573 PARAMETER Experiment Name: At_Drought_cDNA_P Parameter: Treatment Value: Drought vs. No Drought
  misc_feature: MA Experiment ID: 108576 Result: Up-regulated in Transcription
  misc_feature: MA Experiment 108576 PARAMETER Experiment Name: At_42deg_Heat_cDNA_P Parameter: Temperature (deg C) Value: 42 vs. 22
  misc_feature: MA Experiment 108576 PARAMETER Experiment Name: At_42deg_Heat_cDNA_P Parameter: Timepoint (hr) Value: 1
  misc_feature: MA Experiment 108576 PARAMETER Experiment Name: At_42deg_Heat_cDNA_P Parameter: Tissue Value: Aerial
  misc_feature: MA Experiment ID: 108577 Result: Up-regulated in Transcription
  misc_feature: MA Experiment 108577 PARAMETER Experiment Name: At_42deg_Heat_cDNA_P Parameter: Temperature (deg C) Value: 42 vs. 22
  misc_feature: MA Experiment 108577 PARAMETER Experiment Name: At_42deg_Heat_cDNA_P Parameter: Timepoint (hr) Value: 6
  misc_feature: MA Experiment 108577 PARAMETER Experiment Name: At_42deg_Heat_cDNA_P Parameter: Tissue Value: Aerial
  misc_feature: MA Experiment ID: 108585 Result: Up-regulated in Transcription
  misc_feature: MA Experiment 108585 PARAMETER Experiment Name: At_5mM_NaNP_cDNA_P Parameter: Timepoint (hr) Value: 6
  misc_feature: MA Experiment 108585 PARAMETER Experiment Name: At_5mM_NaNP_cDNA_P Parameter: Tissue Value: Aerial
  misc_feature: MA Experiment 108585 PARAMETER Experiment Name: At_5mM_NaNP_cDNA_P Parameter: Treatment Value: null
  misc_feature: MA Experiment ID: 20000093 Result: Up-regulated in Transcription
  misc_feature: MA Experiment 20000093 PARAMETER Experiment Name: At_42deg_Heat_cDNA_P Parameter: Temperature (deg C) Value: 42 vs. 22
  misc_feature: MA Experiment 20000093 PARAMETER Experiment Name: At_42deg_Heat_cDNA_P Parameter: Timepoint (hr) Value: 0.5
  misc_feature: MA Experiment 20000093 PARAMETER Experiment Name: At_42deg_Heat_cDNA_P Parameter: Tissue Value: Aerial
  misc_feature: MA Experiment ID: 20000112 Result: Up-regulated in Transcription
  misc_feature: MA Experiment 20000112 PARAMETER Experiment Name: At_42deg_Heat_cDNA_P Parameter: Temperature (deg C) Value: 42 vs. 22
  misc_feature: MA Experiment 20000112 PARAMETER Experiment Name: At_42deg_Heat_cDNA_P Parameter: Timepoint (hr) Value: 2
  misc_feature: MA Experiment 20000112 PARAMETER Experiment Name: At_42deg_Heat_cDNA_P Parameter: Tissue Value: Aerial
  misc_feature: MA Experiment ID: 20000113 Result: Up-regulated in Transcription
  misc_feature: MA Experiment 20000113 PARAMETER Experiment Name: At_42deg_Heat_cDNA_P Parameter: Temperature (deg C) Value: 42 vs. 22
  misc_feature: MA Experiment 20000113 PARAMETER Experiment Name: At_42deg_Heat_cDNA_P Parameter: Timepoint (hr) Value: 8
  misc_feature: MA Experiment 20000113 PARAMETER Experiment Name: At_42deg_Heat_cDNA_P Parameter: Tissue Value: Aerial
  misc_feature: MA Experiment ID: 20000144 Result: Up-regulated in Transcription
  misc_feature: MA Experiment 20000144 PARAMETER Experiment Name: At_42deg_Heat_cDNA_P Parameter: Temperature (deg C) Value: 42 vs. 22
  misc_feature: MA Experiment 20000144 PARAMETER Experiment Name: At_42deg_Heat_cDNA_P Parameter: Timepoint (hr) Value: 1
  misc_feature: MA Experiment 20000144 PARAMETER Experiment Name: At_42deg_Heat_cDNA_P Parameter: Tissue Value: Aerial
  misc_feature: MA Experiment ID: 20000171 Result: Up-regulated in Transcription
  misc_feature: MA Experiment 20000171 PARAMETER Experiment Name: At_42deg_Heat_P Parameter: Age (day) Value: 14
  misc_feature: MA Experiment 20000171 PARAMETER Experiment Name: At_42deg_Heat_P Parameter: Organism Value: A. thaliana
  misc_feature: MA Experiment 20000171 PARAMETER Experiment Name: At_42deg_Heat_P Parameter: Plant Line Value: WS
  misc_feature: MA Experiment 20000171 PARAMETER Experiment Name: At_42deg_Heat_P Parameter: Temperature (deg C) Value: 42 vs. 22
  misc_feature: MA Experiment 20000171 PARAMETER Experiment Name: At_42deg_Heat_P Parameter: Timepoint (hr) Value: 1
  misc_feature: MA Experiment 20000171 PARAMETER Experiment Name: At_42deg_Heat_P Parameter: Tissue Value: Aerial
  misc_feature: MA Experiment ID: 20000224 Result: Down-regulated in Transcription
  misc_feature: MA Experiment ID: 20000436 Result: Up-regulated in Transcription
  misc_feature: MA Experiment 20000436 PARAMETER Experiment Name: At_Drought_P Parameter: Age (day) Value: 7
  misc_feature: MA Experiment 20000436 PARAMETER Experiment Name: At_Drought_P Parameter: Organism Value: A. thaliana
  misc_feature: MA Experiment 20000436 PARAMETER Experiment Name: At_Drought_P Parameter: Plant Line Value: WS
  misc_feature: MA Experiment 20000436 PARAMETER Experiment Name: At_Drought_P Parameter: Timepoint (hr) Value: 12
  misc_feature: MA Experiment 20000436 PARAMETER Experiment Name: At_Drought_P Parameter: Tissue Value: Whole Plant
  misc_feature: MA Experiment 20000436 PARAMETER Experiment Name: At_Drought_P Parameter: Treatment Value: Drought vs. No Drought
  misc_feature: MA Experiment ID: 20000437 Result: Up-regulated in Transcription
  misc_feature: MA Experiment 20000437 PARAMETER Experiment Name: At_Drought_P Parameter: Age (day) Value: 8
  misc_feature: MA Experiment 20000437 PARAMETER Experiment Name: At_Drought_P Parameter: Organism Value: A. thaliana
  misc_feature: MA Experiment 20000437 PARAMETER Experiment Name: At_Drought_P Parameter: Plant Line Value: WS
  misc_feature: MA Experiment 20000437 PARAMETER Experiment Name: At_Drought_P Parameter: Timepoint (hr) Value: 24
  misc_feature: MA Experiment 20000437 PARAMETER Experiment Name: At_Drought_P Parameter: Tissue Value: Whole Plant
  misc_feature: MA Experiment 20000437 PARAMETER Experiment Name: At_Drought_P Parameter: Treatment Value: Drought vs. No Drought
  misc_feature: MA Experiment ID: 20001559 Result: Up-regulated in Transcription
  misc_feature: MA Experiment 20001559 PARAMETER Experiment Name: At_Drought_Soil_Dry_P Parameter: Age (day) Value: 28
  misc_feature: MA Experiment 20001559 PARAMETER Experiment Name: At_Drought_Soil_Dry_P Parameter: Organism Value: A. thaliana
  misc_feature: MA Experiment 20001559 PARAMETER Experiment Name: At_Drought_Soil_Dry_P Parameter: Plant Line Value: WS
  misc_feature: MA Experiment 20001559 PARAMETER Experiment Name: At_Drought_Soil_Dry_P Parameter: Post Timepoint (hr) Value: 29
  misc_feature: MA Experiment 20001559 PARAMETER Experiment Name: At_Drought_Soil_Dry_P Parameter: Post-Treatment Value: Re-Water vs. No Drought
  misc_feature: MA Experiment 20001559 PARAMETER Experiment Name: At_Drought_Soil_Dry_P Parameter: Timepoint (day) Value: 14
  misc_feature: MA Experiment 20001559 PARAMETER Experiment Name: At_Drought_Soil_Dry_P Parameter: Treatment Value: Drought vs. No Drought
  misc_feature: MA Experiment ID: 20001904 Result: Up-regulated in Transcription
  misc_feature: MA Experiment 20001904 PARAMETER Experiment Name: At_Drought_Reproduction_P Parameter: Age (day) Value: 37
  misc_feature: MA Experiment 20001904 PARAMETER Experiment Name: At_Drought_Reproduction_P Parameter: Organism Value: A. thaliana
  misc_feature: MA Experiment 20001904 PARAMETER Experiment Name: At_Drought_Reproduction_P Parameter: Plant Line Value: WS
  misc_feature: MA Experiment 20001904 PARAMETER Experiment Name: At_Drought_Reproduction_P Parameter: Timepoint (day) Value: 7
  misc_feature: MA Experiment 20001904 PARAMETER Experiment Name: At_Drought_Reproduction_P Parameter: Tissue Value: Rosettes
  misc_feature: MA Experiment 20001904 PARAMETER Experiment Name: At_Drought_Reproduction_P Parameter: Treatment Value: Drought vs. No Drought
  misc_feature: MA Experiment ID: 20001905 Result: Up-regulated in Transcription
  misc_feature: MA Experiment 20001905 PARAMETER Experiment Name: At_Drought_Reproduction_P Parameter: Age (day) Value: 40
  misc_feature: MA Experiment 20001905 PARAMETER Experiment Name: At_Drought_Reproduction_P Parameter: Organism Value: A. thaliana
  misc_feature: MA Experiment 20001905 PARAMETER Experiment Name: At_Drought_Reproduction_P Parameter: Plant Line Value: WS
  misc_feature: MA Experiment 20001905 PARAMETER Experiment Name: At_Drought_Reproduction_P Parameter: Timepoint (day) Value: 10
  misc_feature: MA Experiment 20001905 PARAMETER Experiment Name: At_Drought_Reproduction_P Parameter: Tissue Value: Rosettes
  misc_feature: MA Experiment 20001905 PARAMETER Experiment Name: At_Drought_Reproduction_P Parameter: Treatment Value: Drought vs. No Drought
  misc_feature: MA Experiment ID: 20001911 Result: Up-regulated in Transcription
  misc_feature: MA Experiment 20001911 PARAMETER Experiment Name: At_Drought_Reproduction_P Parameter: Age (day) Value: 40
  misc_feature: MA Experiment 20001911 PARAMETER Experiment Name: At_Drought_Reproduction_P Parameter: Organism Value: A. thaliana
  misc_feature: MA Experiment 20001911 PARAMETER Experiment Name: At_Drought_Reproduction_P Parameter: Plant Line Value: WS
  misc_feature: MA Experiment 20001911 PARAMETER Experiment Name: At_Drought_Reproduction_P Parameter: Timepoint (day) Value: 10
  misc_feature: MA Experiment 20001911 PARAMETER Experiment Name: At_Drought_Reproduction_P Parameter: Tissue Value: Flowers
  misc_feature: MA Experiment 20001911 PARAMETER Experiment Name: At_Drought_Reproduction_P Parameter: Treatment Value: Drought vs. No Drought
aagcatcgctctagttaaggaagcagcaggtttggatccgaaccaaccaacggatcagatcagaaacaaaatattcaacggctcagatttattctaattttcctccttttattgttggttttttcattcgtcttcgagatctttcttctcagaggtgtaacgaaaacgctagaacaataactttgatcgttcttcttcttctcttgaatcggaaacaatggcggatgaacataagcatgaagaatcttcacctaatttggatccagcagtggaggttgtagagagggaatcgttgatggagaagttatcggagaagatccatcacaaaggtgattcgtcgtcttcatcatcatcagatgacgaaaacgagaagaagtcttcgtcatcgtctccaaagtctttgaaatcgaaggtttatcgtttgttcggaagagagagacctgttcataaggttctcggcggcggaaaaccggcagatatatttatgtggaaggacaagaaaatgtcaggaggtgtatttggcggtgctacagtggcatgggtgctatttgaattgatggagtatcatcttcttactctgttatgtcacgttatgatcgttgctcttgctgtgttgtttctatggtctaatgccactatgttcattcacaagtctccaccaaagattcctgaagttcatatccctgaagaacctcttcttcagcttgcttcgggtcttagaatcgaaatcaaccgtgggatctcttctcttcgtgagattgcgtcggggagggatatcaagaagttcctctctgctattgccggattgtgggttctatcgatcttgggcggctgctatagtttcttgacattggcatacatagctctggttctgctcttcactgttcctcttttctacgacaagtacgaagacaaagtagactcatacggtgagaaagcaatggctgagttgaagaagcaatacgctgtgttggacgcaaaggtattcagcaaaatcccaagaggaccgttgaaagacaagaagaaggattagttttttttggggtttttgttttgtgtgggttttctttggagtgcaatgtgcacaatgctctggtttttatacacgtgggttgtgttgtgttgtgaattggtaatctaaaaggttatgtgttagatctcaacccaaattttacttgacaactttgctttgtttttggagtggtttgtggcattagcacaatgattgtagtcgttctcttgatctatacttttaatgt

SEQ ID NO: 35496 - protein, 271 aa, Arabidopsis thaliana
  peptide (1)..(271): Ceres Seq. ID no. 12370425
  misc_feature (22)..(268): Homolog of NCBI NO: 15233147 NR Description: putative protein; protein id: At3g61560.1
  misc_feature (42)..(261): Homolog of NCBI NO: 15234108 NR Description: hypothetical protein; protein id: At4g01230.1
  misc_feature (20)..(270): Homolog of NCBI NO: 18406991 NR Description: expressed protein
  misc_feature (24)..(59): Homolog of NCBI NO: 34904202 NR Description: P0492F05.25 [Oryza sativa (japonica
  misc_feature (54)..(269): Homolog of NCBI NO: 34904202 NR Description: P0492F05.25 [Oryza sativa (japonica
  misc_feature (17)..(271): Homolog of NCBI NO: 15222616 NR Description: hypothetical protein
  misc_feature (22)..(269): Homolog of NCBI NO: 34909318 NR Description: OSJNBb0021A09.5 [Oryza sativa (japonica
  misc_feature (24)..(271): Homolog of NCBI NO: 15238125 NR Description: putative protein
  misc_feature (1)..(271): Homolog of NCBI NO: 15236556 NR Description: putative protein
  misc_feature (1)..(271): Homolog of NCBI NO: 15237093 NR Description: putative protein
MADEHKHEESSPNLDPAVEVVERESLMEKLSEKIHHKGDSSSSSSSDDENEKKSSSSSPKSLKSKVYRLFGRERPVHKVLGGGKPADIFMWKDKKMSGGVFGGATVAWVLFELMEYHLLTLLCHVMIVALAVLFLWSNATMFIHKSPPKIPEVHIPEEPLLQLASGLRIEINRGISSLREIASGRDIKKFLSAIAGLWVLSILGGCYSFLTLAYIALVLLFTVPLFYDKYEDKVDSYGEKAMAELKKQYAVLDAKVFSKIPRGPLKDKKKD

SEQ ID NO: 35497 - protein, 245 aa, Arabidopsis thaliana
  peptide (1)..(245): Ceres Seq. ID no. 12370426
  misc_feature (1)..(242): Homolog of NCBI NO: 15233147 NR Description: putative protein; protein id: At3g61560.1
  misc_feature (16)..(235): Homolog of NCBI NO: 15234108 NR Description: hypothetical protein; protein id: At4g01230.1
  misc_feature (1)..(244): Homolog of NCBI NO: 18406991 NR Description: expressed protein
  misc_feature (1)..(33): Homolog of NCBI NO: 34904202 NR Description: P0492F05.25 [Oryza sativa (japonica
  misc_feature (28)..(243): Homolog of NCBI NO: 34904202 NR Description: P0492F05.25 [Oryza sativa (japonica
  misc_feature (1)..(245): Homolog of NCBI NO: 15222616 NR Description: hypothetical protein
  misc_feature (1)..(243): Homolog of NCBI NO: 34909318 NR Description: OSJNBb0021A09.5 [Oryza sativa (japonica
  misc_feature (1)..(245): Homolog of NCBI NO: 15238125 NR Description: putative protein
  misc_feature (1)..(245): Homolog of NCBI NO: 15236556 NR Description: putative protein
  misc_feature (1)..(245): Homolog of NCBI NO: 15237093 NR Description: putative protein
MEKLSEKIHHKGDSSSSSSSDDENEKKSSSSSPKSLKSKVYRLFGRERPVHKVLGGGKPADIFMWKDKKMSGGVFGGATVAWVLFELMEYHLLTLLCHVMIVALAVLFLWSNATMFIHKSPPKIPEVHIPEEPLLQLASGLRIEINRGISSLREIASGRDIKKFLSAIAGLWVLSILGGCYSFLTLAYIALVLLFTVPLFYDKYEDKVDSYGEKAMAELKKQYAVLDAKVFSKIPRGPLKDKKKD

SEQ ID NO: 35498 - protein, 182 aa, Arabidopsis thaliana
  peptide (1)..(182): Ceres Seq. ID no. 12370427
  misc_feature (1)..(182): Homolog of NCBI NO: 34897094 NR Description: unknown protein [Oryza sativa (japonica
  misc_feature (1)..(179): Homolog of NCBI NO: 15233147 NR Description: putative protein; protein id: At3g61560.1
  misc_feature (1)..(172): Homolog of NCBI NO: 15234108 NR Description: hypothetical protein; protein id: At4g01230.1
  misc_feature (1)..(181): Homolog of NCBI NO: 18406991 NR Description: expressed protein
  misc_feature (1)..(180): Homolog of NCBI NO: 34904202 NR Description: P0492F05.25 [Oryza sativa (japonica
  misc_feature (1)..(182): Homolog of NCBI NO: 15222616 NR Description: hypothetical protein
  misc_feature (1)..(180): Homolog of NCBI NO: 34909318 NR Description: OSJNBb0021A09.5 [Oryza sativa (japonica
  misc_feature (1)..(182): Homolog of NCBI NO: 15238125 NR Description: putative protein
  misc_feature (1)..(182): Homolog of NCBI NO: 15236556 NR Description: putative protein
  misc_feature (1)..(182): Homolog of NCBI NO: 15237093 NR Description: putative protein
MWKDKKMSGGVFGGATVAWVLFELMEYHLLTLLCHVMIVALAVLFLWSNATMFIHKSPPKIPEVHIPEEPLLQLASGLRIEINRGISSLREIASGRDIKKFLSAIAGLWVLSILGGCYSFLTLAYIALVLLFTVPLFYDKYEDKVDSYGEKAMAELKKQYAVLDAKVFSKIPRGPLKDKKKD

SEQ ID NO: 35499 - DNA, 1289 bp, Arabidopsis thaliana
  misc_feature (1)..(1289): Ceres Seq. ID no. 12324513
  misc_feature: MA Experiment ID: 108461 Result: Up-regulated in Transcription
  misc_feature: MA Experiment 108461 PARAMETER Experiment Name: At_Germinating_Seeds_cDNA_P Parameter: Age (day) Value: 1 vs. 0
  misc_feature: MA Experiment 108461 PARAMETER Experiment Name: At_Germinating_Seeds_cDNA_P Parameter: Tissue Value: Germinating Seeds
  misc_feature: MA Experiment ID: 108462 Result: Up-regulated in Transcription
  misc_feature: MA Experiment 108462 PARAMETER Experiment Name: At_Germinating_Seeds_cDNA_P Parameter: Age (day) Value: 2 vs. 0
  misc_feature: MA Experiment 108462 PARAMETER Experiment Name: At_Germinating_Seeds_cDNA_P Parameter: Tissue Value: Germinating Seeds
  misc_feature: MA Experiment ID: 108463 Result: Up-regulated in Transcription
  misc_feature: MA Experiment 108463 PARAMETER Experiment Name: At_Germinating_Seeds_cDNA_P Parameter: Age (day) Value: 3 vs. 0
  misc_feature: MA Experiment 108463 PARAMETER Experiment Name: At_Germinating_Seeds_cDNA_P Parameter: Tissue Value: Germinating Seeds
  misc_feature: MA Experiment ID: 108464 Result: Up-regulated in Transcription
  misc_feature: MA Experiment 108464 PARAMETER Experiment Name: At_Germinating_Seeds_cDNA_P Parameter: Age (day) Value: 4 vs. 0
  misc_feature: MA Experiment 108464 PARAMETER Experiment Name: At_Germinating_Seeds_cDNA_P Parameter: Tissue Value: Germinating Seeds
  misc_feature: MA Experiment ID: 108469 Result: Down-regulated in Transcription
  misc_feature: MA Experiment ID: 108488 Result: Up-regulated in Transcription
  misc_feature: MA Experiment ID: 108576 Result: Down-regulated in Transcription
  misc_feature: MA Experiment 108576 PARAMETER Experiment Name: At_42deg_Heat_cDNA_P Parameter: Temperature (deg C) Value: 42 vs. 22
  misc_feature: MA Experiment 108576 PARAMETER Experiment Name: At_42deg_Heat_cDNA_P Parameter: Timepoint (hr) Value: 1
  misc_feature: MA Experiment 108576 PARAMETER Experiment Name: At_42deg_Heat_cDNA_P Parameter: Tissue Value: Aerial
  misc_feature: MA Experiment ID: 108579 Result: Up-regulated in Transcription
  misc_feature: MA Experiment 108579 PARAMETER Experiment Name: At_4deg_Cold_cDNA_P Parameter: Temperature (deg C) Value: 4 vs. 22
  misc_feature: MA Experiment 108579 PARAMETER Experiment Name: At_4deg_Cold_cDNA_P Parameter: Timepoint (hr) Value: 6
  misc_feature: MA Experiment 108579 PARAMETER Experiment Name: At_4deg_Cold_cDNA_P Parameter: Tissue Value: Aerial
  misc_feature: MA Experiment ID: 108585 Result: Down-regulated in Transcription
  misc_feature: MA Experiment 108585 PARAMETER Experiment Name: At_5mM_NaNP_cDNA_P Parameter: Timepoint (hr) Value: 6
  misc_feature: MA Experiment 108585 PARAMETER Experiment Name: At_5mM_NaNP_cDNA_P Parameter: Tissue Value: Aerial
  misc_feature: MA Experiment 108585 PARAMETER Experiment Name: At_5mM_NaNP_cDNA_P Parameter: Treatment Value: null
  misc_feature: MA Experiment ID: 108595 Result: Down-regulated in Transcription
  misc_feature: MA Experiment 108595 PARAMETER Experiment Name: At_Ler-pi_Ovule_cDNA_P Parameter: Plant Line Value: null
  misc_feature: MA Experiment ID: 20000069 Result: Up-regulated in Transcription
  misc_feature: MA Experiment 20000069 PARAMETER Experiment Name: At_100uM_ABA_Mutants_cDNA_P Parameter: Plant Line Value: CS23
  misc_feature: MA Experiment 20000069 PARAMETER Experiment Name: At_100uM_ABA_Mutants_cDNA_P Parameter: Timepoint (hr) Value: 6
  misc_feature: MA Experiment 20000069 PARAMETER Experiment Name: At_100uM_ABA_Mutants_cDNA_P Parameter: Tissue Value: Aerial
  misc_feature: MA Experiment 20000069 PARAMETER Experiment Name: At_100uM_ABA_Mutants_cDNA_P Parameter: Treatment Value: 100uM ABA vs. No Treatment
  misc_feature: MA Experiment ID: 20000070 Result: Up-regulated in Transcription
  misc_feature: MA Experiment 20000070 PARAMETER Experiment Name: At_100uM_ABA_Mutants_cDNA_P Parameter: Plant Line Value: CS24
  misc_feature: MA Experiment 20000070 PARAMETER Experiment Name: At_100uM_ABA_Mutants_cDNA_P Parameter: Timepoint (hr) Value: 6
  misc_feature: MA Experiment 20000070 PARAMETER Experiment Name: At_100uM_ABA_Mutants_cDNA_P Parameter: Tissue Value: Aerial
  misc_feature: MA Experiment 20000070 PARAMETER Experiment Name: At_100uM_ABA_Mutants_cDNA_P Parameter: Treatment Value: 100uM ABA vs. No Treatment
  misc_feature: MA Experiment ID: 20000071 Result: Up-regulated in Transcription
  misc_feature: MA Experiment 20000071 PARAMETER Experiment Name: At_100uM_ABA_Mutants_cDNA_P Parameter: Plant Line Value: CS8104
  misc_feature: MA Experiment 20000071 PARAMETER Experiment Name: At_100uM_ABA_Mutants_cDNA_P Parameter: Timepoint (hr) Value: 6
  misc_feature: MA Experiment 20000071 PARAMETER Experiment Name: At_100uM_ABA_Mutants_cDNA_P Parameter: Tissue Value: Aerial
  misc_feature: MA Experiment 20000071 PARAMETER Experiment Name: At_100uM_ABA_Mutants_cDNA_P Parameter: Treatment Value: 100uM ABA vs. No Treatment
  misc_feature: MA Experiment ID: 20000072 Result: Up-regulated in Transcription
  misc_feature: MA Experiment 20000072 PARAMETER Experiment Name: At_100uM_ABA_Mutants_cDNA_P Parameter: Plant Line Value: CS8105
  misc_feature: MA Experiment 20000072 PARAMETER Experiment Name: At_100uM_ABA_Mutants_cDNA_P Parameter: Timepoint (hr) Value: 6
  misc_feature: MA Experiment 20000072 PARAMETER Experiment Name: At_100uM_ABA_Mutants_cDNA_P Parameter: Tissue Value: Aerial
  misc_feature: MA Experiment 20000072 PARAMETER Experiment Name: At_100uM_ABA_Mutants_cDNA_P Parameter: Treatment Value: 100uM ABA vs. No Treatment
  misc_feature: MA Experiment ID: 20000086 Result: Up-regulated in Transcription
  misc_feature: MA Experiment 20000086 PARAMETER Experiment Name: At_100uM_ABA_Mutants_cDNA_P Parameter: Plant Line Value: CS22
  misc_feature: MA Experiment 20000086 PARAMETER Experiment Name: At_100uM_ABA_Mutants_cDNA_P Parameter: Timepoint (hr) Value: 6
  misc_feature: MA Experiment 20000086 PARAMETER Experiment Name: At_100uM_ABA_Mutants_cDNA_P Parameter: Tissue Value: Aerial
  misc_feature: MA Experiment 20000086 PARAMETER Experiment Name: At_100uM_ABA_Mutants_cDNA_P Parameter: Treatment Value: 100uM ABA vs. No Treatment
  misc_feature: MA Experiment ID: 20000088 Result: Up-regulated in Transcription
  misc_feature: MA Experiment 20000088 PARAMETER Experiment Name: At_100uM_ABA_Mutants_cDNA_P Parameter: Plant Line Value: Landsberg
  misc_feature: MA Experiment 20000088 PARAMETER Experiment Name: At_100uM_ABA_Mutants_cDNA_P Parameter: Timepoint (hr) Value: 6
  misc_feature: MA Experiment 20000088 PARAMETER Experiment Name: At_100uM_ABA_Mutants_cDNA_P Parameter: Tissue Value: Aerial
  misc_feature: MA Experiment 20000088 PARAMETER Experiment Name: At_100uM_ABA_Mutants_cDNA_P Parameter: Treatment Value: 100uM ABA vs. No Treatment
  misc_feature: MA Experiment ID: 20000111 Result: Down-regulated in Transcription
  misc_feature: MA Experiment 20000111 PARAMETER Experiment Name: At_42deg_Heat_cDNA_P Parameter: Temperature (deg C) Value: 42 vs. 22
  misc_feature: MA Experiment 20000111 PARAMETER Experiment Name: At_42deg_Heat_cDNA_P Parameter: Timepoint (hr) Value: 6
  misc_feature: MA Experiment 20000111 PARAMETER Experiment Name: At_42deg_Heat_cDNA_P Parameter: Tissue Value: Aerial
  misc_feature: MA Experiment ID: 20000112 Result: Down-regulated in Transcription
  misc_feature: MA Experiment 20000112 PARAMETER Experiment Name: At_42deg_Heat_cDNA_P Parameter: Temperature (deg C) Value: 42 vs. 22
  misc_feature: MA Experiment 20000112 PARAMETER Experiment Name: At_42deg_Heat_cDNA_P Parameter: Timepoint (hr) Value: 2
  misc_feature: MA Experiment 20000112 PARAMETER Experiment Name: At_42deg_Heat_cDNA_P Parameter: Tissue Value: Aerial
  misc_feature: MA Experiment ID: 20000113 Result: Down-regulated in Transcription
  misc_feature: MA Experiment 20000113 PARAMETER Experiment Name: At_42deg_Heat_cDNA_P Parameter: Temperature (deg C) Value: 42 vs. 22
  misc_feature: MA Experiment 20000113 PARAMETER Experiment Name: At_42deg_Heat_cDNA_P Parameter: Timepoint (hr) Value: 8
  misc_feature: MA Experiment 20000113 PARAMETER Experiment Name: At_42deg_Heat_cDNA_P Parameter: Tissue Value: Aerial
  misc_feature: MA Experiment ID: 20000144 Result: Down-regulated in Transcription
  misc_feature: MA Experiment 20000144 PARAMETER Experiment Name: At_42deg_Heat_cDNA_P Parameter: Temperature (deg C) Value: 42 vs. 22
  misc_feature: MA Experiment 20000144 PARAMETER Experiment Name: At_42deg_Heat_cDNA_P Parameter: Timepoint (hr) Value: 1
  misc_feature: MA Experiment 20000144 PARAMETER Experiment Name: At_42deg_Heat_cDNA_P Parameter: Tissue Value: Aerial
  misc_feature: MA Experiment ID: 20000171 Result: Down-regulated in Transcription
  misc_feature: MA Experiment 20000171 PARAMETER Experiment Name: At_42deg_Heat_P Parameter: Age (day) Value: 14
  misc_feature: MA Experiment 20000171 PARAMETER Experiment Name: At_42deg_Heat_P Parameter: Organism Value: A. thaliana
  misc_feature: MA Experiment 20000171 PARAMETER Experiment Name: At_42deg_Heat_P Parameter: Plant Line Value: WS
  misc_feature: MA Experiment 20000171 PARAMETER Experiment Name: At_42deg_Heat_P Parameter: Temperature (deg C) Value: 42 vs. 22
  misc_feature: MA Experiment 20000171 PARAMETER Experiment Name: At_42deg_Heat_P Parameter: Timepoint (hr) Value: 1
  misc_feature: MA Experiment 20000171 PARAMETER Experiment Name: At_42deg_Heat_P Parameter: Tissue Value: Aerial
  misc_feature: MA Experiment ID: 20000173 Result: Down-regulated in Transcription
  misc_feature: MA Experiment 20000173 PARAMETER Experiment Name: At_42deg_Heat_P Parameter: Age (day) Value: 14
  misc_feature: MA Experiment 20000173 PARAMETER Experiment Name: At_42deg_Heat_P Parameter: Organism Value: A. thaliana
  misc_feature: MA Experiment 20000173 PARAMETER Experiment Name: At_42deg_Heat_P Parameter: Plant Line Value: WS
  misc_feature: MA Experiment 20000173 PARAMETER Experiment Name: At_42deg_Heat_P Parameter: Temperature (deg C) Value: 42 vs. 22
  misc_feature: MA Experiment 20000173 PARAMETER Experiment Name: At_42deg_Heat_P Parameter: Timepoint (hr) Value: 6
  misc_feature: MA Experiment 20000173 PARAMETER Experiment Name: At_42deg_Heat_P Parameter: Tissue Value: Aerial
  misc_feature: MA Experiment ID: 20000180 Result: Up-regulated in Transcription
  misc_feature: MA Experiment 20000180 PARAMETER Experiment Name: At_Germinating_Seeds_P Parameter: Age (hr) Value: 24 vs. 0
  misc_feature: MA Experiment 20000180 PARAMETER Experiment Name: At_Germinating_Seeds_P Parameter: Tissue Value: Germinating Seeds
  misc_feature: MA Experiment ID: 20000182 Result: Down-regulated in Transcription
  misc_feature: MA Experiment 20000182 PARAMETER Experiment Name: At_2mM_SA_P Parameter: Age (day) Value: 14
  misc_feature: MA Experiment 20000182 PARAMETER Experiment Name: At_2mM_SA_P Parameter: Organism Value: A. thaliana
  misc_feature: MA Experiment 20000182 PARAMETER Experiment Name: At_2mM_SA_P Parameter: Plant Line Value: WS
  misc_feature: MA Experiment 20000182 PARAMETER Experiment Name: At_2mM_SA_P Parameter: Timepoint (hr) Value: 6
  misc_feature: MA Experiment 20000182 PARAMETER Experiment Name: At_2mM_SA_P Parameter: Tissue Value: Aerial
  misc_feature: MA Experiment 20000182 PARAMETER Experiment Name: At_2mM_SA_P Parameter: Treatment Value: 2mM SA vs. No Treatment
  misc_feature: MA Experiment ID: 20000185 Result: Down-regulated in Transcription
  misc_feature: MA Experiment 20000185 PARAMETER Experiment Name: At_Roots__P Parameter: Age (day) Value: 7 vs. 21
  misc_feature: MA Experiment 20000185 PARAMETER Experiment Name: At_Roots__P Parameter: Organism Value: A. thaliana
  misc_feature: MA Experiment 20000185 PARAMETER Experiment Name: At_Roots__P Parameter: Tissue Value: Roots vs. Whole Plant
  misc_feature: MA Experiment ID: 20000235 Result: Up-regulated in Transcription
  misc_feature: MA Experiment 20000235 PARAMETER Experiment Name: At_Siliques_P Parameter: Age (day) Value: 21
  misc_feature: MA Experiment 20000235 PARAMETER Experiment Name: At_Siliques_P Parameter: Organism Value: A. thaliana
  misc_feature: MA Experiment 20000235 PARAMETER Experiment Name: At_Siliques_P Parameter: Plant Line Value: WS
  misc_feature: MA Experiment 20000235 PARAMETER Experiment Name: At_Siliques_P Parameter: Tissue Value: 5-10mm Siliques vs. Whole Plant
  misc_feature: MA Experiment ID: 20000439 Result: Down-regulated in Transcription
  misc_feature: MA Experiment 20000439 PARAMETER Experiment Name: At_Roots__P Parameter: Age (day) Value: 14 vs. 21
  misc_feature: MA Experiment 20000439 PARAMETER Experiment Name: At_Roots__P Parameter: Organism Value: A. thaliana
  misc_feature: MA Experiment 20000439 PARAMETER Experiment Name: At_Roots__P Parameter: Tissue Value: Roots vs. Whole Plant
  misc_feature: MA Experiment ID: 20001247 Result: Up-regulated in Transcription
  misc_feature: MA Experiment 20001247 PARAMETER Experiment Name: At_Far-red-induction_P Parameter: Age (day) Value: 7
  misc_feature: MA Experiment 20001247 PARAMETER Experiment Name: At_Far-red-induction_P Parameter: Light Value: Far-red vs. White
  misc_feature: MA Experiment 20001247 PARAMETER Experiment Name: At_Far-red-induction_P Parameter: Organism Value: A. thaliana
  misc_feature: MA Experiment 20001247 PARAMETER Experiment Name: At_Far-red-induction_P Parameter: Plant Line Value: Columbia
  misc_feature: MA Experiment 20001247 PARAMETER Experiment Name: At_Far-red-induction_P Parameter: Timepoint (hr) Value: 1
  misc_feature: MA Experiment 20001247 PARAMETER Experiment Name: At_Far-red-induction_P Parameter: Tissue Value: Whole Plant
  misc_feature: MA Experiment ID: 20001557 Result: Up-regulated in Transcription
  misc_feature: MA Experiment 20001557 PARAMETER Experiment Name: At_Drought_Soil_Dry_P Parameter: Age (day) Value: 27
  misc_feature: MA Experiment 20001557 PARAMETER Experiment Name: At_Drought_Soil_Dry_P Parameter: Organism Value: A. thaliana
  misc_feature: MA Experiment 20001557 PARAMETER Experiment Name: At_Drought_Soil_Dry_P Parameter: Plant Line Value: WS
  misc_feature: MA Experiment 20001557 PARAMETER Experiment Name: At_Drought_Soil_Dry_P Parameter: Post Timepoint (hr) Value: 3
  misc_feature: MA Experiment 20001557 PARAMETER Experiment Name: At_Drought_Soil_Dry_P Parameter: Post-Treatment Value: Re-Water vs. No Drought
  misc_feature: MA Experiment 20001557 PARAMETER Experiment Name: At_Drought_Soil_Dry_P Parameter: Timepoint (day) Value: 13
  misc_feature: MA Experiment 20001557 PARAMETER Experiment Name: At_Drought_Soil_Dry_P Parameter: Treatment Value: Drought vs. No Drought
  misc_feature: MA Experiment ID: 20001904 Result: Down-regulated in Transcription
  misc_feature: MA Experiment 20001904 PARAMETER Experiment Name: At_Drought_Reproduction_P Parameter: Age (day) Value: 37
  misc_feature: MA Experiment 20001904 PARAMETER Experiment Name: At_Drought_Reproduction_P Parameter: Organism Value: A. thaliana
  misc_feature: MA Experiment 20001904 PARAMETER Experiment Name: At_Drought_Reproduction_P Parameter: Plant Line Value: WS
  misc_feature: MA Experiment 20001904 PARAMETER Experiment Name: At_Drought_Reproduction_P Parameter: Timepoint (day) Value: 7
  misc_feature: MA Experiment 20001904 PARAMETER Experiment Name: At_Drought_Reproduction_P Parameter: Tissue Value: Rosettes
  misc_feature: MA Experiment 20001904 PARAMETER Experiment Name: At_Drought_Reproduction_P Parameter: Treatment Value: Drought vs. No Drought
  misc_feature: MA Experiment ID: 20001905 Result: Down-regulated in Transcription
  misc_feature: MA Experiment 20001905 PARAMETER Experiment Name: At_Drought_Reproduction_P Parameter: Age (day) Value: 40
  misc_feature: MA Experiment 20001905 PARAMETER Experiment Name: At_Drought_Reproduction_P Parameter: Organism Value: A. thaliana
  misc_feature: MA Experiment 20001905 PARAMETER Experiment Name: At_Drought_Reproduction_P Parameter: Plant Line Value: WS
  misc_feature: MA Experiment 20001905 PARAMETER Experiment Name: At_Drought_Reproduction_P Parameter: Timepoint (day) Value: 10
  misc_feature: MA Experiment 20001905 PARAMETER Experiment Name: At_Drought_Reproduction_P Parameter: Tissue Value: Rosettes
  misc_feature: MA Experiment 20001905 PARAMETER Experiment Name: At_Drought_Reproduction_P Parameter: Treatment Value: Drought vs. No Drought
  misc_feature: MA Experiment ID: 20001906 Result: Down-regulated in Transcription
  misc_feature: MA Experiment 20001906 PARAMETER Experiment Name: At_Drought_Reproduction_P Parameter: Age (day) Value: 35
  misc_feature: MA Experiment 20001906 PARAMETER Experiment Name: At_Drought_Reproduction_P Parameter: Organism Value: A. thaliana
  misc_feature: MA Experiment 20001906 PARAMETER Experiment Name: At_Drought_Reproduction_P Parameter: Plant Line Value: WS
  misc_feature: MA Experiment 20001906 PARAMETER Experiment Name: At_Drought_Reproduction_P Parameter: Timepoint (day) Value: 5
  misc_feature: MA Experiment 20001906 PARAMETER Experiment Name: At_Drought_Reproduction_P Parameter: Tissue Value: Siliques
  misc_feature: MA Experiment 20001906 PARAMETER Experiment Name: At_Drought_Reproduction_P Parameter: Treatment Value: Drought vs. No Drought
  misc_feature: MA Experiment ID: 20001907 Result: Down-regulated in Transcription
  misc_feature: MA Experiment 20001907 PARAMETER Experiment Name: At_Drought_Reproduction_P Parameter: Age (day) Value: 37
  misc_feature: MA Experiment 20001907 PARAMETER Experiment Name: At_Drought_Reproduction_P Parameter: Organism Value: A. thaliana
  misc_feature: MA Experiment 20001907 PARAMETER Experiment Name: At_Drought_Reproduction_P Parameter: Plant Line Value: WS
  misc_feature: MA Experiment 20001907 PARAMETER Experiment Name: At_Drought_Reproduction_P Parameter: Timepoint (day) Value: 7
  misc_feature: MA Experiment 20001907 PARAMETER Experiment Name: At_Drought_Reproduction_P Parameter: Tissue Value: Siliques
  misc_feature: MA Experiment 20001907 PARAMETER Experiment Name: At_Drought_Reproduction_P Parameter: Treatment Value: Drought vs. No Drought
  misc_feature: MA Experiment ID: 20001908 Result: Down-regulated in Transcription
  misc_feature: MA Experiment 20001908 PARAMETER Experiment Name: At_Drought_Reproduction_P Parameter: Age (day) Value: 40
  misc_feature: MA Experiment 20001908 PARAMETER Experiment Name: At_Drought_Reproduction_P Parameter: Organism Value: A. thaliana
  misc_feature: MA Experiment 20001908 PARAMETER Experiment Name: At_Drought_Reproduction_P Parameter: Plant Line Value: WS
  misc_feature: MA Experiment 20001908 PARAMETER Experiment Name: At_Drought_Reproduction_P Parameter: Timepoint (day) Value: 10
  misc_feature: MA Experiment 20001908 PARAMETER Experiment Name: At_Drought_Reproduction_P Parameter: Tissue Value: Siliques
  misc_feature: MA Experiment 20001908 PARAMETER Experiment Name: At_Drought_Reproduction_P Parameter: Treatment Value: Drought vs. No Drought
  misc_feature: MA Experiment ID: 20001911 Result: Down-regulated in Transcription
  misc_feature: MA Experiment 20001911 PARAMETER Experiment Name: At_Drought_Reproduction_P Parameter: Age (day) Value: 40
  misc_feature: MA Experiment 20001911 PARAMETER Experiment Name: At_Drought_Reproduction_P Parameter: Organism Value: A. thaliana
  misc_feature: MA Experiment 20001911 PARAMETER Experiment Name: At_Drought_Reproduction_P Parameter: Plant Line Value: WS
  misc_feature: MA Experiment 20001911 PARAMETER Experiment Name: At_Drought_Reproduction_P Parameter: Timepoint (day) Value: 10
  misc_feature: MA Experiment 20001911 PARAMETER Experiment Name: At_Drought_Reproduction_P Parameter: Tissue Value: Flowers
  misc_feature: MA Experiment 20001911 PARAMETER Experiment Name: At_Drought_Reproduction_P Parameter: Treatment Value: Drought vs. No Drought
acattcactcatatcactacactttccattaattaccaatatatttttactacttaaaaaagatattggtcttgaaatggagagttacttaacgaaatggtgtgtagtgcttgtgttgttgtgtttcgggtttagtgtagtaaaagcacaagcacaagctcaagttccatgtttctttgtttttggtgactctttggttgacaatggaaacaacaacggtcttatttctattgcaagatccaattacttcccttacggtatcgatttcggcggccctaccggccgtttctccaacggcaagactactgttgatgtgatcgctgagctacttggatttaatggctacattcctgcgtacaatactgtgagtggtcggcaaatactctccggagttaactacgcttccgcagctgctggaatccgagaagaaaccggtcgacaattgggacaaaggataagctttagtggacaagttaggaactaccagaccacagtatcgcaagttgtgcagcttctaggagacgagactcgtgcagctgattacctcaagagatgtatttactctgttggtttaggaagcaacgactatctcaacaactacttcatgcctacgttttactcttcaagcagacaattcacacccgaacaatacgctaacgatctcatcagtcgctacagcacccagctcaatgcattatacaactatggggctcgaaagtttgcattgagtggaattggagcagttggttgtagtcctaacgcgctcgcaggcagtcccgacggtaggacttgcgtagaccgcatcaactcagcaaaccagatcttcaacaacaagctaagatctcttgttgatcagctcaacaacaatcaccctgatgcaaagttcatctacatcaatgcttatggcattttccaggacatgatcacaaatcctgccagatttgggtttagagtgacgaacgcgggatgttgcggtattgggaggaatgctggacagatcacatgtttaccgggacagagaccgtgtagagaccgcaatgcgtacgtgttctgggacgcatttcaccctactgaagccgcaaatgtgatcatcgcaaggagatcgtacaatgcacaatcggcttcagacgcttaccctatggatatttcaaggctggcacagctttgaagaaacatagtaaaataagaactaaagaagttccacaaaccaatgtgtgatcttgttgtgtaccgtaccgctatttaagattttcttgacgtaattgaaatcgagtaaaacattattctac

SEQ ID NO: 35500 - protein, 388 aa, Arabidopsis thaliana
  peptide (1)..(388): Ceres Seq. ID no. 12324514
  misc_feature (58)..(368): Pfam Name: GDSL-like Lipase/Acylhydrolase Pfam Description: GDSL-like Lipase/Acylhydrolase
  misc_feature (59)..(377): Homolog of NCBI NO: 30693137 NR Description: lipase family [Arabidopsis thaliana]
  misc_feature (30)..(388): Homolog of NCBI NO: 21618199 NR Description: GDSL-motif lipase/hydrolase-like protein
  misc_feature (30)..(388): Homolog of NCBI NO: 18415211 NR Description: Expressed protein
  misc_feature (20)..(388): Homolog of NCBI NO: 7485419 NR Description: hypothetical protein F13C5.140 - Arabidopsis
  misc_feature (30)..(388): Homolog of NCBI NO: 21553940 NR Description: GDSL-motif lipase/hydrolase-like protein
  misc_feature (30)..(388): Homolog of NCBI NO: 15242458 NR Description: GDSL-motif lipase/hydrolase-like protein
  misc_feature (26)..(388): Homolog of NCBI NO: 21594055 NR Description: lipase/hydrolase, putative [Arabidopsis thaliana]
  misc_feature (26)..(388): Homolog of NCBI NO: 15220512 NR Description: lipase/hydrolase, putative
  misc_feature (26)..(388): Homolog of NCBI NO: 21592417 NR Description: lipase/hydrolase, putative [Arabidopsis thaliana]
  misc_feature (26)..(388): Homolog of NCBI NO: 15220514 NR Description: lipase/hydrolase, putative
HSLISLHFPLITNIFLLLKKDIGLEMESYLTKWCVVLVLLCFGFSVVKAQAQAQVPCFFVFGDSLVDNGNNNGLISIARSNYFPYGIDFGGPTGRFSNGKTTVDVIAELLGFNGYIPAYNTVSGRQILSGVNYASAAAGIREETGRQLGQRISFSGQVRNYQTTVSQVVQLLGDETRAADYLKRCIYSVGLGSNDYLNNYFMPTFYSSSRQFTPEQYANDLISRYSTQLNALYNYGARKFALSGIGAVGCSPNALAGSPDGRTCVDRINSANQIFNNKLRSLVDQLNNNHPDAKFIYINAYGIFQDMITNPARFGFRVTNAGCCGIGRNAGQITCLPGQRPCRDRNAYVFWDAFHPTEAANVIIARRSYNAQSASDAYPMDISRLAQL

SEQ ID NO: 35501 - protein, 363 aa, Arabidopsis thaliana
  peptide (1)..(363): Ceres Seq. ID no. 12324515
  misc_feature (33)..(343): Pfam Name: GDSL-like Lipase/Acylhydrolase Pfam Description: GDSL-like Lipase/Acylhydrolase
  misc_feature (34)..(352): Homolog of NCBI NO: 30693137 NR Description: lipase family [Arabidopsis thaliana]
  misc_feature (5)..(363): Homolog of NCBI NO: 21618199 NR Description: GDSL-motif lipase/hydrolase-like protein
  misc_feature (5)..(363): Homolog of NCBI NO: 18415211 NR Description: Expressed protein
  misc_feature (1)..(363): Homolog of NCBI NO: 7485419 NR Description: hypothetical protein F13C5.140 - Arabidopsis
  misc_feature (5)..(363): Homolog of NCBI NO: 21553940 NR Description: GDSL-motif lipase/hydrolase-like protein
  misc_feature (5)..(363): Homolog of NCBI NO: 15242458 NR Description: GDSL-motif lipase/hydrolase-like protein
  misc_feature (1)..(363): Homolog of NCBI NO: 21594055 NR Description: lipase/hydrolase, putative [Arabidopsis thaliana]
  misc_feature (1)..(363): Homolog of NCBI NO: 15220512 NR Description: lipase/hydrolase, putative
  misc_feature (1)..(363): Homolog of NCBI NO: 21592417 NR Description: lipase/hydrolase, putative [Arabidopsis thaliana]
  misc_feature (1)..(363): Homolog of NCBI NO: 15220514 NR Description: lipase/hydrolase, putative
MESYLTKWCVVLVLLCFGFSVVKAQAQAQVPCFFVFGDSLVDNGNNNGLISIARSNYFPYGIDFGGPTGRFSNGKTTVDVIAELLGFNGYIPAYNTVSGRQILSGVNYASAAAGIREETGRQLGQRISFSGQVRNYQTTVSQVVQLLGDETRAADYLKRCIYSVGLGSNDYLNNYFMPTFYSSSRQFTPEQYANDLISRYSTQLNALYNYGARKFALSGIGAVGCSPNALAGSPDGRTCVDRINSANQIFNNKLRSLVDQLNNNHPDAKFIYINAYGIFQDMITNPARFGFRVTNAGCCGIGRNAGQITCLPGQRPCRDRNAYVFWDAFHPTEAANVIIARRSYNAQSASDAYPMDISRLAQL

SEQ ID NO: 35502 - DNA, 865 bp, Arabidopsis thaliana
  misc_feature (1)..(865): Ceres Seq. ID no. 13580449
  misc_feature: MA Experiment ID: 108434 Result: Up-regulated in Transcription
  misc_feature: MA Experiment 108434 PARAMETER Experiment Name: At_Root_Tips_cDNA_P Parameter: Tissue Value: Root Tips
  misc_feature: MA Experiment ID: 108462 Result: Down-regulated in Transcription
  misc_feature: MA Experiment 108462 PARAMETER Experiment Name: At_Germinating_Seeds_cDNA_P Parameter: Age (day) Value: 2 vs. 0
  misc_feature: MA Experiment 108462 PARAMETER Experiment Name: At_Germinating_Seeds_cDNA_P Parameter: Tissue Value: Germinating Seeds
  misc_feature: MA Experiment ID: 108463 Result: Down-regulated in Transcription
  misc_feature: MA Experiment 108463 PARAMETER Experiment Name: At_Germinating_Seeds_cDNA_P Parameter: Age (day) Value: 3 vs. 0
  misc_feature: MA Experiment 108463 PARAMETER Experiment Name: At_Germinating_Seeds_cDNA_P Parameter: Tissue Value: Germinating Seeds
  misc_feature: MA Experiment ID: 108464 Result: Down-regulated in Transcription
  misc_feature: MA Experiment 108464 PARAMETER Experiment Name: At_Germinating_Seeds_cDNA_P Parameter: Age (day) Value: 4 vs. 0
  misc_feature: MA Experiment 108464 PARAMETER Experiment Name: At_Germinating_Seeds_cDNA_P Parameter: Tissue Value: Germinating Seeds
  misc_feature: MA Experiment ID: 108488 Result: Up-regulated in Transcription
  misc_feature: MA Experiment ID: 108489 Result: Up-regulated in Transcription
  misc_feature: MA Experiment ID: 20000224 Result: Down-regulated in Transcription
  misc_feature: MA Experiment ID: 20000235 Result: Up-regulated in Transcription
  misc_feature: MA Experiment 20000235 PARAMETER Experiment Name: At_Siliques_P Parameter: Age (day) Value: 21
  misc_feature: MA Experiment 20000235 PARAMETER Experiment Name: At_Siliques_P Parameter: Organism Value: A. thaliana
  misc_feature: MA Experiment 20000235 PARAMETER Experiment Name: At_Siliques_P Parameter: Plant Line Value: WS
  misc_feature: MA Experiment 20000235 PARAMETER Experiment Name: At_Siliques_P Parameter: Tissue Value: 5-10mm Siliques vs. Whole Plant
  misc_feature: MA Experiment ID: 20000794 Result: Down-regulated in Transcription
  misc_feature: MA Experiment 20000794 PARAMETER Experiment Name: At_Petals_P Parameter: Age (day) Value: 23-25 days
  misc_feature: MA Experiment 20000794 PARAMETER Experiment Name: At_Petals_P Parameter: Plant Line Value: WS
  misc_feature: MA Experiment 20000794 PARAMETER Experiment Name: At_Petals_P Parameter: Tissue Value: Petals vs. Whole plant
  misc_feature: MA Experiment ID: 20001558 Result: Up-regulated in Transcription
  misc_feature: MA Experiment 20001558 PARAMETER Experiment Name: At_Drought_Soil_Dry_P Parameter: Age (day) Value: 27
  misc_feature: MA Experiment 20001558 PARAMETER Experiment Name: At_Drought_Soil_Dry_P Parameter: Organism Value: A. thaliana
  misc_feature: MA Experiment 20001558 PARAMETER Experiment Name: At_Drought_Soil_Dry_P Parameter: Plant Line Value: WS
  misc_feature: MA Experiment 20001558 PARAMETER Experiment Name: At_Drought_Soil_Dry_P Parameter: Post Timepoint (hr) Value: 6
  misc_feature: MA Experiment 20001558 PARAMETER Experiment Name: At_Drought_Soil_Dry_P Parameter: Post-Treatment Value: Re-Water vs. No Drought
  misc_feature: MA Experiment 20001558 PARAMETER Experiment Name: At_Drought_Soil_Dry_P Parameter: Timepoint (day) Value: 13
  misc_feature: MA Experiment 20001558 PARAMETER Experiment Name: At_Drought_Soil_Dry_P Parameter: Treatment Value: Drought vs. No Drought
  misc_feature: MA Experiment ID: 20001757 Result: Up-regulated in Transcription
  misc_feature: MA Experiment 20001757 PARAMETER Experiment Name: At_50mM_NH4NO3_L-to-H_P Parameter: Timepoint (hr) Value: 6
  misc_feature: MA Experiment 20001757 PARAMETER Experiment Name: At_50mM_NH4NO3_L-to-H_P Parameter: Tissue Value: Leaf
  misc_feature: MA Experiment 20001757 PARAMETER Experiment Name: At_50mM_NH4NO3_L-to-H_P Parameter: Treatment Value: 50mM NH4NO3 vs 100mM Mannitol
aattccaaaaacactccccaaatataatttcccgagaaaatcctcagccgctcgagctcagagtcgaaaatggtgtcaggatcagggatattctcgaagcgcgttgtcgtcgacgcgcgccaccacatgcttggccgtcttgcgtcgatcaccgccaaagagcttctcaatggccagaaagttgtcattgtccggtgcgaagagatttgcctctccggtggactcgttcgtcagaaaatgaagtacatgaggtttcttcgcaaacgtatgaacactaaaccttctcatggtcctattcacttccgtgctccttccaaaatcttctggcgtaccgttcgcggtatgattccacacaagacgaagcgtggagctgctgcactagcacgtttgaaggtatatgaaggtgttcctactccatatgacaagatcaagaggatgggtcatccctgatgctctcaaggtgttgaggcttcaagctggtcacaaatactgtctgttgggccgtctttcttctgaagttgggtggaaccattacgacaccatcaaggagctggagacaaagaggaaggagagagcccacgtggtttacgagcgaaagaagcaacttaacaaacttagagttaaggccgagaaggtcgctgaagagaagctcggagcacagctcgatattcttgcgccagttaagtactgagcttgtcagtagtagttttttttttttggtaaggagcttgtcagtagtagtttgtctttgcatgttttgagccaacccaatacctttttactttttatcttttacttaggtcttgtatcgaaatttgtactcctaacattttattcttgagttttatttattatattgcgtggc

SEQ ID NO: 35503 - protein, 126 aa, Arabidopsis thaliana
  peptide (1)..(126): Ceres Seq. ID no. 13580450
  misc_feature (11)..(126): Pfam Name: Ribosomal protein L13 Pfam Description: Ribosomal protein L13
  misc_feature (1)..(126): Homolog of NCBI NO: 40748267 NR Description: 60S ribosomal protein L13a [Capsicum annuum]
  misc_feature (1)..(126): Homolog of NCBI NO: 33146452 NR Description: putative 60S ribosomal protein
  misc_feature (1)..(126): Homolog of NCBI NO: 37718812 NR Description: putative ribosomal protein L13a
  misc_feature (1)..(126): Homolog of NCBI NO: 21326116 NR Description: putative 60S ribosomal protein [Sorghum bicolor]
  misc_feature (1)..(126): Homolog of NCBI NO: 3914535 NR Description: 60S RIBOSOMAL PROTEIN L13A
  misc_feature (1)..(126): Homolog of NCBI NO: 19423912 NR Description: putative 60S ribosomal protein [Arabidopsis
  misc_feature (1)..(126): Homolog of NCBI NO: 15230197 NR Description: 60S ribosomal protein L13A (RPL13aB) [Arabidopsis
  misc_feature (1)..(126): Homolog of NCBI NO: 15231394 NR Description: 60S ribosomal protein L13A (RPL13aA) [Arabidopsis
  misc_feature (1)..(126): Homolog of NCBI NO: 15235617 NR Description: 60S ribosomal protein L13A (RPL13aC) [Arabidopsis
  misc_feature (1)..(126): Homolog of NCBI NO: 15239698 NR Description: 60S ribosomal protein L13A (RPL13aD) [Arabidopsis
MVSGSGIFSKRVVVDARHHMLGRLASITAKELLNGQKVVIVRCEEICLSGGLVRQKMKYMRFLRKRMNTKPSHGPIHFRAPSKIFWRTVRGMIPHKTKRGAAALARLKVYEGVPTPYDKIKRMGHP

SEQ ID NO: 35504 - protein, 107 aa, Arabidopsis thaliana
  peptide (1)..(107): Ceres Seq. ID no. 13580451
  misc_feature (1)..(107): Pfam Name: Ribosomal protein L13 Pfam Description: Ribosomal protein L13
  misc_feature (1)..(107): Homolog of NCBI NO: 40748267 NR Description: 60S ribosomal protein L13a [Capsicum annuum]
  misc_feature (1)..(107): Homolog of NCBI NO: 33146452 NR Description: putative 60S ribosomal protein
  misc_feature (1)..(107): Homolog of NCBI NO: 37718812 NR Description: putative ribosomal protein L13a
  misc_feature (1)..(107): Homolog of NCBI NO: 21326116 NR Description: putative 60S ribosomal protein [Sorghum bicolor]
  misc_feature (1)..(107): Homolog of NCBI NO: 3914535 NR Description: 60S RIBOSOMAL PROTEIN L13A
  misc_feature (1)..(107): Homolog of NCBI NO: 19423912 NR Description: putative 60S ribosomal protein [Arabidopsis
  misc_feature (1)..(107): Homolog of NCBI NO: 15230197 NR Description: 60S ribosomal protein L13A (RPL13aB) [Arabidopsis
  misc_feature (1)..(107): Homolog of NCBI NO: 15231394 NR Description: 60S ribosomal protein L13A (RPL13aA) [Arabidopsis
  misc_feature (1)..(107): Homolog of NCBI NO: 15235617 NR Description: 60S ribosomal protein L13A (RPL13aC) [Arabidopsis
  misc_feature (1)..(107): Homolog of NCBI NO: 15239698 NR Description: 60S ribosomal protein L13A (RPL13aD) [Arabidopsis
MLGRLASITAKELLNGQKVVIVRCEEICLSGGLVRQKMKYMRFLRKRMNTKPSHGPIHFRAPSKIFWRTVRGMIPHKTKRGAAALARLKVYEGVPTPYDKIKRMGHP

SEQ ID NO: 35505 - protein, 97 aa, Arabidopsis thaliana
  peptide (1)..(97): Ceres Seq. ID no. 13580452
  misc_feature (15)..(80): Homolog of NCBI NO: 40748267 NR Description: 60S ribosomal protein L13a [Capsicum annuum]
  misc_feature (10)..(97): Homolog of NCBI NO: 33146452 NR Description: putative 60S ribosomal protein
  misc_feature (10)..(97): Homolog of NCBI NO: 37718812 NR Description: putative ribosomal protein L13a
  misc_feature (15)..(97): Homolog of NCBI NO: 21326116 NR Description: putative 60S ribosomal protein [Sorghum bicolor]
  misc_feature (15)..(97): Homolog of NCBI NO: 3914535 NR Description: 60S RIBOSOMAL PROTEIN L13A
  misc_feature (15)..(97): Homolog of NCBI NO: 19423912 NR Description: putative 60S ribosomal protein [Arabidopsis
  misc_feature (15)..(97): Homolog of NCBI NO: 15230197 NR Description: 60S ribosomal protein L13A (RPL13aB) [Arabidopsis
  misc_feature (15)..(97): Homolog of NCBI NO: 15231394 NR Description: 60S ribosomal protein L13A (RPL13aA) [Arabidopsis
  misc_feature (15)..(97): Homolog of NCBI NO: 15235617 NR Description: 60S ribosomal protein L13A (RPL13aC) [Arabidopsis
  misc_feature (15)..(97): Homolog of NCBI NO: 15239698 NR Description: 60S ribosomal protein L13A (RPL13aD) [Arabidopsis
MKVFLLHMTRSRGWVIPDALKVLRLQAGHKYCLLGRLSSEVGWNHYDTIKELETKRKERAHVVYERKKQLNKLRVKAEKVAEEKLGAQLDILAPVKY

SEQ ID NO: 35506 - DNA, 627 bp, Arabidopsis thaliana
  misc_feature (1)..(627): Ceres Seq. ID no. 12377321
  misc_feature: MA Experiment ID: 108434 Result: Down-regulated in Transcription
  misc_feature: MA Experiment 108434 PARAMETER Experiment Name: At_Root_Tips_cDNA_P Parameter: Tissue Value: Root Tips
  misc_feature: MA Experiment ID: 108435 Result: Down-regulated in Transcription
  misc_feature: MA Experiment 108435 PARAMETER Experiment Name: At_stm_Mutants_cDNA_P Parameter: Plant Line Value: wt Landsburg vs stm
  misc_feature: MA Experiment 108435 PARAMETER Experiment Name: At_stm_Mutants_cDNA_P Parameter: Tissue Value: Shoot Apical Meristem Region
  misc_feature: MA Experiment ID: 108461 Result: Up-regulated in Transcription
  misc_feature: MA Experiment 108461 PARAMETER Experiment Name: At_Germinating_Seeds_cDNA_P Parameter: Age (day) Value: 1 vs. 0
  misc_feature: MA Experiment 108461 PARAMETER Experiment Name: At_Germinating_Seeds_cDNA_P Parameter: Tissue Value: Germinating Seeds
  misc_feature: MA Experiment ID: 108462 Result: Up-regulated in Transcription
  misc_feature: MA Experiment 108462 PARAMETER Experiment Name: At_Germinating_Seeds_cDNA_P Parameter: Age (day) Value: 2 vs. 0
  misc_feature: MA Experiment 108462 PARAMETER Experiment Name: At_Germinating_Seeds_cDNA_P Parameter: Tissue Value: Germinating Seeds
  misc_feature: MA Experiment ID: 108464 Result: Up-regulated in Transcription
  misc_feature: MA Experiment 108464 PARAMETER Experiment Name: At_Germinating_Seeds_cDNA_P Parameter: Age (day) Value: 4 vs. 0
  misc_feature: MA Experiment 108464 PARAMETER Experiment Name: At_Germinating_Seeds_cDNA_P Parameter: Tissue Value: Germinating Seeds
  misc_feature: MA Experiment ID: 108488 Result: Up-regulated in Transcription
  misc_feature: MA Experiment ID: 108595 Result: Down-regulated in Transcription
  misc_feature: MA Experiment 108595 PARAMETER Experiment Name: At_Ler-pi_Ovule_cDNA_P Parameter: Plant Line Value: null
  misc_feature: MA Experiment ID: 20000070 Result: Down-regulated in Transcription
  misc_feature: MA Experiment 20000070 PARAMETER Experiment Name: At_100uM_ABA_Mutants_cDNA_P Parameter: Plant Line Value: CS24
  misc_feature: MA Experiment 20000070 PARAMETER Experiment Name: At_100uM_ABA_Mutants_cDNA_P Parameter: Timepoint (hr) Value: 6
  misc_feature: MA Experiment 20000070 PARAMETER Experiment Name: At_100uM_ABA_Mutants_cDNA_P Parameter: Tissue Value: Aerial
  misc_feature: MA Experiment 20000070 PARAMETER Experiment Name: At_100uM_ABA_Mutants_cDNA_P Parameter: Treatment Value: 100uM ABA vs. No Treatment
  misc_feature: MA Experiment ID: 20000088 Result: Down-regulated in Transcription
  misc_feature: MA Experiment 20000088 PARAMETER Experiment Name: At_100uM_ABA_Mutants_cDNA_P Parameter: Plant Line Value: Landsberg
  misc_feature: MA Experiment 20000088 PARAMETER Experiment Name: At_100uM_ABA_Mutants_cDNA_P Parameter: Timepoint (hr) Value: 6
  misc_feature: MA Experiment 20000088 PARAMETER Experiment Name: At_100uM_ABA_Mutants_cDNA_P Parameter: Tissue Value: Aerial
  misc_feature: MA Experiment 20000088 PARAMETER Experiment Name: At_100uM_ABA_Mutants_cDNA_P Parameter: Treatment Value: 100uM ABA vs. No Treatment
  misc_feature: MA Experiment ID: 20000090 Result: Down-regulated in Transcription
  misc_feature: MA Experiment ID: 20000113 Result: Up-regulated in Transcription
  misc_feature: MA Experiment 20000113 PARAMETER Experiment Name: At_42deg_Heat_cDNA_P Parameter: Temperature (deg C) Value: 42 vs. 22
  misc_feature: MA Experiment 20000113 PARAMETER Experiment Name: At_42deg_Heat_cDNA_P Parameter: Timepoint (hr) Value: 8
  misc_feature: MA Experiment 20000113 PARAMETER Experiment Name: At_42deg_Heat_cDNA_P Parameter: Tissue Value: Aerial
  misc_feature: MA Experiment ID: 20000117 Result: Down-regulated in Transcription
  misc_feature: MA Experiment 20000117 PARAMETER Experiment Name: At_100uM_ABA_Mutants_cDNA_P Parameter: Plant Line Value: Columbia
  misc_feature: MA Experiment 20000117 PARAMETER Experiment Name: At_100uM_ABA_Mutants_cDNA_P Parameter: Timepoint (hr) Value: 6
  misc_feature: MA Experiment 20000117 PARAMETER Experiment Name: At_100uM_ABA_Mutants_cDNA_P Parameter: Tissue Value: Aerial
  misc_feature: MA Experiment 20000117 PARAMETER Experiment Name: At_100uM_ABA_Mutants_cDNA_P Parameter: Treatment Value: 100uM ABA vs. No Treatment
  misc_feature: MA Experiment ID: 20000180 Result: Up-regulated in Transcription
  misc_feature: MA Experiment 20000180 PARAMETER Experiment Name: At_Germinating_Seeds_P Parameter: Age (hr) Value: 24 vs. 0
  misc_feature: MA Experiment 20000180 PARAMETER Experiment Name: At_Germinating_Seeds_P Parameter: Tissue Value: Germinating Seeds
  misc_feature: MA Experiment ID: 20000184 Result: Up-regulated in Transcription
  misc_feature: MA Experiment 20000184 PARAMETER Experiment Name: At_Shoots__P Parameter: Age (day) Value: 7
  misc_feature: MA Experiment 20000184 PARAMETER Experiment Name: At_Shoots__P Parameter: Tissue Value: Shoots vs. Whole Plant
  misc_feature: MA Experiment ID: 20000185 Result: Down-regulated in Transcription
  misc_feature: MA Experiment 20000185 PARAMETER Experiment Name: At_Roots__P Parameter: Age (day) Value: 7 vs. 21
  misc_feature: MA Experiment 20000185 PARAMETER Experiment Name: At_Roots__P Parameter: Organism Value: A. thaliana
  misc_feature: MA Experiment 20000185 PARAMETER Experiment Name: At_Roots__P Parameter: Tissue Value: Roots vs. Whole Plant
  misc_feature: MA Experiment ID: 20000234 Result: Up-regulated in Transcription
  misc_feature: MA Experiment 20000234 PARAMETER Experiment Name: At_Siliques_P Parameter: Age (day) Value: 21
  misc_feature: MA Experiment 20000234 PARAMETER Experiment Name: At_Siliques_P Parameter: Organism Value: A. thaliana
  misc_feature: MA Experiment 20000234 PARAMETER Experiment Name: At_Siliques_P Parameter: Plant Line Value: WS
  misc_feature: MA Experiment 20000234 PARAMETER Experiment Name: At_Siliques_P Parameter: Tissue Value: Less Than 5mm Siliques vs. Whole Plant
  misc_feature: MA Experiment ID: 20000235 Result: Up-regulated in Transcription
  misc_feature: MA Experiment 20000235 PARAMETER Experiment Name: At_Siliques_P Parameter: Age (day) Value: 21
  misc_feature: MA Experiment 20000235 PARAMETER Experiment Name: At_Siliques_P Parameter: Organism Value: A. thaliana
  misc_feature: MA Experiment 20000235 PARAMETER Experiment Name: At_Siliques_P Parameter: Plant Line Value: WS
  misc_feature: MA Experiment 20000235 PARAMETER Experiment Name: At_Siliques_P Parameter: Tissue Value: 5-10mm Siliques vs. Whole Plant
  misc_feature: MA Experiment ID: 20000437 Result: Down-regulated in Transcription
  misc_feature: MA Experiment 20000437 PARAMETER Experiment Name: At_Drought_P Parameter: Age (day) Value: 8
  misc_feature: MA Experiment 20000437 PARAMETER Experiment Name: At_Drought_P Parameter: Organism Value: A. thaliana
  misc_feature: MA Experiment 20000437 PARAMETER Experiment Name: At_Drought_P Parameter: Plant Line Value: WS
  misc_feature: MA Experiment 20000437 PARAMETER Experiment Name: At_Drought_P Parameter: Timepoint (hr) Value: 24
  misc_feature: MA Experiment 20000437 PARAMETER Experiment Name: At_Drought_P Parameter: Tissue Value: Whole Plant
  misc_feature: MA Experiment 20000437 PARAMETER Experiment Name: At_Drought_P Parameter: Treatment Value: Drought vs. No Drought
  misc_feature: MA Experiment ID: 20000438 Result: Up-regulated in Transcription
  misc_feature: MA Experiment 20000438 PARAMETER Experiment Name: At_Shoots__P Parameter: Age (day) Value: 14
  misc_feature: MA Experiment 20000438 PARAMETER Experiment Name: At_Shoots__P Parameter: Tissue Value: Shoots vs. Whole Plant
  misc_feature: MA Experiment ID: 20000439 Result: Down-regulated in Transcription
  misc_feature: MA Experiment 20000439 PARAMETER Experiment Name: At_Roots__P Parameter: Age (day) Value: 14 vs. 21
  misc_feature: MA Experiment 20000439 PARAMETER Experiment Name: At_Roots__P Parameter: Organism Value: A. thaliana
  misc_feature: MA Experiment 20000439 PARAMETER Experiment Name: At_Roots__P Parameter: Tissue Value: Roots vs. Whole Plant
  misc_feature: MA Experiment ID: 20000460 Result: Down-regulated in Transcription
  misc_feature: MA Experiment 20000460 PARAMETER Experiment Name: At_10percent_PEG_P Parameter: Age (day) Value: 12
  misc_feature: MA Experiment 20000460 PARAMETER Experiment Name: At_10percent_PEG_P Parameter: Organism Value: A. thaliana
  misc_feature: MA Experiment 20000460 PARAMETER Experiment Name: At_10percent_PEG_P Parameter: Plant Line Value: WS
  misc_feature: MA Experiment 20000460 PARAMETER Experiment Name: At_10percent_PEG_P Parameter: Timepoint (day) Value: 12
  misc_feature: MA Experiment 20000460 PARAMETER Experiment Name: At_10percent_PEG_P Parameter: Tissue Value: Whole Plant
  misc_feature: MA Experiment 20000460 PARAMETER Experiment Name: At_10percent_PEG_P Parameter: Treatment Value: 10percent PEG vs. No Treatment
  misc_feature: MA Experiment ID: 20000794 Result: Down-regulated in Transcription
  misc_feature: MA Experiment 20000794 PARAMETER Experiment Name: At_Petals_P Parameter: Age (day) Value: 23-25 days
  misc_feature: MA Experiment 20000794 PARAMETER Experiment Name: At_Petals_P Parameter: Plant Line Value: WS
  misc_feature: MA Experiment 20000794 PARAMETER Experiment Name: At_Petals_P Parameter: Tissue Value: Petals vs. Whole plant
  misc_feature: MA Experiment ID: 20001247 Result: Up-regulated in Transcription
  misc_feature: MA Experiment 20001247 PARAMETER Experiment Name: At_Far-red-induction_P Parameter: Age (day) Value: 7
  misc_feature: MA Experiment 20001247 PARAMETER Experiment Name: At_Far-red-induction_P Parameter: Light Value: Far-red vs. White
  misc_feature: MA Experiment 20001247 PARAMETER Experiment Name: At_Far-red-induction_P Parameter: Organism Value: A. thaliana
  misc_feature: MA Experiment 20001247 PARAMETER Experiment Name: At_Far-red-induction_P Parameter: Plant Line Value: Columbia
  misc_feature: MA Experiment 20001247 PARAMETER Experiment Name: At_Far-red-induction_P Parameter: Timepoint (hr) Value: 1
  misc_feature: MA Experiment 20001247 PARAMETER Experiment Name: At_Far-red-induction_P Parameter: Tissue Value: Whole Plant
  misc_feature: MA Experiment ID: 20001248 Result: Down-regulated in Transcription
  misc_feature: MA Experiment 20001248 PARAMETER Experiment Name: At_Far-red-induction_P Parameter: Age (day) Value: 7
  misc_feature: MA Experiment 20001248 PARAMETER Experiment Name: At_Far-red-induction_P Parameter: Light Value: Far-red vs. White
  misc_feature: MA Experiment 20001248 PARAMETER Experiment Name: At_Far-red-induction_P Parameter: Organism Value: A. thaliana
  misc_feature: MA Experiment 20001248 PARAMETER Experiment Name: At_Far-red-induction_P Parameter: Plant Line Value: Columbia
  misc_feature: MA Experiment 20001248 PARAMETER Experiment Name: At_Far-red-induction_P Parameter: Timepoint (hr) Value: 4
  misc_feature: MA Experiment 20001248 PARAMETER Experiment Name: At_Far-red-induction_P Parameter: Tissue Value: Whole Plant
  misc_feature: MA Experiment ID: 20001559 Result: Down-regulated in Transcription
  misc_feature: MA Experiment 20001559 PARAMETER Experiment Name: At_Drought_Soil_Dry_P Parameter: Age (day) Value: 28
  misc_feature: MA Experiment 20001559 PARAMETER Experiment Name: At_Drought_Soil_Dry_P Parameter: Organism Value: A. thaliana
  misc_feature: MA Experiment 20001559 PARAMETER Experiment Name: At_Drought_Soil_Dry_P Parameter: Plant Line Value: WS
  misc_feature: MA Experiment 20001559 PARAMETER Experiment Name: At_Drought_Soil_Dry_P Parameter: Post Timepoint (hr) Value: 29
  misc_feature: MA Experiment 20001559 PARAMETER Experiment Name: At_Drought_Soil_Dry_P Parameter: Post-Treatment Value: Re-Water vs. No Drought
  misc_feature: MA Experiment 20001559 PARAMETER Experiment Name: At_Drought_Soil_Dry_P Parameter: Timepoint (day) Value: 14
  misc_feature: MA Experiment 20001559 PARAMETER Experiment Name: At_Drought_Soil_Dry_P Parameter: Treatment Value: Drought vs. No Drought
  misc_feature: MA Experiment ID: 20001757 Result: Up-regulated in Transcription
  misc_feature: MA Experiment 20001757 PARAMETER Experiment Name: At_50mM_NH4NO3_L-to-H_P Parameter: Timepoint (hr) Value: 6
  misc_feature: MA Experiment 20001757 PARAMETER Experiment Name: At_50mM_NH4NO3_L-to-H_P Parameter: Tissue Value: Leaf
  misc_feature: MA Experiment 20001757 PARAMETER Experiment Name: At_50mM_NH4NO3_L-to-H_P Parameter: Treatment Value: 50mM NH4NO3 vs 100mM Mannitol
cataatcctcaaaaatctcaactttatctcccaaaacacaaaacaaaaaaaaatggcttccactgctctctcaagcgccatcgtcggaacttcattcatccgtcgttccccagctccaatcagtctccgttcccttccatcagccaacacacaatccctcttcggtctcaaatcaggcaccgctcgtggtggacgtgtcacagccatggctacatacaaggtcaagttcatcacaccagaaggtgagctagaggttgagtgtgacgacgacgtctacgttcttgatgctgctgaggaagctggaatcgatttgccttactcttgccgtgctggttcttgttcgagctgtgctggtaaagttgtgtctggatctgttgatcagtctgaccagagtttccttgatgatgaacagattggtgaagggtttgttctcacttgtgctgcttaccctacctctgatgttaccattgaaacccacaaagaagaagacattgtttaagcctcacctactcaccagcttttgatggtttaaaaatcatgtctttataattgagtttgttgttacaaaactattgttatctgttgttattgttcctggtttggctcaccatcaatcgatgacatttt

SEQ ID NO: 35507 - protein, 165 aa, Arabidopsis thaliana
  peptide (1)..(165): Ceres Seq. ID no. 12377322
  misc_feature (77)..(152): Pfam Name: 2Fe-2S iron-sulfur cluster binding domain Pfam Description: 2Fe-2S iron-sulfur cluster binding domain
  misc_feature (77)..(152): Pfam Name: 2Fe-2S iron-sulfur cluster binding domain Pfam Description: 2Fe-2S iron-sulfur cluster binding domain
  misc_feature (18)..(164): Homolog of NCBI NO: 119931 NR Description: Ferredoxin I, chloroplast precursor
  misc_feature (70)..(165): Homolog of NCBI NO: 947124 NR Description: ferredoxin component a1
  misc_feature (70)..(165): Homolog of NCBI NO: 81707 NR Description: ferredoxin [2Fe-2S] A, leaf - radish
  misc_feature (18)..(165): Homolog of NCBI NO: 34921349 NR Description: Ferredoxin, chloroplast precursor (PFLP)
  misc_feature (18)..(164): Homolog of NCBI NO: 3023752 NR Description: Ferredoxin I, chloroplast precursor
  misc_feature (18)..(164): Homolog of NCBI NO: 119931 NR Description: Ferredoxin I, chloroplast precursor
  misc_feature (70)..(165): Homolog of NCBI NO: 81707 NR Description: ferredoxin [2Fe-2S] A, leaf - radish
  misc_feature (18)..(164): Homolog of NCBI NO: 3023752 NR Description: Ferredoxin I, chloroplast precursor
  misc_feature (18)..(165): Homolog of NCBI NO: 15219837 NR Description: ferrodoxin precursor
  misc_feature (18)..(165): Homolog of NCBI NO: 15220256 NR Description: ferredoxin precusor isolog
  misc_feature (18)..(135): Homolog of NCBI NO: 16604416 NR Description: At1g10960/T19D16_12 [Arabidopsis thaliana]
  misc_feature (18)..(164): Homolog of NCBI NO: 3023743 NR Description: Ferredoxin I, chloroplast precursor
  misc_feature (18)..(164): Homolog of NCBI NO: 119937 NR Description: Ferredoxin I, chloroplast precursor (Fd I)
  misc_feature (18)..(165): Homolog of NCBI NO: 34921349 NR Description: Ferredoxin, chloroplast precursor (PFLP)
  misc_feature (70)..(165): Homolog of NCBI NO: 947124 NR Description: ferredoxin component a1
  misc_feature (18)..(164): Homolog of NCBI NO: 119937 NR Description: Ferredoxin I, chloroplast precursor (Fd I)
  misc_feature (18)..(164): Homolog of NCBI NO: 3023743 NR Description: Ferredoxin I, chloroplast precursor
  misc_feature (18)..(135): Homolog of NCBI NO: 16604416 NR Description: At1g10960/T19D16_12 [Arabidopsis thaliana]
  misc_feature (18)..(165): Homolog of NCBI NO: 15220256 NR Description: ferredoxin precusor isolog
  misc_feature (18)..(165): Homolog of NCBI NO: 15219837 NR Description: ferrodoxin precursor
IILKNLNFISQNTKQKKMASTALSSAIVGTSFIRRSPAPISLRSLPSANTQSLFGLKSGTARGGRVTAMATYKVKFITPEGELEVECDDDVYVLDAAEEAGIDLPYSCRAGSCSSCAGKVVSGSVDQSDQSFLDDEQIGEGFVLTCAAYPTSDVTIETHKEEDIV

SEQ ID NO: 35508 - protein, 148 aa, Arabidopsis thaliana
  peptide (1)..(148): Ceres Seq. ID no. 12377323
  misc_feature (60)..(135): Pfam Name: 2Fe-2S iron-sulfur cluster binding domain Pfam Description: 2Fe-2S iron-sulfur cluster binding domain
  misc_feature (60)..(135): Pfam Name: 2Fe-2S iron-sulfur cluster binding domain Pfam Description: 2Fe-2S iron-sulfur cluster binding domain
  misc_feature (1)..(147): Homolog of NCBI NO: 119931 NR Description: Ferredoxin I, chloroplast precursor
  misc_feature (53)..(148): Homolog of NCBI NO: 947124 NR Description: ferredoxin component a1
  misc_feature (53)..(148): Homolog of NCBI NO: 81707 NR Description: ferredoxin [2Fe-2S] A, leaf - radish
  misc_feature (1)..(148): Homolog of NCBI NO: 34921349 NR Description: Ferredoxin, chloroplast precursor (PFLP)
  misc_feature (1)..(147): Homolog of NCBI NO: 3023752 NR Description: Ferredoxin I, chloroplast precursor
  misc_feature (1)..(147): Homolog of NCBI NO: 119931 NR Description: Ferredoxin I, chloroplast precursor
  misc_feature (53)..(148): Homolog of NCBI NO: 81707 NR Description: ferredoxin [2Fe-2S] A, leaf - radish
  misc_feature (1)..(147): Homolog of NCBI NO: 3023752 NR Description: Ferredoxin I, chloroplast precursor
  misc_feature (1)..(148): Homolog of NCBI NO: 15219837 NR Description: ferrodoxin precursor
  misc_feature (1)..(148): Homolog of NCBI NO: 15220256 NR Description: ferredoxin precusor isolog
  misc_feature (1)..(118): Homolog of NCBI NO: 16604416 NR Description: At1g10960/T19D16_12 [Arabidopsis thaliana]
  misc_feature (1)..(147): Homolog of NCBI NO: 3023743 NR Description: Ferredoxin I, chloroplast precursor
  misc_feature (1)..(147): Homolog of NCBI NO: 119937 NR Description: Ferredoxin I, chloroplast precursor (Fd I)
  misc_feature (1)..(148): Homolog of NCBI NO: 34921349 NR Description: Ferredoxin, chloroplast precursor (PFLP)
  misc_feature (53)..(148): Homolog of NCBI NO: 947124 NR Description: ferredoxin component a1
  misc_feature (1)..(147): Homolog of NCBI NO: 119937 NR Description: Ferredoxin I, chloroplast precursor (Fd I)
  misc_feature (1)..(147): Homolog of NCBI NO: 3023743 NR Description: Ferredoxin I, chloroplast precursor
  misc_feature (1)..(118): Homolog of NCBI NO: 16604416 NR Description: At1g10960/T19D16_12 [Arabidopsis thaliana]
  misc_feature (1)..(148): Homolog of NCBI NO: 15220256 NR Description: ferredoxin precusor isolog
  misc_feature (1)..(148): Homolog of NCBI NO: 15219837 NR Description: ferrodoxin precursor
MASTALSSAIVGTSFIRRSPAPISLRSLPSANTQSLFGLKSGTARGGRVTAMATYKVKFITPEGELEVECDDDVYVLDAAEEAGIDLPYSCRAGSCSSCAGKVVSGSVDQSDQSFLDDEQIGEGFVLTCAAYPTSDVTIETHKEEDIV

SEQ ID NO: 35509 - protein, 97 aa, Arabidopsis thaliana
  peptide (1)..(97): Ceres Seq. ID no. 12377324
  misc_feature (9)..(84): Pfam Name: 2Fe-2S iron-sulfur cluster binding domain Pfam Description: 2Fe-2S iron-sulfur cluster binding domain
  misc_feature (9)..(84): Pfam Name: 2Fe-2S iron-sulfur cluster binding domain Pfam Description: 2Fe-2S iron-sulfur cluster binding domain
  misc_feature (1)..(96): Homolog of NCBI NO: 119931 NR Description: Ferredoxin I, chloroplast precursor
  misc_feature (2)..(97): Homolog of NCBI NO: 947124 NR Description: ferredoxin component a1
  misc_feature (2)..(97): Homolog of NCBI NO: 81707 NR Description: ferredoxin [2Fe-2S] A, leaf - radish
  misc_feature (1)..(97): Homolog of NCBI NO: 34921349 NR Description: Ferredoxin, chloroplast precursor (PFLP)
  misc_feature (1)..(96): Homolog of NCBI NO: 3023752 NR Description: Ferredoxin I, chloroplast precursor
  misc_feature (1)..(96): Homolog of NCBI NO: 119931 NR Description: Ferredoxin I, chloroplast precursor
  misc_feature (2)..(97): Homolog of NCBI NO: 81707 NR Description: ferredoxin [2Fe-2S] A, leaf - radish
  misc_feature (1)..(96): Homolog of NCBI NO: 3023752 NR Description: Ferredoxin I, chloroplast precursor
  misc_feature (1)..(97): Homolog of NCBI NO: 15219837 NR Description: ferrodoxin precursor
  misc_feature (1)..(97): Homolog of NCBI NO: 15220256 NR Description: ferredoxin precusor isolog
  misc_feature (1)..(67): Homolog of NCBI NO: 16604416 NR Description: At1g10960/T19D16_12 [Arabidopsis thaliana]
  misc_feature (1)..(96): Homolog of NCBI NO: 3023743 NR Description: Ferredoxin I, chloroplast precursor
  misc_feature (1)..(96): Homolog of NCBI NO: 119937 NR Description: Ferredoxin I, chloroplast precursor (Fd I)
  misc_feature (1)..(97): Homolog of NCBI NO: 34921349 NR Description: Ferredoxin, chloroplast precursor (PFLP)
  misc_feature (2)..(97): Homolog of NCBI NO: 947124 NR Description: ferredoxin component a1
  misc_feature (1)..(96): Homolog of NCBI NO: 119937 NR Description: Ferredoxin I, chloroplast precursor (Fd I)
  misc_feature (1)..(96): Homolog of NCBI NO: 3023743 NR Description: Ferredoxin I, chloroplast precursor
  misc_feature (1)..(67): Homolog of NCBI NO: 16604416 NR Description: At1g10960/T19D16_12 [Arabidopsis thaliana]
  misc_feature (1)..(97): Homolog of NCBI NO: 15220256 NR Description: ferredoxin precusor isolog
  misc_feature (1)..(97): Homolog of NCBI NO: 15219837 NR Description: ferrodoxin precursor
MATYKVKFITPEGELEVECDDDVYVLDAAEEAGIDLPYSCRAGSCSSCAGKVVSGSVDQSDQSFLDDEQIGEGFVLTCAAYPTSDVTIETHKEEDIV

SEQ ID NO: 35510 - DNA, 647 bp, Arabidopsis thaliana
  misc_feature (1)..(647): Ceres Seq. ID no. 12394127
  misc_feature: MA Experiment ID: 108577 Result: Down-regulated in Transcription
  misc_feature: MA Experiment 108577 PARAMETER Experiment Name: At_42deg_Heat_cDNA_P Parameter: Temperature (deg C) Value: 42 vs. 22
  misc_feature: MA Experiment 108577 PARAMETER Experiment Name: At_42deg_Heat_cDNA_P Parameter: Timepoint (hr) Value: 6
  misc_feature: MA Experiment 108577 PARAMETER Experiment Name: At_42deg_Heat_cDNA_P Parameter: Tissue Value: Aerial
  misc_feature: MA Experiment ID: 108595 Result: Down-regulated in Transcription
  misc_feature: MA Experiment 108595 PARAMETER Experiment Name: At_Ler-pi_Ovule_cDNA_P Parameter: Plant Line Value: null
  misc_feature: MA Experiment ID: 20000111 Result: Down-regulated in Transcription
  misc_feature: MA Experiment 20000111 PARAMETER Experiment Name: At_42deg_Heat_cDNA_P Parameter: Temperature (deg C) Value: 42 vs. 22
  misc_feature: MA Experiment 20000111 PARAMETER Experiment Name: At_42deg_Heat_cDNA_P Parameter: Timepoint (hr) Value: 6
  misc_feature: MA Experiment 20000111 PARAMETER Experiment Name: At_42deg_Heat_cDNA_P Parameter: Tissue Value: Aerial
  misc_feature: MA Experiment ID: 20000307 Result: Up-regulated in Transcription
  misc_feature: MA Experiment 20000307 PARAMETER Experiment Name: At_Germinating_Seeds_Sub_P Parameter: Age (hr) Value: 24 vs. 0
  misc_feature: MA Experiment 20000307 PARAMETER Experiment Name: At_Germinating_Seeds_Sub_P Parameter: Organism Value: A. thaliana
  misc_feature: MA Experiment 20000307 PARAMETER Experiment Name: At_Germinating_Seeds_Sub_P Parameter: Plant Line Value: WS
  misc_feature: MA Experiment 20000307 PARAMETER Experiment Name: At_Germinating_Seeds_Sub_P Parameter: Tissue Value: Germinating Seeds
  misc_feature: MA Experiment ID: 20000328 Result: Down-regulated in Transcription
  misc_feature: MA Experiment 20000328 PARAMETER Experiment Name: At_42deg_Heat_Sub_P Parameter: Age (day) Value: 14
  misc_feature: MA Experiment 20000328 PARAMETER Experiment Name: At_42deg_Heat_Sub_P Parameter: Organism Value: A. thaliana
  misc_feature: MA Experiment 20000328 PARAMETER Experiment Name: At_42deg_Heat_Sub_P Parameter: Plant Line Value: WS
  misc_feature: MA Experiment 20000328 PARAMETER Experiment Name: At_42deg_Heat_Sub_P Parameter: Temperature (deg C) Value: 42 vs. 22
  misc_feature: MA Experiment 20000328 PARAMETER Experiment Name: At_42deg_Heat_Sub_P Parameter: Timepoint (hr) Value: 6
  misc_feature: MA Experiment 20000328 PARAMETER Experiment Name: At_42deg_Heat_Sub_P Parameter: Tissue Value: Aerial
accaacgttgattattcttcttctctctttctcatctaaaccaaaaaatggcagatcagctcaccgatgatcagatctctgagttcaaggaagcttttagccttttcgacaaagacggagatggttgcatcacaacgaaagagctaggaacagtgatgagatcattaggtcaaaatccaacagaagcagagttacaagatatgataaacgaagtagatgctgatggtaacggaaccatagacttccctgagtttctgaacctaatggctaggaagatgaaggacactgactctgaagaagagctgaaagaagctttcagggttttcgataaggaccagaacggtttcatctcggcagctgagttaagacatgtaatgacaaatcttggtgagaagttaactgatgaagaagttgatgagatgatcaaagaagctgatgttgatggagatggtcagatcaattatgaagagtttgtcaaagttatgatggcaaagtgaggaaactattctcatatcttttctctctttttctttctttctttttttgaattgaacaactctgattattgctttattctatgtttgactgttcattattatgcattcgtcccaaatttcatgttatgaactattttgtgactttggggt

SEQ ID NO: 35511 - protein, 149 aa, Arabidopsis thaliana; identical to SEQ ID NO: 29417
  peptide (1)..(149): Ceres Seq. ID no. 12394128
  misc_feature (12)..(40): Pfam Name: EF hand Pfam Description: EF hand
  misc_feature (1)..(149): Homolog of NCBI NO: 289525 NR Description: calmodulin
  misc_feature (1)..(149): Homolog of NCBI NO: 30688187 NR Description: calmodulin-6 (CAM6) [Arabidopsis thaliana]
  misc_feature (1)..(149): Homolog of NCBI NO: 3121849 NR Description: CALMODULIN
  misc_feature (1)..(149): Homolog of NCBI NO: 115515 NR Description: Calmodulin
  misc_feature (1)..(149): Homolog of NCBI NO: 34903134 NR Description: unnamed protein product [Oryza sativa (japonica
  misc_feature (1)..(149): Homolog of NCBI NO: 3121848 NR Description: CALMODULIN
  misc_feature (1)..(149): Homolog of NCBI NO: 34304715 NR Description: calmodulin 4 [Daucus carota]
  misc_feature (1)..(149): Homolog of NCBI NO: 15229784 NR Description: calmodulin 7
  misc_feature (1)..(149): Homolog of NCBI NO: 30683369 NR Description: calmodulin [Arabidopsis thaliana]
  misc_feature (1)..(149): Homolog of NCBI NO: 15225840 NR Description: calmodulin; protein id: At2g27030.1, supported by

SEQ ID NO: 35512 - protein, 113 aa, Arabidopsis thaliana; identical to SEQ ID NO: 29418
  peptide (1)..(113): Ceres Seq. ID no. 12394129
  misc_feature (1)..(113): Homolog of NCBI NO: 289525 NR Description: calmodulin
  misc_feature (1)..(113): Homolog of NCBI NO: 30688187 NR Description: calmodulin-6 (CAM6) [Arabidopsis thaliana]
  misc_feature (1)..(113): Homolog of NCBI NO: 3121849 NR Description: CALMODULIN
  misc_feature (1)..(113): Homolog of NCBI NO: 115515 NR Description: Calmodulin
  misc_feature (1)..(113): Homolog of NCBI NO: 34903134 NR Description: unnamed protein product [Oryza sativa (japonica
  misc_feature (1)..(113): Homolog of NCBI NO: 3121848 NR Description: CALMODULIN
  misc_feature (1)..(113): Homolog of NCBI NO: 34304715 NR Description: calmodulin 4 [Daucus carota]
  misc_feature (1)..(113): Homolog of NCBI NO: 15229784 NR Description: calmodulin 7
  misc_feature (1)..(113): Homolog of NCBI NO: 30683369 NR Description: calmodulin [Arabidopsis thaliana]
  misc_feature (1)..(113): Homolog of NCBI NO: 15225840 NR Description: calmodulin; protein id: At2g27030.1, supported by

SEQ ID NO: 35513 - protein, 98 aa, Arabidopsis thaliana; identical to SEQ ID NO: 29419
  peptide (1)..(98): Ceres Seq. ID no. 12394130
  misc_feature (1)..(98): Homolog of NCBI NO: 289525 NR Description: calmodulin
  misc_feature (1)..(98): Homolog of NCBI NO: 30688187 NR Description: calmodulin-6 (CAM6) [Arabidopsis thaliana]
  misc_feature (1)..(98): Homolog of NCBI NO: 3121849 NR Description: CALMODULIN
  misc_feature (1)..(98): Homolog of NCBI NO: 115515 NR Description: Calmodulin
  misc_feature (1)..(98): Homolog of NCBI NO: 34903134 NR Description: unnamed protein product [Oryza sativa (japonica
  misc_feature (1)..(98): Homolog of NCBI NO: 3121848 NR Description: CALMODULIN
  misc_feature (1)..(98): Homolog of NCBI NO: 34304715 NR Description: calmodulin 4 [Daucus carota]
  misc_feature (1)..(98): Homolog of NCBI NO: 15229784 NR Description: calmodulin 7
  misc_feature (1)..(98): Homolog of NCBI NO: 30683369 NR Description: calmodulin [Arabidopsis thaliana]
  misc_feature (1)..(98): Homolog of NCBI NO: 15225840 NR Description: calmodulin; protein id: At2g27030.1, supported by

SEQ ID NO: 35514 - DNA, 702 bp, Arabidopsis thaliana
  misc_feature (1)..(702): Ceres Seq. ID no. 13509139
  misc_feature: MA Experiment ID: 20000171 Result: Up-regulated in Transcription
  misc_feature: MA Experiment 20000171 PARAMETER Experiment Name: At_42deg_Heat_P Parameter: Age (day) Value: 14
  misc_feature: MA Experiment 20000171 PARAMETER Experiment Name: At_42deg_Heat_P Parameter: Organism Value: A. thaliana
  misc_feature: MA Experiment 20000171 PARAMETER Experiment Name: At_42deg_Heat_P Parameter: Plant Line Value: WS
  misc_feature: MA Experiment 20000171 PARAMETER Experiment Name: At_42deg_Heat_P Parameter: Temperature (deg C) Value: 42 vs. 22
  misc_feature: MA Experiment 20000171 PARAMETER Experiment Name: At_42deg_Heat_P Parameter: Timepoint (hr) Value: 1
  misc_feature: MA Experiment 20000171 PARAMETER Experiment Name: At_42deg_Heat_P Parameter: Tissue Value: Aerial
  misc_feature: MA Experiment ID: 20000180 Result: Down-regulated in Transcription
  misc_feature: MA Experiment 20000180 PARAMETER Experiment Name: At_Germinating_Seeds_P Parameter: Age (hr) Value: 24 vs. 0
  misc_feature: MA Experiment 20000180 PARAMETER Experiment Name: At_Germinating_Seeds_P Parameter: Tissue Value: Germinating Seeds
  misc_feature: MA Experiment ID: 20000184 Result: Up-regulated in Transcription
  misc_feature: MA Experiment 20000184 PARAMETER Experiment Name: At_Shoots__P Parameter: Age (day) Value: 7
  misc_feature: MA Experiment 20000184 PARAMETER Experiment Name: At_Shoots__P Parameter: Tissue Value: Shoots vs. Whole Plant
  misc_feature: MA Experiment ID: 20000451 Result: Up-regulated in Transcription
  misc_feature: MA Experiment 20000451 PARAMETER Experiment Name: At_CS6879_Shoots-Roots_P Parameter: Age (day) Value: 14
  misc_feature: MA Experiment 20000451 PARAMETER Experiment Name: At_CS6879_Shoots-Roots_P Parameter: Organism Value: A. thaliana
  misc_feature: MA Experiment 20000451 PARAMETER Experiment Name: At_CS6879_Shoots-Roots_P Parameter: Plant Line Value: CS6879 vs. WS
  misc_feature: MA Experiment 20000451 PARAMETER Experiment Name: At_CS6879_Shoots-Roots_P Parameter: Tissue Value: Roots
  misc_feature: MA Experiment ID: 20001451 Result: Up-regulated in Transcription
  misc_feature: MA Experiment 20001451 PARAMETER Experiment Name: At_Far-red-induction_P Parameter: Age (day) Value: 7
  misc_feature: MA Experiment 20001451 PARAMETER Experiment Name: At_Far-red-induction_P Parameter: Light Value: Far-red vs. White
  misc_feature: MA Experiment 20001451 PARAMETER Experiment Name: At_Far-red-induction_P Parameter: Organism Value: A. thaliana
  misc_feature: MA Experiment 20001451 PARAMETER Experiment Name: At_Far-red-induction_P Parameter: Plant Line Value: Columbia
  misc_feature: MA Experiment 20001451 PARAMETER Experiment Name: At_Far-red-induction_P Parameter: Timepoint (hr) Value: 24
  misc_feature: MA Experiment 20001451 PARAMETER Experiment Name: At_Far-red-induction_P Parameter: Tissue Value: Whole Plant
  misc_feature: MA Experiment ID: 20001906 Result: Up-regulated in Transcription
  misc_feature: MA Experiment 20001906 PARAMETER Experiment Name: At_Drought_Reproduction_P Parameter: Age (day) Value: 35
  misc_feature: MA Experiment 20001906 PARAMETER Experiment Name: At_Drought_Reproduction_P Parameter: Organism Value: A. thaliana
  misc_feature: MA Experiment 20001906 PARAMETER Experiment Name: At_Drought_Reproduction_P Parameter: Plant Line Value: WS
  misc_feature: MA Experiment 20001906 PARAMETER Experiment Name: At_Drought_Reproduction_P Parameter: Timepoint (day) Value: 5
  misc_feature: MA Experiment 20001906 PARAMETER Experiment Name: At_Drought_Reproduction_P Parameter: Tissue Value: Siliques
  misc_feature: MA Experiment 20001906 PARAMETER Experiment Name: At_Drought_Reproduction_P Parameter: Treatment Value: Drought vs. No Drought
  misc_feature: MA Experiment ID: 20001907 Result: Up-regulated in Transcription
  misc_feature: MA Experiment 20001907 PARAMETER Experiment Name: At_Drought_Reproduction_P Parameter: Age (day) Value: 37
  misc_feature: MA Experiment 20001907 PARAMETER Experiment Name: At_Drought_Reproduction_P Parameter: Organism Value: A. thaliana
  misc_feature: MA Experiment 20001907 PARAMETER Experiment Name: At_Drought_Reproduction_P Parameter: Plant Line Value: WS
  misc_feature: MA Experiment 20001907 PARAMETER Experiment Name: At_Drought_Reproduction_P Parameter: Timepoint (day) Value: 7
  misc_feature: MA Experiment 20001907 PARAMETER Experiment Name: At_Drought_Reproduction_P Parameter: Tissue Value: Siliques
  misc_feature: MA Experiment 20001907 PARAMETER Experiment Name: At_Drought_Reproduction_P Parameter: Treatment Value: Drought vs. No Drought
atgcgtatgagttgtaacggatgtcgagttctacgaaaaggctgcagtgaaaactgtagcataagaccttgtcttcaatggatcaaatccgctgaatctcaagccaacgccaccgtcttcctcgccaagttttatggccgtgcggggctcatgaacctcctcaacaccggtcctgaccacctccgtcctgcgatatttagatcattgttgtacgaagcatgcgggaggattgtgaatccgatatacggatccgtggggttattgtggtcaggaaactggcatctttgtcaagcggccgttgaggcagtaatgagaggctcacccgtgactccgatcgcatgcgacgcagcggttactggtcaagcacctccttttaacaacaagctttgcgacataagacacgtgtcaagcagggacgagaacgttaagagacggagccgtggtgcatgcaaggaagagagaaacgtgaggtctttgagtcatgagtcgtcactgagtcacgagtcaccggtgtcttctgaggagacgacgacggaggaaccaaagacttggatcgggcttgagctgactttggggttggagcctttagcacgtggaaatcacgtggtggtaccgatgaagaaaagaaagttagagaggtgtggcacgtctgaggatgaggacacgtgtaagattgagcttggactggtgtgcagtgagtga

SEQ ID NO: 35515 - protein, 233 aa, Arabidopsis thaliana
  peptide (1)..(233): Ceres Seq. ID no. 13509140
  misc_feature (4)..(109): Pfam Name: Protein of unknown function DUF260 Pfam Description: Protein of unknown function DUF260
  misc_feature (3)..(113): Homolog of NCBI NO: 15235604 NR Description: lateral organ boundaries (LOB) domain family
  misc_feature (3)..(196): Homolog of NCBI NO: 21592894 NR Description: unknown [Arabidopsis thaliana]
  misc_feature (3)..(180): Homolog of NCBI NO: 21593577 NR Description: unknown [Arabidopsis thaliana]
  misc_feature (3)..(180): Homolog of NCBI NO: 15240739 NR Description: lateral organ boundaries (LOB) domain protein 37
  misc_feature (1)..(136): Homolog of NCBI NO: 15221429 NR Description: lateral organ boundaries (LOB) domain protein 42
  misc_feature (1)..(148): Homolog of NCBI NO: 34895540 NR Description: unnamed protein product [Oryza sativa (japonica
  misc_feature (1)..(182): Homolog of NCBI NO: 34914608 NR Description: P0520B06.17 [Oryza sativa (japonica
  misc_feature (1)..(149): Homolog of NCBI NO: 21554191 NR Description: unknown [Arabidopsis thaliana]
  misc_feature (1)..(149): Homolog of NCBI NO: 18396229 NR Description: lateral organ boundaries (LOB) domain protein 41
  misc_feature (1)..(233): Homolog of NCBI NO: 15219829 NR Description: lateral organ boundaries (LOB) domain family
MRMSCNGCRVLRKGCSENCSIRPCLQWIKSAESQANATVFLAKFYGRAGLMNLLNTGPDHLRPAIFRSLLYEACGRIVNPIYGSVGLLWSGNWHLCQAAVEAVMRGSPVTPIACDAAVTGQAPPFNNKLCDIRHVSSRDENVKRRSRGACKEERNVRSLSHESSLSHESPVSSEETTTEEPKTWIGLELTLGLEPLARGNHVVVPMKKRKLERCGTSEDEDTCKIELGLVCSE

SEQ ID NO: 35516 - protein, 231 aa, Arabidopsis thaliana
  peptide (1)..(231): Ceres Seq. ID no. 13509141
  misc_feature (2)..(107): Pfam Name: Protein of unknown function DUF260 Pfam Description: Protein of unknown function DUF260
  misc_feature (1)..(111): Homolog of NCBI NO: 15235604 NR Description: lateral organ boundaries (LOB) domain family
  misc_feature (1)..(194): Homolog of NCBI NO: 21592894 NR Description: unknown [Arabidopsis thaliana]
  misc_feature (1)..(178): Homolog of NCBI NO: 21593577 NR Description: unknown [Arabidopsis thaliana]
  misc_feature (1)..(178): Homolog of NCBI NO: 15240739 NR Description: lateral organ boundaries (LOB) domain protein 37
  misc_feature (1)..(134): Homolog of NCBI NO: 15221429 NR Description: lateral organ boundaries (LOB) domain protein 42
  misc_feature (1)..(146): Homolog of NCBI NO: 34895540 NR Description: unnamed protein product [Oryza sativa (japonica
  misc_feature (1)..(180): Homolog of NCBI NO: 34914608 NR Description: P0520B06.17 [Oryza sativa (japonica
  misc_feature (1)..(147): Homolog of NCBI NO: 21554191 NR Description: unknown [Arabidopsis thaliana]
  misc_feature (1)..(147): Homolog of NCBI NO: 18396229 NR Description: lateral organ boundaries (LOB) domain protein 41
  misc_feature (1)..(231): Homolog of NCBI NO: 15219829 NR Description: lateral organ boundaries (LOB) domain family
MSCNGCRVLRKGCSENCSIRPCLQWIKSAESQANATVFLAKFYGRAGLMNLLNTGPDHLRPAIFRSLLYEACGRIVNPIYGSVGLLWSGNWHLCQAAVEAVMRGSPVTPIACDAAVTGQAPPFNNKLCDIRHVSSRDENVKRRSRGACKEERNVRSLSHESSLSHESPVSSEETTTEEPKTWIGLELTLGLEPLARGNHVVVPMKKRKLERCGTSEDEDTCKIELGLVCSE

SEQ ID NO: 35517 - protein, 183 aa, Arabidopsis thaliana
  peptide (1)..(183): Ceres Seq. ID no. 13509142
  misc_feature (1)..(59): Pfam Name: Protein of unknown function DUF260 Pfam Description: Protein of unknown function DUF260
  misc_feature (1)..(63): Homolog of NCBI NO: 15235604 NR Description: lateral organ boundaries (LOB) domain family
  misc_feature (1)..(146): Homolog of NCBI NO: 21592894 NR Description: unknown [Arabidopsis thaliana]
  misc_feature (1)..(130): Homolog of NCBI NO: 21593577 NR Description: unknown [Arabidopsis thaliana]
  misc_feature (1)..(130): Homolog of NCBI NO: 15240739 NR Description: lateral organ boundaries (LOB) domain protein 37
  misc_feature (1)..(86): Homolog of NCBI NO: 15221429 NR Description: lateral organ boundaries (LOB) domain protein 42
  misc_feature (1)..(98): Homolog of NCBI NO: 34895540 NR Description: unnamed protein product [Oryza sativa (japonica
  misc_feature (1)..(132): Homolog of NCBI NO: 34914608 NR Description: P0520B06.17 [Oryza sativa (japonica
  misc_feature (1)..(99): Homolog of NCBI NO: 21554191 NR Description: unknown [Arabidopsis thaliana]
  misc_feature (1)..(99): Homolog of NCBI NO: 18396229 NR Description: lateral organ boundaries (LOB) domain protein 41
  misc_feature (1)..(183): Homolog of NCBI NO: 15219829 NR Description: lateral organ boundaries (LOB) domain family
MNLLNTGPDHLRPAIFRSLLYEACGRIVNPIYGSVGLLWSGNWHLCQAAVEAVMRGSPVTPIACDAAVTGQAPPFNNKLCDIRHVSSRDENVKRRSRGACKEERNVRSLSHESSLSHESPVSSEETTTEEPKTWIGLELTLGLEPLARGNHVVVPMKKRKLERCGTSEDEDTCKIELGLVCSE

SEQ ID NO: 35518 - DNA, 1002 bp, Arabidopsis thaliana
  misc_feature (1)..(1002): Ceres Seq. ID no. 12371985
  misc_feature: MA Experiment ID: 108434 Result: Up-regulated in Transcription
  misc_feature: MA Experiment 108434 PARAMETER Experiment Name: At_Root_Tips_cDNA_P Parameter: Tissue Value: Root Tips
  misc_feature: MA Experiment ID: 108464 Result: Down-regulated in Transcription
  misc_feature: MA Experiment 108464 PARAMETER Experiment Name: At_Germinating_Seeds_cDNA_P Parameter: Age (day) Value: 4 vs. 0
  misc_feature: MA Experiment 108464 PARAMETER Experiment Name: At_Germinating_Seeds_cDNA_P Parameter: Tissue Value: Germinating Seeds
acacacccatagtcgtcttcctcgatcagtctctctctcaaattgcaaaggtttcttcgaggactttggcatactgcagtttttctgattcggaattttaaataaaaatcggtcgtgacgatttaggttgttggagctgtagtgcttaaaaaccctaactttatactgtttagagcagcagtccctccatgtcaggtcttgtggcgttatgcagagctcgagcttctgcttcgtcttctttattcaacagcgttattcgtccagcatttcgcaatttctctacaggttttgctgatacacagaacaaatcattggtagcacaaatgaaagaagagatgctccacatggacatcaactcaatgataggaagttccatgccactaggtatgatgcgtatcggaacaatcatccacaacatcgagatgaacccagggcaaggcgcaaagatggtccgagctgcaggaaccaacgccaagatcctaaaggagcctgctaaagggaaatgcttgataaagcttccgtcaggggacaccaagtggatcaatgccaaatgtcgtgctacgattggcacagtgtcgaacccgtctcatggaacgaagaagctatataaagcaggacagagtaggtggttagggataaggcccaaagttagaggagtggcgatgaatccgtgtgatcatccacacggtggaggtgaaggaaaaagcaaaagtagtggaagcagaggaaggacatcggttagtccgtggggaaaaccgtgtaaaggcggttacaaatcagctagtgtcaagaagaagaagaagcgtttggcagaagcagcagccaaaatgtgatatgggtgaacaagtttcgattttcttcaaatgtttctttcttttaaaaagcctccaatgttatttggttacgttattgaatctgttttttgagagttttttaggcttcatgaaactagaagatctttgatcagttgagaataaatatggttacgtgtttacttttatt

SEQ ID NO: 35519 - protein, 214 aa, Arabidopsis thaliana
  peptide (1)..(214): Ceres Seq. ID no. 12371986
  misc_feature (57)..(190): Pfam Name: Ribosomal Proteins L2, C-terminal domain Pfam Description: Ribosomal Proteins L2, C-terminal domain
  misc_feature (53)..(192): Homolog of NCBI NO: 17933118 NR Description: ribosomal protein L2 [Platanus occidentalis]
  misc_feature (53)..(197): Homolog of NCBI NO: 17933116 NR Description: ribosomal protein L2 [Dicentra sp. Qiu 95026]
  misc_feature (53)..(207): Homolog of NCBI NO: 7440638 NR Description: probable ribosomal protein L2 [imported] - rice
  misc_feature (53)..(207): Homolog of NCBI NO: 6094106 NR Description: MITOCHONDRIAL 60S RIBOSOMAL PROTEIN L2
  misc_feature (29)..(204): Homolog of NCBI NO: 17644110 NR Description: ribosomal protein L2 [Zea mays]
  misc_feature (5)..(204): Homolog of NCBI NO: 17644112 NR Description: ribosomal protein L2 [Lycopersicon esculentum]
  misc_feature (18)..(203): Homolog of NCBI NO: 17644114 NR Description: ribosomal protein L2 [Gossypium arboreum]
  misc_feature (46)..(214): Homolog of NCBI NO: 1076398 NR Description: ribosomal protein L2 - Arabidopsis thaliana
  misc_feature (1)..(214): Homolog of NCBI NO: 21592449 NR Description: unknown [Arabidopsis thaliana]
  misc_feature (1)..(214): Homolog of NCBI NO: 18406440 NR Description: Expressed protein
MSGLVALCRARASASSSLFNSVIRPAFRNFSTGFADTQNKSLVAQMKEEMLHMDINSMIGSSMPLGMMRIGTIIHNIEMNPGQGAKMVRAAGTNAKILKEPAKGKCLIKLPSGDTKWINAKCRATIGTVSNPSHGTKKLYKAGQSRWLGIRPKVRGVAMNPCDHPHGGGEGKSKSSGSRGRTSVSPWGKPCKGGYKSASVKKKKKRLAEAAAKM

SEQ ID NO: 35520 - protein, 169 aa, Arabidopsis thaliana
  peptide (1)..(169): Ceres Seq. ID no. 12371987
  misc_feature (12)..(145): Pfam Name: Ribosomal Proteins L2, C-terminal domain Pfam Description: Ribosomal Proteins L2, C-terminal domain
  misc_feature (8)..(147): Homolog of NCBI NO: 17933118 NR Description: ribosomal protein L2 [Platanus occidentalis]
  misc_feature (8)..(152): Homolog of NCBI NO: 17933116 NR Description: ribosomal protein L2 [Dicentra sp. Qiu 95026]
  misc_feature (8)..(162): Homolog of NCBI NO: 7440638 NR Description: probable ribosomal protein L2 [imported] - rice
  misc_feature (8)..(162): Homolog of NCBI NO: 6094106 NR Description: MITOCHONDRIAL 60S RIBOSOMAL PROTEIN L2
  misc_feature (1)..(159): Homolog of NCBI NO: 17644110 NR Description: ribosomal protein L2 [Zea mays]
  misc_feature (1)..(159): Homolog of NCBI NO: 17644112 NR Description: ribosomal protein L2 [Lycopersicon esculentum]
  misc_feature (1)..(158): Homolog of NCBI NO: 17644114 NR Description: ribosomal protein L2 [Gossypium arboreum]
  misc_feature (1)..(169): Homolog of NCBI NO: 1076398 NR Description: ribosomal protein L2 - Arabidopsis thaliana
  misc_feature (1)..(169): Homolog of NCBI NO: 21592449 NR Description: unknown [Arabidopsis thaliana]
  misc_feature (1)..(169): Homolog of NCBI NO: 18406440 NR Description: Expressed protein
MKEEMLHMDINSMIGSSMPLGMMRIGTIIHNIEMNPGQGAKMVRAAGTNAKILKEPAKGKCLIKLPSGDTKWINAKCRATIGTVSNPSHGTKKLYKAGQSRWLGIRPKVRGVAMNPCDHPHGGGEGKSKSSGSRGRTSVSPWGKPCKGGYKSASVKKKKKRLAEAAAKM

SEQ ID NO: 35521 - protein, 165 aa, Arabidopsis thaliana
  peptide (1)..(165): Ceres Seq. ID no. 12371988
  misc_feature (8)..(141): Pfam Name: Ribosomal Proteins L2, C-terminal domain Pfam Description: Ribosomal Proteins L2, C-terminal domain
  misc_feature (4)..(143): Homolog of NCBI NO: 17933118 NR Description: ribosomal protein L2 [Platanus occidentalis]
  misc_feature (4)..(148): Homolog of NCBI NO: 17933116 NR Description: ribosomal protein L2 [Dicentra sp. Qiu 95026]
  misc_feature (4)..(158): Homolog of NCBI NO: 7440638 NR Description: probable ribosomal protein L2 [imported] - rice
  misc_feature (4)..(158): Homolog of NCBI NO: 6094106 NR Description: MITOCHONDRIAL 60S RIBOSOMAL PROTEIN L2
  misc_feature (1)..(155): Homolog of NCBI NO: 17644110 NR Description: ribosomal protein L2 [Zea mays]
  misc_feature (1)..(155): Homolog of NCBI NO: 17644112 NR Description: ribosomal protein L2 [Lycopersicon esculentum]
  misc_feature (1)..(154): Homolog of NCBI NO: 17644114 NR Description: ribosomal protein L2 [Gossypium arboreum]
  misc_feature (1)..(165): Homolog of NCBI NO: 1076398 NR Description: ribosomal protein L2 - Arabidopsis thaliana
  misc_feature (1)..(165): Homolog of NCBI NO: 21592449 NR Description: unknown [Arabidopsis thaliana]
  misc_feature (1)..(165): Homolog of NCBI NO: 18406440 NR Description: Expressed protein
MLHMDINSMIGSSMPLGMMRIGTIIHNIEMNPGQGAKMVRAAGTNAKILKEPAKGKCLIKLPSGDTKWINAKCRATIGTVSNPSHGTKKLYKAGQSRWLGIRPKVRGVAMNPCDHPHGGGEGKSKSSGSRGRTSVSPWGKPCKGGYKSASVKKKKKRLAEAAAKM

SEQ ID NO: 35522 - DNA, 1223 bp, Arabidopsis thaliana
  misc_feature (1)..(1223): Ceres Seq. ID no. 12334539
  misc_feature: MA Experiment ID: 108462 Result: Down-regulated in Transcription
  misc_feature: MA Experiment 108462 PARAMETER Experiment Name: At_Germinating_Seeds_cDNA_P Parameter: Age (day) Value: 2 vs. 0
  misc_feature: MA Experiment 108462 PARAMETER Experiment Name: At_Germinating_Seeds_cDNA_P Parameter: Tissue Value: Germinating Seeds
  misc_feature: MA Experiment ID: 108463 Result: Down-regulated in Transcription
  misc_feature: MA Experiment 108463 PARAMETER Experiment Name: At_Germinating_Seeds_cDNA_P Parameter: Age (day) Value: 3 vs. 0
  misc_feature: MA Experiment 108463 PARAMETER Experiment Name: At_Germinating_Seeds_cDNA_P Parameter: Tissue Value: Germinating Seeds
  misc_feature: MA Experiment ID: 108464 Result: Down-regulated in Transcription
  misc_feature: MA Experiment 108464 PARAMETER Experiment Name: At_Germinating_Seeds_cDNA_P Parameter: Age (day) Value: 4 vs. 0
  misc_feature: MA Experiment 108464 PARAMETER Experiment Name: At_Germinating_Seeds_cDNA_P Parameter: Tissue Value: Germinating Seeds
  misc_feature: MA Experiment ID: 108572 Result: Down-regulated in Transcription
  misc_feature: MA Experiment 108572 PARAMETER Experiment Name: At_Drought_cDNA_P Parameter: Timepoint (hr) Value: 1
  misc_feature: MA Experiment 108572 PARAMETER Experiment Name: At_Drought_cDNA_P Parameter: Tissue Value: Aerial
  misc_feature: MA Experiment 108572 PARAMETER Experiment Name: At_Drought_cDNA_P Parameter: Treatment Value: Drought vs. No Drought
  misc_feature: MA Experiment ID: 108595 Result: Down-regulated in Transcription
  misc_feature: MA Experiment 108595 PARAMETER Experiment Name: At_Ler-pi_Ovule_cDNA_P Parameter: Plant Line Value: null
  misc_feature: MA Experiment ID: 20000087 Result: Down-regulated in Transcription
  misc_feature: MA Experiment 20000087 PARAMETER Experiment Name: At_100uM_ABA_Mutants_cDNA_P Parameter: Plant Line Value: WS
  misc_feature: MA Experiment 20000087 PARAMETER Experiment Name: At_100uM_ABA_Mutants_cDNA_P Parameter: Timepoint (hr) Value: 6
  misc_feature: MA Experiment 20000087 PARAMETER Experiment Name: At_100uM_ABA_Mutants_cDNA_P Parameter: Tissue Value: Aerial
  misc_feature: MA Experiment 20000087 PARAMETER Experiment Name: At_100uM_ABA_Mutants_cDNA_P Parameter: Treatment Value: 100uM ABA vs. No Treatment
  misc_feature: MA Experiment ID: 20000437 Result: Down-regulated in Transcription
  misc_feature: MA Experiment 20000437 PARAMETER Experiment Name: At_Drought_P Parameter: Age (day) Value: 8
  misc_feature: MA Experiment 20000437 PARAMETER Experiment Name: At_Drought_P Parameter: Organism Value: A. thaliana
  misc_feature: MA Experiment 20000437 PARAMETER Experiment Name: At_Drought_P Parameter: Plant Line Value: WS
  misc_feature: MA Experiment 20000437 PARAMETER Experiment Name: At_Drought_P Parameter: Timepoint (hr) Value: 24
  misc_feature: MA Experiment 20000437 PARAMETER Experiment Name: At_Drought_P Parameter: Tissue Value: Whole Plant
  misc_feature: MA Experiment 20000437 PARAMETER Experiment Name: At_Drought_P Parameter: Treatment Value: Drought vs. No Drought
  misc_feature: MA Experiment ID: 20001911 Result: Down-regulated in Transcription
  misc_feature: MA Experiment 20001911 PARAMETER Experiment Name: At_Drought_Reproduction_P Parameter: Age (day) Value: 40
  misc_feature: MA Experiment 20001911 PARAMETER Experiment Name: At_Drought_Reproduction_P Parameter: Organism Value: A. thaliana
  misc_feature: MA Experiment 20001911 PARAMETER Experiment Name: At_Drought_Reproduction_P Parameter: Plant Line Value: WS
  misc_feature: MA Experiment 20001911 PARAMETER Experiment Name: At_Drought_Reproduction_P Parameter: Timepoint (day) Value: 10
  misc_feature: MA Experiment 20001911 PARAMETER Experiment Name: At_Drought_Reproduction_P Parameter: Tissue Value: Flowers
  misc_feature: MA Experiment 20001911 PARAMETER Experiment Name: At_Drought_Reproduction_P Parameter: Treatment Value: Drought vs. No Drought
aacgacaagtgacattatcattactctcatcgagagcgttggtctctcttctccttcacctttgagtttctcgaggctcttttcttaattttactgctaaatagtagtgtttactgtcttcagccgccgtcgccggattccattatcgaaggcgacggaagcagtatcttaggttttgtccgacgaagctccgtttgattgttatcggttccgttgtattcgtcgatcttccattttcgcatttgttttctatatccgaagatgggaagcagtccagctccgtttgccgatattggcaagaaagccaaagatctcctaaacaaggattacatttttgaccacaagtttactctcacaatgctgagtgctacaggaacggaatttgtggctactggtttgaagaaggatgatttcttttttggcgatataagcacactatataaaggtcaaaacaccattgttgatctgaaaatcgacagccactctagtgtgtcgacgaaagtaactctcaaaaatctcttgccatccgctaaagctgtaattagtttcaaaatacctgatcacaagtctggcaagctggatgtgcaatatgttcatcctcatgctacgctcaattccagcattggcctcaacccaactcctctgttagatctatcagcaactatcggaagccagaatgtttgccttggtggtgaagtcagtttcgacacagcttcatcatcactaacaaagtacaatgcagggattggtttcaacaaccaaggcgtctctgctgcactcatactggaggataaaggggagagtctgagagctacttacgtccacacagtgaacccaaccacatcctttggtgcagaactgatccgtcgcttctccaattataacaacagcttcaccgtcggaagctctcactctgtggatcaattcacagtggttaagaccagattttctaacagtgggaaagcagggatggtggtccagagagaatggagaccgaagtcgcacatcactttctcagctgagtatgactcaaaggctgtgacctcttcaccaaagcttggtctcgccctcgccctcaaaccataaaacaagaaaagagctcttatcagtttggaaaacacaaactaaacaattcaatttttcaccaagtgctaaaaaaatcacccccaaacgaacggtttgtagggttattgaatcacttttgcattaatatttgttttttc

SEQ ID NO: 35523 - protein, 274 aa, Arabidopsis thaliana
  peptide (1)..(274): Ceres Seq. ID no. 12334540
  misc_feature (4)..(267): Pfam Name: Eukaryotic porin Pfam Description: Eukaryotic porin
  misc_feature (1)..(274): Homolog of NCBI NO: 7442953 NR Description: porin - common ice plant
  misc_feature (1)..(274): Homolog of NCBI NO: 36957216 NR Description: VDAC2.1 [Lotus corniculatus var. japonicus]
  misc_feature (1)..(274): Homolog of NCBI NO: 36957170 NR Description: VDAC1.1 [Lotus corniculatus var. japonicus]
  misc_feature (1)..(274): Homolog of NCBI NO: 36957183 NR Description: VDAC1.2 [Lotus corniculatus var. japonicus]
  misc_feature (1)..(274): Homolog of NCBI NO: 5031279 NR Description: porin [Prunus armeniaca]
  misc_feature (5)..(274): Homolog of NCBI NO: 7339529 NR Description: voltage-dependent anion channel [Oryza sativa]
  misc_feature (1)..(274): Homolog of NCBI NO: 1172556 NR Description: 36 kDa outer mitochondrial membrane protein porin
  misc_feature (1)..(274): Homolog of NCBI NO: 629728 NR Description: porin I, 36K - potato
  misc_feature (1)..(274): Homolog of NCBI NO: 36957233 NR Description: VDAC3.1 [Lotus corniculatus var. japonicus]
  misc_feature (1)..(274): Homolog of NCBI NO: 15242146 NR Description: porin-like protein
MGSSPAPFADIGKKAKDLLNKDYIFDHKFTLTMLSATGTEFVATGLKKDDFFFGDISTLYKGQNTIVDLKIDSHSSVSTKVTLKNLLPSAKAVISFKIPDHKSGKLDVQYVHPHATLNSSIGLNPTPLLDLSATIGSQNVCLGGEVSFDTASSSLTKYNAGIGFNNQGVSAALILEDKGESLRATYVHTVNPTTSFGAELIRRFSNYNNSFTVGSSHSVDQFTVVKTRFSNSGKAGMVVQREWRPKSHITFSAEYDSKAVTSSPKLGLALALKP

SEQ ID NO: 35524 - protein, 242 aa, Arabidopsis thaliana
  peptide (1)..(242): Ceres Seq. ID no. 12334541
  misc_feature (1)..(235): Pfam Name: Eukaryotic porin Pfam Description: Eukaryotic porin
  misc_feature (1)..(242): Homolog of NCBI NO: 7442953 NR Description: porin - common ice plant
  misc_feature (1)..(242): Homolog of NCBI NO: 36957216 NR Description: VDAC2.1 [Lotus corniculatus var. japonicus]
  misc_feature (1)..(242): Homolog of NCBI NO: 36957170 NR Description: VDAC1.1 [Lotus corniculatus var. japonicus]
  misc_feature (1)..(242): Homolog of NCBI NO: 36957183 NR Description: VDAC1.2 [Lotus corniculatus var. japonicus]
  misc_feature (1)..(242): Homolog of NCBI NO: 5031279 NR Description: porin [Prunus armeniaca]
  misc_feature (1)..(242): Homolog of NCBI NO: 7339529 NR Description: voltage-dependent anion channel [Oryza sativa]
  misc_feature (1)..(242): Homolog of NCBI NO: 1172556 NR Description: 36 kDa outer mitochondrial membrane protein porin
  misc_feature (1)..(242): Homolog of NCBI NO: 629728 NR Description: porin I, 36K - potato
  misc_feature (1)..(242): Homolog of NCBI NO: 36957233 NR Description: VDAC3.1 [Lotus corniculatus var. japonicus]
  misc_feature (1)..(242): Homolog of NCBI NO: 15242146 NR Description: porin-like protein
MLSATGTEFVATGLKKDDFFFGDISTLYKGQNTIVDLKIDSHSSVSTKVTLKNLLPSAKAVISFKIPDHKSGKLDVQYVHPHATLNSSIGLNPTPLLDLSATIGSQNVCLGGEVSFDTASSSLTKYNAGIGFNNQGVSAALILEDKGESLRATYVHTVNPTTSFGAELIRRFSNYNNSFTVGSSHSVDQFTVVKTRFSNSGKAGMVVQREWRPKSHITFSAEYDSKAVTSSPKLGLALALKP

SEQ ID NO: 35525 - DNA, 1005 bp, Arabidopsis thaliana
  misc_feature (1)..(1005): Ceres Seq. ID no. 12562843
  misc_feature: MA Experiment ID: 108434 Result: Down-regulated in Transcription
  misc_feature: MA Experiment 108434 PARAMETER Experiment Name: At_Root_Tips_cDNA_P Parameter: Tissue Value: Root Tips
  misc_feature: MA Experiment ID: 108461 Result: Up-regulated in Transcription
  misc_feature: MA Experiment 108461 PARAMETER Experiment Name: At_Germinating_Seeds_cDNA_P Parameter: Age (day) Value: 1 vs. 0
  misc_feature: MA Experiment 108461 PARAMETER Experiment Name: At_Germinating_Seeds_cDNA_P Parameter: Tissue Value: Germinating Seeds
  misc_feature: MA Experiment ID: 108462 Result: Up-regulated in Transcription
  misc_feature: MA Experiment 108462 PARAMETER Experiment Name: At_Germinating_Seeds_cDNA_P Parameter: Age (day) Value: 2 vs. 0
  misc_feature: MA Experiment 108462 PARAMETER Experiment Name: At_Germinating_Seeds_cDNA_P Parameter: Tissue Value: Germinating Seeds
  misc_feature: MA Experiment ID: 108464 Result: Up-regulated in Transcription
  misc_feature: MA Experiment 108464 PARAMETER Experiment Name: At_Germinating_Seeds_cDNA_P Parameter: Age (day) Value: 4 vs. 0
  misc_feature: MA Experiment 108464 PARAMETER Experiment Name: At_Germinating_Seeds_cDNA_P Parameter: Tissue Value: Germinating Seeds
  misc_feature: MA Experiment ID: 108488 Result: Up-regulated in Transcription
  misc_feature: MA Experiment ID: 108489 Result: Down-regulated in Transcription
  misc_feature: MA Experiment ID: 108594 Result: Down-regulated in Transcription
  misc_feature: MA Experiment 108594 PARAMETER Experiment Name: At_Ler-rhl_Root_cDNA_P Parameter: Plant Line Value: null
  misc_feature: MA Experiment ID: 108595 Result: Down-regulated in Transcription
  misc_feature: MA Experiment 108595 PARAMETER Experiment Name: At_Ler-pi_Ovule_cDNA_P Parameter: Plant Line Value: null
  misc_feature: MA Experiment ID: 20000180 Result: Up-regulated in Transcription
  misc_feature: MA Experiment 20000180 PARAMETER Experiment Name: At_Germinating_Seeds_P Parameter: Age (hr) Value: 24 vs. 0
  misc_feature: MA Experiment 20000180 PARAMETER Experiment Name: At_Germinating_Seeds_P Parameter: Tissue Value: Germinating Seeds
  misc_feature: MA Experiment ID: 20000185 Result: Down-regulated in Transcription
  misc_feature: MA Experiment 20000185 PARAMETER Experiment Name: At_Roots__P Parameter: Age (day) Value: 7 vs. 21
  misc_feature: MA Experiment 20000185 PARAMETER Experiment Name: At_Roots__P Parameter: Organism Value: A. thaliana
  misc_feature: MA Experiment 20000185 PARAMETER Experiment Name: At_Roots__P Parameter: Tissue Value: Roots vs. Whole Plant
  misc_feature: MA Experiment ID: 20000234 Result: Down-regulated in Transcription
  misc_feature: MA Experiment 20000234 PARAMETER Experiment Name: At_Siliques_P Parameter: Age (day) Value: 21
  misc_feature: MA Experiment 20000234 PARAMETER Experiment Name: At_Siliques_P Parameter: Organism Value: A. thaliana
  misc_feature: MA Experiment 20000234 PARAMETER Experiment Name: At_Siliques_P Parameter: Plant Line Value: WS
  misc_feature: MA Experiment 20000234 PARAMETER Experiment Name: At_Siliques_P Parameter: Tissue Value: Less Than 5mm Siliques vs. Whole Plant
  misc_feature: MA Experiment ID: 20000235 Result: Down-regulated in Transcription
  misc_feature: MA Experiment 20000235 PARAMETER Experiment Name: At_Siliques_P Parameter: Age (day) Value: 21
  misc_feature: MA Experiment 20000235 PARAMETER Experiment Name: At_Siliques_P Parameter: Organism Value: A. thaliana
  misc_feature: MA Experiment 20000235 PARAMETER Experiment Name: At_Siliques_P Parameter: Plant Line Value: WS
  misc_feature: MA Experiment 20000235 PARAMETER Experiment Name: At_Siliques_P Parameter: Tissue Value: 5-10mm Siliques vs. Whole Plant
  misc_feature: MA Experiment ID: 20000264 Result: Down-regulated in Transcription
  misc_feature: MA Experiment 20000264 PARAMETER Experiment Name: At_Open_Flower_P Parameter: Age (day) Value: 21
  misc_feature: MA Experiment 20000264 PARAMETER Experiment Name: At_Open_Flower_P Parameter: Plant Line Value: WS
  misc_feature: MA Experiment 20000264 PARAMETER Experiment Name: At_Open_Flower_P Parameter: Tissue Value: Open Flower vs. Whole Plant
  misc_feature: MA Experiment ID: 20000265 Result: Down-regulated in Transcription
  misc_feature: MA Experiment 20000265 PARAMETER Experiment Name: At_Open_Flower_P Parameter: Age (day) Value: 21
  misc_feature: MA Experiment 20000265 PARAMETER Experiment Name: At_Open_Flower_P Parameter: Plant Line Value: WS
  misc_feature: MA Experiment 20000265 PARAMETER Experiment Name: At_Open_Flower_P Parameter: Tissue Value: Closed Flower vs. Whole Plant
  misc_feature: MA Experiment ID: 20000286 Result: Down-regulated in Transcription
  misc_feature: MA Experiment 20000286 PARAMETER Experiment Name: At_Open_Flower_P Parameter: Age (day) Value: 21
  misc_feature: MA Experiment 20000286 PARAMETER Experiment Name: At_Open_Flower_P Parameter: Plant Line Value: WS
  misc_feature: MA Experiment 20000286 PARAMETER Experiment Name: At_Open_Flower_P Parameter: Tissue Value: Half Open vs. Whole Plant
  misc_feature: MA Experiment ID: 20000436 Result: Up-regulated in Transcription
  misc_feature: MA Experiment 20000436 PARAMETER Experiment Name: At_Drought_P Parameter: Age (day) Value: 7
  misc_feature: MA Experiment 20000436 PARAMETER Experiment Name: At_Drought_P Parameter: Organism Value: A. thaliana
  misc_feature: MA Experiment 20000436 PARAMETER Experiment Name: At_Drought_P Parameter: Plant Line Value: WS
  misc_feature: MA Experiment 20000436 PARAMETER Experiment Name: At_Drought_P Parameter: Timepoint (hr) Value: 12
  misc_feature: MA Experiment 20000436 PARAMETER Experiment Name: At_Drought_P Parameter: Tissue Value: Whole Plant
  misc_feature: MA Experiment 20000436 PARAMETER Experiment Name: At_Drought_P Parameter: Treatment Value: Drought vs. No Drought
  misc_feature: MA Experiment ID: 20000439 Result: Down-regulated in Transcription
  misc_feature: MA Experiment 20000439 PARAMETER Experiment Name: At_Roots__P Parameter: Age (day) Value: 14 vs. 21
  misc_feature: MA Experiment 20000439 PARAMETER Experiment Name: At_Roots__P Parameter: Organism Value: A. thaliana
  misc_feature: MA Experiment 20000439 PARAMETER Experiment Name: At_Roots__P Parameter: Tissue Value: Roots vs. Whole Plant
  misc_feature: MA Experiment ID: 20000441 Result: Up-regulated in Transcription
  misc_feature: MA Experiment 20000441 PARAMETER Experiment Name: At_1uM_BR-BRZ__P Parameter: Tissue Value: Shoot Apices
  misc_feature: MA Experiment 20000441 PARAMETER Experiment Name: At_1uM_BR-BRZ__P Parameter: Treatment Value: 1uM BR vs. No Treatment
  misc_feature: MA Experiment ID: 20000443 Result: Up-regulated in Transcription
  misc_feature: MA Experiment 20000443 PARAMETER Experiment Name: At_1uM_BR-BRZ__P Parameter: Tissue Value: Shoot Apices
  misc_feature: MA Experiment 20000443 PARAMETER Experiment Name: At_1uM_BR-BRZ__P Parameter: Treatment Value: 1uM BRZ vs. No Treatment
  misc_feature: MA Experiment ID: 20000794 Result: Down-regulated in Transcription
  misc_feature: MA Experiment 20000794 PARAMETER Experiment Name: At_Petals_P Parameter: Age (day) Value: 23-25 days
  misc_feature: MA Experiment 20000794 PARAMETER Experiment Name: At_Petals_P Parameter: Plant Line Value: WS
  misc_feature: MA Experiment 20000794 PARAMETER Experiment Name: At_Petals_P Parameter: Tissue Value: Petals vs. Whole plant
  misc_feature: MA Experiment ID: 20001450 Result: Up-regulated in Transcription
  misc_feature: MA Experiment 20001450 PARAMETER Experiment Name: At_Far-red-induction_P Parameter: Age (day) Value: 7
  misc_feature: MA Experiment 20001450 PARAMETER Experiment Name: At_Far-red-induction_P Parameter: Light Value: Far-red vs. White
  misc_feature: MA Experiment 20001450 PARAMETER Experiment Name: At_Far-red-induction_P Parameter: Organism Value: A. thaliana
  misc_feature: MA Experiment 20001450 PARAMETER Experiment Name: At_Far-red-induction_P Parameter: Plant Line Value: Columbia
  misc_feature: MA Experiment 20001450 PARAMETER Experiment Name: At_Far-red-induction_P Parameter: Timepoint (hr) Value: 8
  misc_feature: MA Experiment 20001450 PARAMETER Experiment Name: At_Far-red-induction_P Parameter: Tissue Value: Whole Plant
  misc_feature: MA Experiment ID: 20001451 Result: Up-regulated in Transcription
  misc_feature: MA Experiment 20001451 PARAMETER Experiment Name: At_Far-red-induction_P Parameter: Age (day) Value: 7
  misc_feature: MA Experiment 20001451 PARAMETER Experiment Name: At_Far-red-induction_P Parameter: Light Value: Far-red vs. White
  misc_feature: MA Experiment 20001451 PARAMETER Experiment Name: At_Far-red-induction_P Parameter: Organism Value: A. thaliana
  misc_feature: MA Experiment 20001451 PARAMETER Experiment Name: At_Far-red-induction_P Parameter: Plant Line Value: Columbia
  misc_feature: MA Experiment 20001451 PARAMETER Experiment Name: At_Far-red-induction_P Parameter: Timepoint (hr) Value: 24
  misc_feature: MA Experiment 20001451 PARAMETER Experiment Name: At_Far-red-induction_P Parameter: Tissue Value: Whole Plant
  misc_feature: MA Experiment ID: 20001459 Result: Down-regulated in Transcription
  misc_feature: MA Experiment 20001459 PARAMETER Experiment Name: At_50mM_NH4NO3_L-to-H_P Parameter: Age (day) Value: Undefined
  misc_feature: MA Experiment 20001459 PARAMETER Experiment Name: At_50mM_NH4NO3_L-to-H_P Parameter: Organism Value: Undefined
  misc_feature: MA Experiment 20001459 PARAMETER Experiment Name: At_50mM_NH4NO3_L-to-H_P Parameter: Plant Line Value: Undefined
  misc_feature: MA Experiment 20001459 PARAMETER Experiment Name: At_50mM_NH4NO3_L-to-H_P Parameter: Timepoint (hr) Value: 4
  misc_feature: MA Experiment 20001459 PARAMETER Experiment Name: At_50mM_NH4NO3_L-to-H_P Parameter: Tissue Value: Siliques
  misc_feature: MA Experiment 20001459 PARAMETER Experiment Name: At_50mM_NH4NO3_L-to-H_P Parameter: Treatment Value: 50mM NH4NO3 vs. 100mM Manitol
  misc_feature: MA Experiment ID: 20001556 Result: Down-regulated in Transcription
  misc_feature: MA Experiment 20001556 PARAMETER Experiment Name: At_Drought_Soil_Dry_P Parameter: Age (day) Value: 26
  misc_feature: MA Experiment 20001556 PARAMETER Experiment Name: At_Drought_Soil_Dry_P Parameter: Organism Value: A. thaliana
  misc_feature: MA Experiment 20001556 PARAMETER Experiment Name: At_Drought_Soil_Dry_P Parameter: Plant Line Value: WS
  misc_feature: MA Experiment 20001556 PARAMETER Experiment Name: At_Drought_Soil_Dry_P Parameter: Post Timepoint (hr) Value: None
  misc_feature: MA Experiment 20001556 PARAMETER Experiment Name: At_Drought_Soil_Dry_P Parameter: Post-Treatment Value: None
  misc_feature: MA Experiment 20001556 PARAMETER Experiment Name: At_Drought_Soil_Dry_P Parameter: Timepoint (day) Value: 12
  misc_feature: MA Experiment 20001556 PARAMETER Experiment Name: At_Drought_Soil_Dry_P Parameter: Treatment Value: Drought vs. No Drought
  misc_feature: MA Experiment ID: 20001557 Result: Down-regulated in Transcription
  misc_feature: MA Experiment 20001557 PARAMETER Experiment Name: At_Drought_Soil_Dry_P Parameter: Age (day) Value: 27
  misc_feature: MA Experiment 20001557 PARAMETER Experiment Name: At_Drought_Soil_Dry_P Parameter: Organism Value: A. thaliana
  misc_feature: MA Experiment 20001557 PARAMETER Experiment Name: At_Drought_Soil_Dry_P Parameter: Plant Line Value: WS
  misc_feature: MA Experiment 20001557 PARAMETER Experiment Name: At_Drought_Soil_Dry_P Parameter: Post Timepoint (hr) Value: 3
  misc_feature: MA Experiment 20001557 PARAMETER Experiment Name: At_Drought_Soil_Dry_P Parameter: Post-Treatment Value: Re-Water vs. No Drought
  misc_feature: MA Experiment 20001557 PARAMETER Experiment Name: At_Drought_Soil_Dry_P Parameter: Timepoint (day) Value: 13
  misc_feature: MA Experiment 20001557 PARAMETER Experiment Name: At_Drought_Soil_Dry_P Parameter: Treatment Value: Drought vs. No Drought
  misc_feature: MA Experiment ID: 20001558 Result: Down-regulated in Transcription
  misc_feature: MA Experiment 20001558 PARAMETER Experiment Name: At_Drought_Soil_Dry_P Parameter: Age (day) Value: 27
  misc_feature: MA Experiment 20001558 PARAMETER Experiment Name: At_Drought_Soil_Dry_P Parameter: Organism Value: A. thaliana
  misc_feature: MA Experiment 20001558 PARAMETER Experiment Name: At_Drought_Soil_Dry_P Parameter: Plant Line Value: WS
  misc_feature: MA Experiment 20001558 PARAMETER Experiment Name: At_Drought_Soil_Dry_P Parameter: Post Timepoint (hr) Value: 6
  misc_feature: MA Experiment 20001558 PARAMETER Experiment Name: At_Drought_Soil_Dry_P Parameter: Post-Treatment Value: Re-Water vs. No Drought
  misc_feature: MA Experiment 20001558 PARAMETER Experiment Name: At_Drought_Soil_Dry_P Parameter: Timepoint (day) Value: 13
  misc_feature: MA Experiment 20001558 PARAMETER Experiment Name: At_Drought_Soil_Dry_P Parameter: Treatment Value: Drought vs. No Drought
  misc_feature: MA Experiment ID: 20001559 Result: Down-regulated in Transcription
  misc_feature: MA Experiment 20001559 PARAMETER Experiment Name: At_Drought_Soil_Dry_P Parameter: Age (day) Value: 28
  misc_feature: MA Experiment 20001559 PARAMETER Experiment Name: At_Drought_Soil_Dry_P Parameter: Organism Value: A. thaliana
  misc_feature: MA Experiment 20001559 PARAMETER Experiment Name: At_Drought_Soil_Dry_P Parameter: Plant Line Value: WS
  misc_feature: MA Experiment 20001559 PARAMETER Experiment Name: At_Drought_Soil_Dry_P Parameter: Post Timepoint (hr) Value: 29
  misc_feature: MA Experiment 20001559 PARAMETER Experiment Name: At_Drought_Soil_Dry_P Parameter: Post-Treatment Value: Re-Water vs. No Drought
  misc_feature: MA Experiment 20001559 PARAMETER Experiment Name: At_Drought_Soil_Dry_P Parameter: Timepoint (day) Value: 14
  misc_feature: MA Experiment 20001559 PARAMETER Experiment Name: At_Drought_Soil_Dry_P Parameter: Treatment Value: Drought vs. No Drought
  misc_feature: MA Experiment ID: 20001755 Result: Down-regulated in Transcription
  misc_feature: MA Experiment 20001755 PARAMETER Experiment Name: At_50mM_NH4NO3_L-to-H_P Parameter: Timepoint (hr) Value: 2
  misc_feature: MA Experiment 20001755 PARAMETER Experiment Name: At_50mM_NH4NO3_L-to-H_P Parameter: Tissue Value: Leaf
  misc_feature: MA Experiment 20001755 PARAMETER Experiment Name: At_50mM_NH4NO3_L-to-H_P Parameter: Treatment Value: 50mM NH4NO3 vs 100mM Mannitol
  misc_feature: MA Experiment ID: 20001762 Result: Down-regulated in Transcription
  misc_feature: MA Experiment 20001762 PARAMETER Experiment Name: At_50mM_NH4NO3_L-to-H_P Parameter: Timepoint (hr) Value: 6
  misc_feature: MA Experiment 20001762 PARAMETER Experiment Name: At_50mM_NH4NO3_L-to-H_P Parameter: Tissue Value: Siliques
  misc_feature: MA Experiment 20001762 PARAMETER Experiment Name: At_50mM_NH4NO3_L-to-H_P Parameter: Treatment Value: 50mM NH4NO3 vs 100mM Mannitol
  misc_feature: MA Experiment ID: 20001772 Result: Down-regulated in Transcription
  misc_feature: MA Experiment 20001772 PARAMETER Experiment Name: At_Far-red-enriched-adult_P Parameter: Age (day) Value: 29
  misc_feature: MA Experiment 20001772 PARAMETER Experiment Name: At_Far-red-enriched-adult_P Parameter: Light Value: Far-red enriched vs. White
  misc_feature: MA Experiment 20001772 PARAMETER Experiment Name: At_Far-red-enriched-adult_P Parameter: Organism Value: A. thaliana
  misc_feature: MA Experiment 20001772 PARAMETER Experiment Name: At_Far-red-enriched-adult_P Parameter: Plant Line Value: Columbia
  misc_feature: MA Experiment 20001772 PARAMETER Experiment Name: At_Far-red-enriched-adult_P Parameter: Timepoint (hr) Value: 24
  misc_feature: MA Experiment 20001772 PARAMETER Experiment Name: At_Far-red-enriched-adult_P Parameter: Tissue Value: Aerial
  misc_feature: MA Experiment ID: 20001773 Result: Down-regulated in Transcription
  misc_feature: MA Experiment 20001773 PARAMETER Experiment Name: At_Far-red-enriched-adult_P Parameter: Age (day) Value: 30
  misc_feature: MA Experiment 20001773 PARAMETER Experiment Name: At_Far-red-enriched-adult_P Parameter: Light Value: Far-red enriched vs. White
  misc_feature: MA Experiment 20001773 PARAMETER Experiment Name: At_Far-red-enriched-adult_P Parameter: Organism Value: A. thaliana
  misc_feature: MA Experiment 20001773 PARAMETER Experiment Name: At_Far-red-enriched-adult_P Parameter: Plant Line Value: Columbia
  misc_feature: MA Experiment 20001773 PARAMETER Experiment Name: At_Far-red-enriched-adult_P Parameter: Timepoint (hr) Value: 48
  misc_feature: MA Experiment 20001773 PARAMETER Experiment Name: At_Far-red-enriched-adult_P Parameter: Tissue Value: Aerial
  misc_feature: MA Experiment ID: 20001774 Result: Down-regulated in Transcription
  misc_feature: MA Experiment 20001774 PARAMETER Experiment Name: At_Far-red-enriched-adult_P Parameter: Age (day) Value: 31
  misc_feature: MA Experiment 20001774 PARAMETER Experiment Name: At_Far-red-enriched-adult_P Parameter: Light Value: Far-red enriched vs. White
  misc_feature: MA Experiment 20001774 PARAMETER Experiment Name: At_Far-red-enriched-adult_P Parameter: Organism Value: A. thaliana
  misc_feature: MA Experiment 20001774 PARAMETER Experiment Name: At_Far-red-enriched-adult_P Parameter: Plant Line Value: Columbia
  misc_feature: MA Experiment 20001774 PARAMETER Experiment Name: At_Far-red-enriched-adult_P Parameter: Timepoint (hr) Value: 72
  misc_feature: MA Experiment 20001774 PARAMETER Experiment Name: At_Far-red-enriched-adult_P Parameter: Tissue Value: Aerial
  misc_feature: MA Experiment ID: 20001905 Result: Down-regulated in Transcription
  misc_feature: MA Experiment 20001905 PARAMETER Experiment Name: At_Drought_Reproduction_P Parameter: Age (day) Value: 40
  misc_feature: MA Experiment 20001905 PARAMETER Experiment Name: At_Drought_Reproduction_P Parameter: Organism Value: A. thaliana
  misc_feature: MA Experiment 20001905 PARAMETER Experiment Name: At_Drought_Reproduction_P Parameter: Plant Line Value: WS
  misc_feature: MA Experiment 20001905 PARAMETER Experiment Name: At_Drought_Reproduction_P Parameter: Timepoint (day) Value: 10
  misc_feature: MA Experiment 20001905 PARAMETER Experiment Name: At_Drought_Reproduction_P Parameter: Tissue Value: Rosettes
  misc_feature: MA Experiment 20001905 PARAMETER Experiment Name: At_Drought_Reproduction_P Parameter: Treatment Value: Drought vs. No Drought
atccaatttcatcacatcttattaactaaagagccttttacttgcgccacactctcaccgcaatggccgcctcgacaatggctctctcctctcctgctttgaccggaaaggccgttaagctatccccggcggcctccgaagtatttggaaccggccgaatcaccatgcgcaaagcctccaagcccaccggtccatccggcagcccatggtacggatccgaccgagtcaagtacttgggtccattctccggtgagcctccgagctacctcactggagagttccccggtgattacgggtgggacactgccggtctatccgccgatcccgagaccttcgctaggaaccgtgagctagaagttatccacagcagatgggccatgctcggagccctaggctgcgttttccctgagctattggctaggaacggagtgaagttcggagaagcggtttggttcaaggctggttcacagatcttcagcgacggaggattggactacttgggcaaccccgagcttggtccacgctcagagcatcttagccatttgggctactcaagttatcctcatgggagctgttgagggctaccagagtcgccggagatggtccattgggagaagcagaggacttgctttacccaggtgggagcttcgacccattgggcctcgctactgaccccgaggctttcgcggagttgaaggtgaaggagctcaagaacggaaggttggctatgttctctatgtttggattcttcgttcaggccattgtcaccggaaagggaccgttggagaacctcgcggaccacttggctgatccagtcaacaacaatgcatgggccttcgctaccaacttcgtccccggaaagtgagtttaatttgtgatcgagttgtgtgtatccggtttgttgcatcttggaaatgtgatgcagatttcatatcttgtaaattactttgtatgtgtgtgaaatatttaagaagctttatgatattgatggatcagtcacttact

SEQ ID NO: 35526 - protein, 171 aa, Arabidopsis thaliana
  peptide (1)..(171): Ceres Seq. ID no. 12562844
  misc_feature (64)..(151): Pfam Name: Chlorophyll A-B binding protein Pfam Description: Chlorophyll A-B binding protein
  misc_feature (64)..(151): Pfam Name: Chlorophyll A-B binding protein Pfam Description: Chlorophyll A-B binding protein
  misc_feature (1)..(151): Homolog of NCBI NO: 693922 NR Description: chlorophyll a/b binding protein
  misc_feature (1)..(151): Homolog of NCBI NO: 482445 NR Description: chlorophyll a/b-binding protein precursor -
  misc_feature (1)..(151): Homolog of NCBI NO: 693920 NR Description: chlorophyll a/b binding protein
  misc_feature (1)..(151): Homolog of NCBI NO: 2645999 NR Description: chlorophyll a/b binding protein of LHCII type I
  misc_feature (1)..(151): Homolog of NCBI NO: 693916 NR Description: chlorophyll a/b binding protein
  misc_feature (1)..(151): Homolog of NCBI NO: 693922 NR Description: chlorophyll a/b binding protein
  misc_feature (1)..(151): Homolog of NCBI NO: 693920 NR Description: chlorophyll a/b binding protein
  misc_feature (1)..(151): Homolog of NCBI NO: 693916 NR Description: chlorophyll a/b binding protein
  misc_feature (1)..(151): Homolog of NCBI NO: 18403549 NR Description: photosystem II type I chlorophyll a /b binding
  misc_feature (1)..(151): Homolog of NCBI NO: 21592428 NR Description: putative photosystem II type I chlorophyll a b
  misc_feature (1)..(151): Homolog of NCBI NO: 115819 NR Description: Chlorophyll A-B binding protein 1B, chloroplast
  misc_feature (1)..(151): Homolog of NCBI NO: 693914 NR Description: chlorophyll a/b binding protein
  misc_feature (1)..(151): Homolog of NCBI NO: 224927 NR Description: protein 1B,chlorophyll binding
  misc_feature (1)..(151): Homolog of NCBI NO: 2645999 NR Description: chlorophyll a/b binding protein of LHCII type I
  misc_feature (1)..(151): Homolog of NCBI NO: 482445 NR Description: chlorophyll a/b-binding protein precursor -
  misc_feature (1)..(151): Homolog of NCBI NO: 224927 NR Description: protein 1B,chlorophyll binding
  misc_feature (1)..(151): Homolog of NCBI NO: 693914 NR Description: chlorophyll a/b binding protein
  misc_feature (1)..(151): Homolog of NCBI NO: 115819 NR Description: Chlorophyll A-B binding protein 1B, chloroplast
  misc_feature (1)..(151): Homolog of NCBI NO: 21592428 NR Description: putative photosystem II type I chlorophyll a b
  misc_feature (1)..(151): Homolog of NCBI NO: 18403549 NR Description: photosystem II type I chlorophyll a /b binding
MAASTMALSSPALTGKAVKLSPAASEVFGTGRITMRKASKPTGPSGSPWYGSDRVKYLGPFSGEPPSYLTGEFPGDYGWDTAGLSADPETFARNRELEVIHSRWAMLGALGCVFPELLARNGVKFGEAVWFKAGSQIFSDGGLDYLGNPELGPRSEHLSHLGYSSYPHGSC

SEQ ID NO: 35527 - protein, 166 aa, Arabidopsis thaliana
  peptide (1)..(166): Ceres Seq. ID no. 12562845
  misc_feature (59)..(146): Pfam Name: Chlorophyll A-B binding protein Pfam Description: Chlorophyll A-B binding protein
  misc_feature (59)..(146): Pfam Name: Chlorophyll A-B binding protein Pfam Description: Chlorophyll A-B binding protein
  misc_feature (1)..(146): Homolog of NCBI NO: 693922 NR Description: chlorophyll a/b binding protein
  misc_feature (1)..(146): Homolog of NCBI NO: 482445 NR Description: chlorophyll a/b-binding protein precursor -
  misc_feature (1)..(146): Homolog of NCBI NO: 693920 NR Description: chlorophyll a/b binding protein
  misc_feature (1)..(146): Homolog of NCBI NO: 2645999 NR Description: chlorophyll a/b binding protein of LHCII type I
  misc_feature (1)..(146): Homolog of NCBI NO: 693916 NR Description: chlorophyll a/b binding protein
  misc_feature (1)..(146): Homolog of NCBI NO: 693922 NR Description: chlorophyll a/b binding protein
  misc_feature (1)..(146): Homolog of NCBI NO: 693920 NR Description: chlorophyll a/b binding protein
  misc_feature (1)..(146): Homolog of NCBI NO: 693916 NR Description: chlorophyll a/b binding protein
  misc_feature (1)..(146): Homolog of NCBI NO: 18403549 NR Description: photosystem II type I chlorophyll a /b binding
  misc_feature (1)..(146): Homolog of NCBI NO: 21592428 NR Description: putative photosystem II type I chlorophyll a b
  misc_feature (1)..(146): Homolog of NCBI NO: 115819 NR Description: Chlorophyll A-B binding protein 1B, chloroplast
  misc_feature (1)..(146): Homolog of NCBI NO: 693914 NR Description: chlorophyll a/b binding protein
  misc_feature (1)..(146): Homolog of NCBI NO: 224927 NR Description: protein 1B,chlorophyll binding
  misc_feature (1)..(146): Homolog of NCBI NO: 2645999 NR Description: chlorophyll a/b binding protein of LHCII type I
  misc_feature (1)..(146): Homolog of NCBI NO: 482445 NR Description: chlorophyll a/b-binding protein precursor -
  misc_feature (1)..(146): Homolog of NCBI NO: 224927 NR Description: protein 1B,chlorophyll binding
  misc_feature (1)..(146): Homolog of NCBI NO: 693914 NR Description: chlorophyll a/b binding protein
  misc_feature (1)..(146): Homolog of NCBI NO: 115819 NR Description: Chlorophyll A-B binding protein 1B, chloroplast
  misc_feature (1)..(146): Homolog of NCBI NO: 21592428 NR Description: putative photosystem II type I chlorophyll a b
  misc_feature (1)..(146): Homolog of NCBI NO: 18403549 NR Description: photosystem II type I chlorophyll a /b binding
MALSSPALTGKAVKLSPAASEVFGTGRITMRKASKPTGPSGSPWYGSDRVKYLGPFSGEPPSYLTGEFPGDYGWDTAGLSADPETFARNRELEVIHSRWAMLGALGCVFPELLARNGVKFGEAVWFKAGSQIFSDGGLDYLGNPELGPRSEHLSHLGYSSYPHGSC

SEQ ID NO: 35528 - protein, 137 aa, Arabidopsis thaliana
  peptide (1)..(137): Ceres Seq. ID no. 12562846
  misc_feature (30)..(117): Pfam Name: Chlorophyll A-B binding protein Pfam Description: Chlorophyll A-B binding protein
  misc_feature (30)..(117): Pfam Name: Chlorophyll A-B binding protein Pfam Description: Chlorophyll A-B binding protein
  misc_feature (1)..(117): Homolog of NCBI NO: 693922 NR Description: chlorophyll a/b binding protein
  misc_feature (1)..(117): Homolog of NCBI NO: 482445 NR Description: chlorophyll a/b-binding protein precursor -
  misc_feature (1)..(117): Homolog of NCBI NO: 693920 NR Description: chlorophyll a/b binding protein
  misc_feature (1)..(117): Homolog of NCBI NO: 2645999 NR Description: chlorophyll a/b binding protein of LHCII type I
  misc_feature (1)..(117): Homolog of NCBI NO: 693916 NR Description: chlorophyll a/b binding protein
  misc_feature (1)..(117): Homolog of NCBI NO: 693922 NR Description: chlorophyll a/b binding protein
  misc_feature (1)..(117): Homolog of NCBI NO: 693920 NR Description: chlorophyll a/b binding protein
  misc_feature (1)..(117): Homolog of NCBI NO: 693916 NR Description: chlorophyll a/b binding protein
  misc_feature (1)..(117): Homolog of NCBI NO: 18403549 NR Description: photosystem II type I chlorophyll a /b binding
  misc_feature (1)..(117): Homolog of NCBI NO: 21592428 NR Description: putative photosystem II type I chlorophyll a b
  misc_feature (1)..(117): Homolog of NCBI NO: 115819 NR Description: Chlorophyll A-B binding protein 1B, chloroplast
  misc_feature (1)..(117): Homolog of NCBI NO: 693914 NR Description: chlorophyll a/b binding protein
  misc_feature (1)..(117): Homolog of NCBI NO: 224927 NR Description: protein 1B,chlorophyll binding
  misc_feature (1)..(117): Homolog of NCBI NO: 2645999 NR Description: chlorophyll a/b binding protein of LHCII type I
  misc_feature (1)..(117): Homolog of NCBI NO: 482445 NR Description: chlorophyll a/b-binding protein precursor -
  misc_feature (1)..(117): Homolog of NCBI NO: 224927 NR Description: protein 1B,chlorophyll binding
  misc_feature (1)..(117): Homolog of NCBI NO: 693914 NR Description: chlorophyll a/b binding protein
  misc_feature (1)..(117): Homolog of NCBI NO: 115819 NR Description: Chlorophyll A-B binding protein 1B, chloroplast
  misc_feature (1)..(117): Homolog of NCBI NO: 21592428 NR Description: putative photosystem II type I chlorophyll a b
  misc_feature (1)..(117): Homolog of NCBI NO: 18403549 NR Description: photosystem II type I chlorophyll a /b binding
MRKASKPTGPSGSPWYGSDRVKYLGPFSGEPPSYLTGEFPGDYGWDTAGLSADPETFARNRELEVIHSRWAMLGALGCVFPELLARNGVKFGEAVWFKAGSQIFSDGGLDYLGNPELGPRSEHLSHLGYSSYPHGSC

SEQ ID NO: 35529 - DNA, 1494 bp, Arabidopsis thaliana
  misc_feature (1)..(1494): Ceres Seq. ID no. 12324357
  misc_feature: MA Experiment ID: 108462 Result: Up-regulated in Transcription
  misc_feature: MA Experiment 108462 PARAMETER Experiment Name: At_Germinating_Seeds_cDNA_P Parameter: Age (day) Value: 2 vs. 0
  misc_feature: MA Experiment 108462 PARAMETER Experiment Name: At_Germinating_Seeds_cDNA_P Parameter: Tissue Value: Germinating Seeds
  misc_feature: MA Experiment ID: 108463 Result: Up-regulated in Transcription
  misc_feature: MA Experiment 108463 PARAMETER Experiment Name: At_Germinating_Seeds_cDNA_P Parameter: Age (day) Value: 3 vs. 0
  misc_feature: MA Experiment 108463 PARAMETER Experiment Name: At_Germinating_Seeds_cDNA_P Parameter: Tissue Value: Germinating Seeds
  misc_feature: MA Experiment ID: 108464 Result: Up-regulated in Transcription
  misc_feature: MA Experiment 108464 PARAMETER Experiment Name: At_Germinating_Seeds_cDNA_P Parameter: Age (day) Value: 4 vs. 0
  misc_feature: MA Experiment 108464 PARAMETER Experiment Name: At_Germinating_Seeds_cDNA_P Parameter: Tissue Value: Germinating Seeds
  misc_feature: MA Experiment ID: 108579 Result: Down-regulated in Transcription
  misc_feature: MA Experiment 108579 PARAMETER Experiment Name: At_4deg_Cold_cDNA_P Parameter: Temperature (deg C) Value: 4 vs. 22
  misc_feature: MA Experiment 108579 PARAMETER Experiment Name: At_4deg_Cold_cDNA_P Parameter: Timepoint (hr) Value: 6
  misc_feature: MA Experiment 108579 PARAMETER Experiment Name: At_4deg_Cold_cDNA_P Parameter: Tissue Value: Aerial
  misc_feature: MA Experiment ID: 108595 Result: Down-regulated in Transcription
  misc_feature: MA Experiment 108595 PARAMETER Experiment Name: At_Ler-pi_Ovule_cDNA_P Parameter: Plant Line Value: null
  misc_feature: MA Experiment ID: 20000089 Result: Down-regulated in Transcription
  misc_feature: MA Experiment ID: 20000090 Result: Down-regulated in Transcription
  misc_feature: MA Experiment ID: 20000224 Result: Up-regulated in Transcription
  misc_feature: MA Experiment ID: 20000307 Result: Up-regulated in Transcription
  misc_feature: MA Experiment 20000307 PARAMETER Experiment Name: At_Germinating_Seeds_Sub_P Parameter: Age (hr) Value: 24 vs. 0
  misc_feature: MA Experiment 20000307 PARAMETER Experiment Name: At_Germinating_Seeds_Sub_P Parameter: Organism Value: A. thaliana
  misc_feature: MA Experiment 20000307 PARAMETER Experiment Name: At_Germinating_Seeds_Sub_P Parameter: Plant Line Value: WS
  misc_feature: MA Experiment 20000307 PARAMETER Experiment Name: At_Germinating_Seeds_Sub_P Parameter: Tissue Value: Germinating Seeds
  misc_feature: MA Experiment ID: 20000314 Result: Down-regulated in Transcription
  misc_feature: MA Experiment 20000314 PARAMETER Experiment Name: At_14day_Shoots-Roots_Sub_P Parameter: Age (day) Value: 14
  misc_feature: MA Experiment 20000314 PARAMETER Experiment Name: At_14day_Shoots-Roots_Sub_P Parameter: Organism Value: A. thaliana
  misc_feature: MA Experiment 20000314 PARAMETER Experiment Name: At_14day_Shoots-Roots_Sub_P Parameter: Plant Line Value: WS
  misc_feature: MA Experiment 20000314 PARAMETER Experiment Name: At_14day_Shoots-Roots_Sub_P Parameter: Tissue Value: Roots vs. Whole Plant
  misc_feature: MA Experiment ID: 20000329 Result: Down-regulated in Transcription
  misc_feature: MA Experiment 20000329 PARAMETER Experiment Name: At_4deg_Cold_Sub_P Parameter: Age (day) Value: 14
  misc_feature: MA Experiment 20000329 PARAMETER Experiment Name: At_4deg_Cold_Sub_P Parameter: Organism Value: A. thaliana
  misc_feature: MA Experiment 20000329 PARAMETER Experiment Name: At_4deg_Cold_Sub_P Parameter: Plant Line Value: WS
  misc_feature: MA Experiment 20000329 PARAMETER Experiment Name: At_4deg_Cold_Sub_P Parameter: Temperature (deg C) Value: 4 vs. 22
  misc_feature: MA Experiment 20000329 PARAMETER Experiment Name: At_4deg_Cold_Sub_P Parameter: Timepoint (hr) Value: 6
  misc_feature: MA Experiment 20000329 PARAMETER Experiment Name: At_4deg_Cold_Sub_P Parameter: Tissue Value: Aerial
  misc_feature: MA Experiment ID: 20001807 Result: Up-regulated in Transcription
  misc_feature: MA Experiment 20001807 PARAMETER Experiment Name: At_50mM_NH4NO3_L-to-H_Sub_P Parameter: Timepoint (hr) Value: 6
  misc_feature: MA Experiment 20001807 PARAMETER Experiment Name: At_50mM_NH4NO3_L-to-H_Sub_P Parameter: Tissue Value: Leaf
  misc_feature: MA Experiment 20001807 PARAMETER Experiment Name: At_50mM_NH4NO3_L-to-H_Sub_P Parameter: Treatment Value: 50mM NH4NO3 vs 100mM Mannitol
gagagatcactgtacttattgggttttgatctttgatggctccactgagtccaagagtagtggtgaaggtggatttgaagaagaagccatggcagcaggaccagccattgcacaatagatggcatccggagataccaccagtagcagaggtcaaggctggtgagtttttccgggtagaaatgattgatgcaatgggaggtgttatcaaggacaatgactctgcaagcgatatcaagaacctagtcctaactactactcatcacctaagtgggccgattagggttgtagatgaggaaggtgttgcagctaaagcaggtgatcttcttgctgttgagatatgcaacttgggtcctcttccaggagatgaatggggattcactggttcgtttgatagagagaatggtggcggtttcttgactgaccatttcccttgtgcgaccaaagctatttggtactttgaagggatctatgcctactctcctcagattcctggagtacgatttccgggtttgacacacccaggagtcattggcactgcaccatcgaatgaactcttgagaatatggaatgatagggaaagacaattagaagaaagtggtgttgagtccctaacactatgtgaggtagtgcatcagcggccattagcatgcctaccaacaactaaaggatgtctcctcgggaatattgaagaaggaacaccagaatgggaaaggattgcaaacgaggctgcgaggacaataccaggaagagaaaacggaggaaactgtgacattaaaaacctaagcagaggctctaaaatatatcttccagtatttgttgaaggggctaatctaagcacaggagacatgcatttctcacaaggtgatggtgagatctcgttctgcggagccatcgagatgagtggatttctagaactcaagtgtgaaatcataagaaatgggatgcaagagtaccttacgccaatgggacctacccctctccatgtaaacccaatctttgagataggaccagtggaaccgaggttctcagagtggcttgtcttcgaaggtatcagtgtcgatgagagcggaaaacagcattacctagatgcaacagttgcttacaaacgggcagttctcaacgccatagactatcttttcaaatttggttactcaaaagaacaggtgtacctcttactctcatgttgtccatgtgaaggaagactatctgggatagttgattctccgagtgccgttgctacactagcaatacctacagccatctttgatcaggatattaggccaaagaatcggaaggttccagtaggacctcgggttgtgaggaaaccagatgtactgaagagcacatatgatggaaagcttccaattacaaagaatccaagttcttcctcttagcttctacaaaaaaattaaaattaaaatttagaagctaataccaagattgtataatcaagcatatgttccaataataaagcaataacttggtgttttcttt

SEQ ID NO: 35530 - protein, 452 aa, Arabidopsis thaliana
  peptide (1)..(452): Ceres Seq. ID no. 12324358
  misc_feature (8)..(202): Pfam Name: Acetamidase/Formamidase family Pfam Description: Acetamidase/Formamidase family
  misc_feature (12)..(416): Homolog of NCBI NO: 33592607 NR Description: formamidase [Bordetella pertussis]
  misc_feature (12)..(416): Homolog of NCBI NO: 33600391 NR Description: formamidase [Bordetella bronchiseptica]
  misc_feature (4)..(419): Homolog of NCBI NO: 19115927 NR Description: formamidase-like protein [Schizosaccharomyces
  misc_feature (1)..(451): Homolog of NCBI NO: 34909818 NR Description: putative formamidase [Oryza sativa (japonica
  misc_feature (1)..(452): Homolog of NCBI NO: 14334654 NR Description: putative formamidase [Arabidopsis thaliana]
  misc_feature (1)..(452): Homolog of NCBI NO: 18420071 NR Description: formamidase - like protein
  misc_feature (1)..(202): Homolog of NCBI NO: 7488106 NR Description: probable formamidase (EC 3.5.1.49) F19F18.40 -
  misc_feature (214)..(452): Homolog of NCBI NO: 7488106 NR Description: probable formamidase (EC 3.5.1.49) F19F18.40 -
  misc_feature (1)..(452): Homolog of NCBI NO: 18420069 NR Description: formamidase - like protein
  misc_feature (1)..(452): Homolog of NCBI NO: 21592429 NR Description: formamidase-like protein [Arabidopsis thaliana]
MAPLSPRVVVKVDLKKKPWQQDQPLHNRWHPEIPPVAEVKAGEFFRVEMIDAMGGVIKDNDSASDIKNLVLTTTHHLSGPIRVVDEEGVAAKAGDLLAVEICNLGPLPGDEWGFTGSFDRENGGGFLTDHFPCATKAIWYFEGIYAYSPQIPGVRFPGLTHPGVIGTAPSNELLRIWNDRERQLEESGVESLTLCEVVHQRPLACLPTTKGCLLGNIEEGTPEWERIANEAARTIPGRENGGNCDIKNLSRGSKIYLPVFVEGANLSTGDMHFSQGDGEISFCGAIEMSGFLELKCEIIRNGMQEYLTPMGPTPLHVNPIFEIGPVEPRFSEWLVFEGISVDESGKQHYLDATVAYKRAVLNAIDYLFKFGYSKEQVYLLLSCCPCEGRLSGIVDSPSAVATLAIPTAIFDQDIRPKNRKVPVGPRVVRKPDVLKSTYDGKLPITKNPSSSS

SEQ ID NO: 35531 - protein, 404 aa, Arabidopsis thaliana
  peptide (1)..(404): Ceres Seq. ID no. 12324359
  misc_feature (1)..(154): Pfam Name: Acetamidase/Formamidase family Pfam Description: Acetamidase/Formamidase family
  misc_feature (1)..(368): Homolog of NCBI NO: 33592607 NR Description: formamidase [Bordetella pertussis]
  misc_feature (1)..(368): Homolog of NCBI NO: 33600391 NR Description: formamidase [Bordetella bronchiseptica]
  misc_feature (1)..(371): Homolog of NCBI NO: 19115927 NR Description: formamidase-like protein [Schizosaccharomyces
  misc_feature (1)..(403): Homolog of NCBI NO: 34909818 NR Description: putative formamidase [Oryza sativa (japonica
  misc_feature (1)..(404): Homolog of NCBI NO: 14334654 NR Description: putative formamidase [Arabidopsis thaliana]
  misc_feature (1)..(404): Homolog of NCBI NO: 18420071 NR Description: formamidase - like protein
  misc_feature (1)..(154): Homolog of NCBI NO: 7488106 NR Description: probable formamidase (EC 3.5.1.49) F19F18.40 -
  misc_feature (166)..(404): Homolog of NCBI NO: 7488106 NR Description: probable formamidase (EC 3.5.1.49) F19F18.40 -
  misc_feature (1)..(404): Homolog of NCBI NO: 18420069 NR Description: formamidase - like protein
  misc_feature (1)..(404): Homolog of NCBI NO: 21592429 NR Description: formamidase-like protein [Arabidopsis thaliana]
MIDAMGGVIKDNDSASDIKNLVLTTTHHLSGPIRVVDEEGVAAKAGDLLAVEICNLGPLPGDEWGFTGSFDRENGGGFLTDHFPCATKAIWYFEGIYAYSPQIPGVRFPGLTHPGVIGTAPSNELLRIWNDRERQLEESGVESLTLCEVVHQRPLACLPTTKGCLLGNIEEGTPEWERIANEAARTIPGRENGGNCDIKNLSRGSKIYLPVFVEGANLSTGDMHFSQGDGEISFCGAIEMSGFLELKCEIIRNGMQEYLTPMGPTPLHVNPIFEIGPVEPRFSEWLVFEGISVDESGKQHYLDATVAYKRAVLNAIDYLFKFGYSKEQVYLLLSCCPCEGRLSGIVDSPSAVATLAIPTAIFDQDIRPKNRKVPVGPRVVRKPDVLKSTYDGKLPITKNPSSSS

SEQ ID NO: 35532 - protein, 400 aa, Arabidopsis thaliana
  peptide (1)..(400): Ceres Seq. ID no. 12324360
  misc_feature (1)..(150): Pfam Name: Acetamidase/Formamidase family Pfam Description: Acetamidase/Formamidase family
  misc_feature (1)..(364): Homolog of NCBI NO: 33592607 NR Description: formamidase [Bordetella pertussis]
  misc_feature (1)..(364): Homolog of NCBI NO: 33600391 NR Description: formamidase [Bordetella bronchiseptica]
  misc_feature (1)..(367): Homolog of NCBI NO: 19115927 NR Description: formamidase-like protein [Schizosaccharomyces
  misc_feature (1)..(399): Homolog of NCBI NO: 34909818 NR Description: putative formamidase [Oryza sativa (japonica
  misc_feature (1)..(400): Homolog of NCBI NO: 14334654 NR Description: putative formamidase [Arabidopsis thaliana]
  misc_feature (1)..(400): Homolog of NCBI NO: 18420071 NR Description: formamidase - like protein
  misc_feature (1)..(150): Homolog of NCBI NO: 7488106 NR Description: probable formamidase (EC 3.5.1.49) F19F18.40 -
  misc_feature (162)..(400): Homolog of NCBI NO: 7488106 NR Description: probable formamidase (EC 3.5.1.49) F19F18.40 -
  misc_feature (1)..(400): Homolog of NCBI NO: 18420069 NR Description: formamidase - like protein
  misc_feature (1)..(400): Homolog of NCBI NO: 21592429 NR Description: formamidase-like protein [Arabidopsis thaliana]
MGGVIKDNDSASDIKNLVLTTTHHLSGPIRVVDEEGVAAKAGDLLAVEICNLGPLPGDEWGFTGSFDRENGGGFLTDHFPCATKAIWYFEGIYAYSPQIPGVRFPGLTHPGVIGTAPSNELLRIWNDRERQLEESGVESLTLCEVVHQRPLACLPTTKGCLLGNIEEGTPEWERIANEAARTIPGRENGGNCDIKNLSRGSKIYLPVFVEGANLSTGDMHFSQGDGEISFCGAIEMSGFLELKCEIIRNGMQEYLTPMGPTPLHVNPIFEIGPVEPRFSEWLVFEGISVDESGKQHYLDATVAYKRAVLNAIDYLFKFGYSKEQVYLLLSCCPCEGRLSGIVDSPSAVATLAIPTAIFDQDIRPKNRKVPVGPRVVRKPDVLKSTYDGKLPITKNPSSSS

SEQ ID NO: 35533 - DNA, 1330 bp, Arabidopsis thaliana
  misc_feature (1)..(1330): Ceres Seq. ID no. 12324401
  misc_feature: MA Experiment ID: 108434 Result: Up-regulated in Transcription
  misc_feature: MA Experiment 108434 PARAMETER Experiment Name: At_Root_Tips_cDNA_P Parameter: Tissue Value: Root Tips
  misc_feature: MA Experiment ID: 108462 Result: Down-regulated in Transcription
  misc_feature: MA Experiment 108462 PARAMETER Experiment Name: At_Germinating_Seeds_cDNA_P Parameter: Age (day) Value: 2 vs. 0
  misc_feature: MA Experiment 108462 PARAMETER Experiment Name: At_Germinating_Seeds_cDNA_P Parameter: Tissue Value: Germinating Seeds
  misc_feature: MA Experiment ID: 108463 Result: Down-regulated in Transcription
  misc_feature: MA Experiment 108463 PARAMETER Experiment Name: At_Germinating_Seeds_cDNA_P Parameter: Age (day) Value: 3 vs. 0
  misc_feature: MA Experiment 108463 PARAMETER Experiment Name: At_Germinating_Seeds_cDNA_P Parameter: Tissue Value: Germinating Seeds
  misc_feature: MA Experiment ID: 108464 Result: Down-regulated in Transcription
  misc_feature: MA Experiment 108464 PARAMETER Experiment Name: At_Germinating_Seeds_cDNA_P Parameter: Age (day) Value: 4 vs. 0
  misc_feature: MA Experiment 108464 PARAMETER Experiment Name: At_Germinating_Seeds_cDNA_P Parameter: Tissue Value: Germinating Seeds
  misc_feature: MA Experiment ID: 20000184 Result: Up-regulated in Transcription
  misc_feature: MA Experiment 20000184 PARAMETER Experiment Name: At_Shoots__P Parameter: Age (day) Value: 7
  misc_feature: MA Experiment 20000184 PARAMETER Experiment Name: At_Shoots__P Parameter: Tissue Value: Shoots vs. Whole Plant
  misc_feature: MA Experiment ID: 20000794 Result: Down-regulated in Transcription
  misc_feature: MA Experiment 20000794 PARAMETER Experiment Name: At_Petals_P Parameter: Age (day) Value: 23-25 days
  misc_feature: MA Experiment 20000794 PARAMETER Experiment Name: At_Petals_P Parameter: Plant Line Value: WS
  misc_feature: MA Experiment 20000794 PARAMETER Experiment Name: At_Petals_P Parameter: Tissue Value: Petals vs. Whole plant
gattgagagcaaagtctcactctcttccttaagctctgagaaacctccgataagcttatcggacaaaaagagaagtagacgccgccatggataggcttttgcaacctccttcttctcactcaattgctccctccaaattccaatcaagaccatctcccttattactccaccgtctccactcaacgaatcttagtacttttccctcctctcgccgtctcgagtcacgccgaatcagctccatttcctgcttcttccgtcagaatccatcgccggatacatctccaggattgaatcagagtagtaatttcttgattgcttcttctcaaaccgatgcgtcgaaacctaatccaggatttatccaacggatcgtgagcagttttgagcaacgcaagaccataccggcaggaatggttatattagtctctgctatagctgcgcttttgcttaatcccattcttgtgccgcctgctttcgctagctttcaaacggctactaattctggtggagctgctgtggttggtggaaaactcctcaggactgaagtattgacaagtgcttggactggtttctttgctggttgcttacacacgttatctggacctgatcaccttgctgctttggctccactttcgattggacggacgagaatggagagtgctgcggttggagctctttggggatgtggtcatgacgctggtcagctcatctttggtttattgtttctgcttctaaaagataggctccacattgaagttataagaacttggggtacaagagttgttggtttgactctccttgtgattggtgctatgggaatcaaagaagcttctgagatgccggaaccatgtgttgttactttggagaatggggaaacagatgagaaaagcttaaagaagaaaaagatagggtttgcgacatttgcgactgggattgttcatggcctgcaaccggatgctctgatgatggtattgcctgcattggctcttccttctcggatagccggtgcttcgtttctcatcatgttcttgattgggacggtgattgcgatgggaagctacacagtttttattgggtcgtgtagcgaagcgttgaaagagaaagttcctaggatcactgagaaactaacgtgggcatcttctcttgtggccattggacttggattggcaattattgtcagccagttctttggattcagcctgtattgaagaaaacatcgtcaagtctttgtagctctctctgtaggataagattttttgcatgtaccaacaaaatttgtatctttgcttcagaatctttttcttcaatcaaatacaagtttgagtttggctcc

SEQ ID NO: 35534 - protein, 372 aa, Arabidopsis thaliana
  peptide (1)..(372): Ceres Seq. ID no. 12324402
  misc_feature (153)..(323): Homolog of NCBI NO: 33240819 NR Description: Hydrogenase accessory protein or high-affinity
  misc_feature (153)..(321): Homolog of NCBI NO: 33862611 NR Description: marine cyanobacterial conserved hypothetical
  misc_feature (153)..(321): Homolog of NCBI NO: 33866162 NR Description: cyanobacterial conserved hypothetical protein
  misc_feature (102)..(372): Homolog of NCBI NO: 21397272 NR Description: Hypothetical protein [Oryza sativa (japonica
  misc_feature (101)..(372): Homolog of NCBI NO: 34897966 NR Description: hypothetical protein~similar to Arabidopsis
  misc_feature (102)..(372): Homolog of NCBI NO: 7486794 NR Description: hypothetical protein M4E13.135 - Arabidopsis
  misc_feature (1)..(372): Homolog of NCBI NO: 18418571 NR Description: putative protein
  misc_feature (1)..(372): Homolog of NCBI NO: 21592431 NR Description: unknown [Arabidopsis thaliana]
  misc_feature (1)..(372): Homolog of NCBI NO: 18398217 NR Description: expressed protein
  misc_feature (1)..(372): Homolog of NCBI NO: 15724154 NR Description: At2g16800/T24I21.21 [Arabidopsis thaliana]
MDRLLQPPSSHSIAPSKFQSRPSPLLLHRLHSTNLSTFPSSRRLESRRISSISCFFRQNPSPDTSPGLNQSSNFLIASSQTDASKPNPGFIQRIVSSFEQRKTIPAGMVILVSAIAALLLNPILVPPAFASFQTATNSGGAAVVGGKLLRTEVLTSAWTGFFAGCLHTLSGPDHLAALAPLSIGRTRMESAAVGALWGCGHDAGQLIFGLLFLLLKDRLHIEVIRTWGTRVVGLTLLVIGAMGIKEASEMPEPCVVTLENGETDEKSLKKKKIGFATFATGIVHGLQPDALMMVLPALALPSRIAGASFLIMFLIGTVIAMGSYTVFIGSCSEALKEKVPRITEKLTWASSLVAIGLGLAIIVSQFFGFSLY

SEQ ID NO: 35535 - protein, 265 aa, Arabidopsis thaliana
  peptide (1)..(265): Ceres Seq. ID no. 12324403
  misc_feature (46)..(216): Homolog of NCBI NO: 33240819 NR Description: Hydrogenase accessory protein or high-affinity
  misc_feature (46)..(214): Homolog of NCBI NO: 33862611 NR Description: marine cyanobacterial conserved hypothetical
  misc_feature (46)..(214): Homolog of NCBI NO: 33866162 NR Description: cyanobacterial conserved hypothetical protein
  misc_feature (1)..(265): Homolog of NCBI NO: 21397272 NR Description: Hypothetical protein [Oryza sativa (japonica
  misc_feature (1)..(265): Homolog of NCBI NO: 34897966 NR Description: hypothetical protein~similar to Arabidopsis
  misc_feature (1)..(265): Homolog of NCBI NO: 7486794 NR Description: hypothetical protein M4E13.135 - Arabidopsis
  misc_feature (1)..(265): Homolog of NCBI NO: 18418571 NR Description: putative protein
  misc_feature (1)..(265): Homolog of NCBI NO: 21592431 NR Description: unknown [Arabidopsis thaliana]
  misc_feature (1)..(265): Homolog of NCBI NO: 18398217 NR Description: expressed protein
  misc_feature (1)..(265): Homolog of NCBI NO: 15724154 NR Description: At2g16800/T24I21.21 [Arabidopsis thaliana]
MVILVSAIAALLLNPILVPPAFASFQTATNSGGAAVVGGKLLRTEVLTSAWTGFFAGCLHTLSGPDHLAALAPLSIGRTRMESAAVGALWGCGHDAGQLIFGLLFLLLKDRLHIEVIRTWGTRVVGLTLLVIGAMGIKEASEMPEPCVVTLENGETDEKSLKKKKIGFATFATGIVHGLQPDALMMVLPALALPSRIAGASFLIMFLIGTVIAMGSYTVFIGSCSEALKEKVPRITEKLTWASSLVAIGLGLAIIVSQFFGFSLY

SEQ ID NO: 35536 - DNA, 1033 bp, Arabidopsis thaliana
  misc_feature (1)..(1033): Ceres Seq. ID no. 12334955
  misc_feature: MA Experiment ID: 108576 Result: Up-regulated in Transcription
  misc_feature: MA Experiment 108576 PARAMETER Experiment Name: At_42deg_Heat_cDNA_P Parameter: Temperature (deg C) Value: 42 vs. 22
  misc_feature: MA Experiment 108576 PARAMETER Experiment Name: At_42deg_Heat_cDNA_P Parameter: Timepoint (hr) Value: 1
  misc_feature: MA Experiment 108576 PARAMETER Experiment Name: At_42deg_Heat_cDNA_P Parameter: Tissue Value: Aerial
  misc_feature: MA Experiment ID: 20000111 Result: Up-regulated in Transcription
  misc_feature: MA Experiment 20000111 PARAMETER Experiment Name: At_42deg_Heat_cDNA_P Parameter: Temperature (deg C) Value: 42 vs. 22
  misc_feature: MA Experiment 20000111 PARAMETER Experiment Name: At_42deg_Heat_cDNA_P Parameter: Timepoint (hr) Value: 6
  misc_feature: MA Experiment 20000111 PARAMETER Experiment Name: At_42deg_Heat_cDNA_P Parameter: Tissue Value: Aerial
acattaccatcattagaaaactttcctaattagatcaagatcgtcgttatctctcttgttttttcttcatataatttagttatttttagagaaatgggaaggggtagggttgaattgaagaggatagagaacaagatcaatagacaagtgacatactcgaaaagaagaactggtcttttgaagaaagctcaggagatctctgttctttgtgatgccgaggtttcccttattgtcttctcccataagggcaaatagttcgagtactcctctgaatcttgcatggagaaggtactagaacgctacgagaggtattcttacgccgagagacagctgattgcacctgactctcacgttaatgcacagacgaactggtcaatggagtatagcaggcttaaggccaagattgagcttttggagagaaaccaaaggcattatctgggagaagagttggaaccaatgagcctcaaggatctccaaaatctggagcagcagcttgagactgctcttaagcacattcgctccagaaaaaatcaactcatgaatgagtccctcaaccacctccaaagaaaggagaaggagatacaggaggaaaacagcatgcttaccaaacagataaagaagagggaaaacatcctaaggacaaaacaaatccaatgtgagcagctgaaccgcagcgtcgacgatgtaccacagccacaaccatttcaacacccccatctttacatgatcgctcatcagacttctcctttcctaaatatgggtggtttgtaccaaggagaagaccaaacggcgatgaggaggaacaatctggatctgactcttgaacccatttacaattaccttggctgttacgccgcttgaatagactacatcgatctatatcaatctctttaaaataatataagatcgatcctctattcatgatctatattaaacaccggttaattaatatatttttggtatgtccttatatcatatcaacatcatcaagcctttttccaattcaatatatcttgtatttcggggagcaatg

SEQ ID NO: 35537 - protein, 193 aa, Arabidopsis thaliana
  peptide (1)..(193): Ceres Seq. ID no. 12334956
  misc_feature (13)..(114): Pfam Name: K-box region Pfam Description: K-box region
  misc_feature (1)..(193): Homolog of NCBI NO: 1561778 NR Description: homeotic protein boi1AP1 [Brassica oleracea]
  misc_feature (1)..(193): Homolog of NCBI NO: 15222220 NR Description: floral homeotic gene APETALA1
  misc_feature (1)..(193): Homolog of NCBI NO: 887392 NR Description: BOAP1 [Brassica oleracea]
  misc_feature (1)..(193): Homolog of NCBI NO: 3913047 NR Description: Floral homeotic protein APETALA1 (MADS C)
  misc_feature (1)..(193): Homolog of NCBI NO: 1561780 NR Description: homeotic protein boi2AP1 [Brassica oleracea]
  misc_feature (1)..(193): Homolog of NCBI NO: 7446539 NR Description: MADS box protein homolog CAL - wild cabbage
  misc_feature (1)..(193): Homolog of NCBI NO: 6469345 NR Description: DNA-binding protein [Brassica rapa subsp.
  misc_feature (1)..(193): Homolog of NCBI NO: 30580167 NR Description: Transcription factor CAULIFLOWER (Agamous-like
  misc_feature (1)..(193): Homolog of NCBI NO: 18395839 NR Description: floral regulatory gene CAULIFLOWER
  misc_feature (1)..(193): Homolog of NCBI NO: 642589 NR Description: amino acid feature: K-box, bp 283..480
MEKVLERYERYSYAERQLIAPDSHVNAQTNWSMEYSRLKAKIELLERNQRHYLGEELEPMSLKDLQNLEQQLETALKHIRSRKNQLMNESLNHLQRKEKEIQEENSMLTKQIKKRENILRTKQIQCEQLNRSVDDVPQPQPFQHPHLYMIAHQTSPFLNMGGLYQGEDQTAMRRNNLDLTLEPIYNYLGCYAA

SEQ ID NO: 35538 - protein, 161 aa, Arabidopsis thaliana
  peptide (1)..(161): Ceres Seq. ID no. 12334957
  misc_feature (1)..(82): Pfam Name: K-box region Pfam Description: K-box region
  misc_feature (1)..(161): Homolog of NCBI NO: 1561778 NR Description: homeotic protein boi1AP1 [Brassica oleracea]
  misc_feature (1)..(161): Homolog of NCBI NO: 15222220 NR Description: floral homeotic gene APETALA1
  misc_feature (1)..(161): Homolog of NCBI NO: 887392 NR Description: BOAP1 [Brassica oleracea]
  misc_feature (1)..(161): Homolog of NCBI NO: 3913047 NR Description: Floral homeotic protein APETALA1 (MADS C)
  misc_feature (1)..(161): Homolog of NCBI NO: 1561780 NR Description: homeotic protein boi2AP1 [Brassica oleracea]
  misc_feature (1)..(161): Homolog of NCBI NO: 7446539 NR Description: MADS box protein homolog CAL - wild cabbage
  misc_feature (1)..(161): Homolog of NCBI NO: 6469345 NR Description: DNA-binding protein [Brassica rapa subsp.
  misc_feature (1)..(161): Homolog of NCBI NO: 30580167 NR Description: Transcription factor CAULIFLOWER (Agamous-like
  misc_feature (1)..(161): Homolog of NCBI NO: 18395839 NR Description: floral regulatory gene CAULIFLOWER
  misc_feature (1)..(161): Homolog of NCBI NO: 642589 NR Description: amino acid feature: K-box, bp 283..480
MEYSRLKAKIELLERNQRHYLGEELEPMSLKDLQNLEQQLETALKHIRSRKNQLMNESLNHLQRKEKEIQEENSMLTKQIKKRENILRTKQIQCEQLNRSVDDVPQPQPFQHPHLYMIAHQTSPFLNMGGLYQGEDQTAMRRNNLDLTLEPIYNYLGCYAA

SEQ ID NO: 35539 - protein, 134 aa, Arabidopsis thaliana
  peptide (1)..(134): Ceres Seq. ID no. 12334958
  misc_feature (1)..(55): Pfam Name: K-box region Pfam Description: K-box region
  misc_feature (1)..(134): Homolog of NCBI NO: 1561778 NR Description: homeotic protein boi1AP1 [Brassica oleracea]
  misc_feature (1)..(134): Homolog of NCBI NO: 15222220 NR Description: floral homeotic gene APETALA1
  misc_feature (1)..(134): Homolog of NCBI NO: 887392 NR Description: BOAP1 [Brassica oleracea]
  misc_feature (1)..(134): Homolog of NCBI NO: 3913047 NR Description: Floral homeotic protein APETALA1 (MADS C)
  misc_feature (1)..(134): Homolog of NCBI NO: 1561780 NR Description: homeotic protein boi2AP1 [Brassica oleracea]
  misc_feature (1)..(134): Homolog of NCBI NO: 7446539 NR Description: MADS box protein homolog CAL - wild cabbage
  misc_feature (1)..(134): Homolog of NCBI NO: 6469345 NR Description: DNA-binding protein [Brassica rapa subsp.
  misc_feature (1)..(134): Homolog of NCBI NO: 30580167 NR Description: Transcription factor CAULIFLOWER (Agamous-like
  misc_feature (1)..(134): Homolog of NCBI NO: 18395839 NR Description: floral regulatory gene CAULIFLOWER
  misc_feature (1)..(134): Homolog of NCBI NO: 642589 NR Description: amino acid feature: K-box, bp 283..480
MSLKDLQNLEQQLETALKHIRSRKNQLMNESLNHLQRKEKEIQEENSMLTKQIKKRENILRTKQIQCEQLNRSVDDVPQPQPFQHPHLYMIAHQTSPFLNMGGLYQGEDQTAMRRNNLDLTLEPIYNYLGCYAA

SEQ ID NO: 35540 - DNA, 1213 bp, Arabidopsis thaliana
  misc_feature (1)..(1213): Ceres Seq. ID no. 13647078
  misc_feature: MA Experiment ID: 108434 Result: Down-regulated in Transcription
  misc_feature: MA Experiment 108434 PARAMETER Experiment Name: At_Root_Tips_cDNA_P Parameter: Tissue Value: Root Tips
  misc_feature: MA Experiment ID: 108435 Result: Up-regulated in Transcription
  misc_feature: MA Experiment 108435 PARAMETER Experiment Name: At_stm_Mutants_cDNA_P Parameter: Plant Line Value: wt Landsburg vs stm
  misc_feature: MA Experiment 108435 PARAMETER Experiment Name: At_stm_Mutants_cDNA_P Parameter: Tissue Value: Shoot Apical Meristem Region
  misc_feature: MA Experiment ID: 108461 Result: Up-regulated in Transcription
  misc_feature: MA Experiment 108461 PARAMETER Experiment Name: At_Germinating_Seeds_cDNA_P Parameter: Age (day) Value: 1 vs. 0
  misc_feature: MA Experiment 108461 PARAMETER Experiment Name: At_Germinating_Seeds_cDNA_P Parameter: Tissue Value: Germinating Seeds
  misc_feature: MA Experiment ID: 108462 Result: Up-regulated in Transcription
  misc_feature: MA Experiment 108462 PARAMETER Experiment Name: At_Germinating_Seeds_cDNA_P Parameter: Age (day) Value: 2 vs. 0
  misc_feature: MA Experiment 108462 PARAMETER Experiment Name: At_Germinating_Seeds_cDNA_P Parameter: Tissue Value: Germinating Seeds
  misc_feature: MA Experiment ID: 108463 Result: Up-regulated in Transcription
  misc_feature: MA Experiment 108463 PARAMETER Experiment Name: At_Germinating_Seeds_cDNA_P Parameter: Age (day) Value: 3 vs. 0
  misc_feature: MA Experiment 108463 PARAMETER Experiment Name: At_Germinating_Seeds_cDNA_P Parameter: Tissue Value: Germinating Seeds
  misc_feature: MA Experiment ID: 108473 Result: Up-regulated in Transcription
  misc_feature: MA Experiment 108473 PARAMETER Experiment Name: At_Drought_Flowers_cDNA_P Parameter: Timepoint (hr) Value: 7 d
  misc_feature: MA Experiment 108473 PARAMETER Experiment Name: At_Drought_Flowers_cDNA_P Parameter: Tissue Value: Flower
  misc_feature: MA Experiment 108473 PARAMETER Experiment Name: At_Drought_Flowers_cDNA_P Parameter: Treatment Value: Drought vs. No Drought
  misc_feature: MA Experiment ID: 108474 Result: Up-regulated in Transcription
  misc_feature: MA Experiment 108474 PARAMETER Experiment Name: At_Drought_Flowers_cDNA_P Parameter: Timepoint (hr) Value: null
  misc_feature: MA Experiment 108474 PARAMETER Experiment Name: At_Drought_Flowers_cDNA_P Parameter: Treatment Value: Drought vs. No Drought
  misc_feature: MA Experiment ID: 108488 Result: Up-regulated in Transcription
  misc_feature: MA Experiment ID: 108489 Result: Up-regulated in Transcription
  misc_feature: MA Experiment ID: 108501 Result: Up-regulated in Transcription
  misc_feature: MA Experiment 108501 PARAMETER Experiment Name: At_ap2_floral_buds_cDNA_P Parameter: Plant Line Value: ap2 (Ler.)
  misc_feature: MA Experiment 108501 PARAMETER Experiment Name: At_ap2_floral_buds_cDNA_P Parameter: Tissue Value: Closed Flower
  misc_feature: MA Experiment ID: 108594 Result: Down-regulated in Transcription
  misc_feature: MA Experiment 108594 PARAMETER Experiment Name: At_Ler-rhl_Root_cDNA_P Parameter: Plant Line Value: null
  misc_feature: MA Experiment ID: 108605 Result: Up-regulated in Transcription
  misc_feature: MA Experiment 108605 PARAMETER Experiment Name: At_100uM_ABA_cDNA_P Parameter: Timepoint (hr) Value: 6
  misc_feature: MA Experiment 108605 PARAMETER Experiment Name: At_100uM_ABA_cDNA_P Parameter: Tissue Value: Aerial
  misc_feature: MA Experiment 108605 PARAMETER Experiment Name: At_100uM_ABA_cDNA_P Parameter: Treatment Value: 100uM ABA vs. No Treatment
  misc_feature: MA Experiment ID: 108607 Result: Up-regulated in Transcription
  misc_feature: MA Experiment 108607 PARAMETER Experiment Name: At_100uM_ABA_cDNA_P Parameter: Timepoint (hr) Value: 4
  misc_feature: MA Experiment 108607 PARAMETER Experiment Name: At_100uM_ABA_cDNA_P Parameter: Tissue Value: Aerial
  misc_feature: MA Experiment 108607 PARAMETER Experiment Name: At_100uM_ABA_cDNA_P Parameter: Treatment Value: 100uM ABA vs. No Treatment
  misc_feature: MA Experiment ID: 108609 Result: Up-regulated in Transcription
  misc_feature: MA Experiment 108609 PARAMETER Experiment Name: At_100uM_ABA_cDNA_P Parameter: Timepoint (hr) Value: 24
  misc_feature: MA Experiment 108609 PARAMETER Experiment Name: At_100uM_ABA_cDNA_P Parameter: Tissue Value: Aerial
  misc_feature: MA Experiment 108609 PARAMETER Experiment Name: At_100uM_ABA_cDNA_P Parameter: Treatment Value: 100uM ABA vs. No Treatment
  misc_feature: MA Experiment ID: 20000070 Result: Up-regulated in Transcription
  misc_feature: MA Experiment 20000070 PARAMETER Experiment Name: At_100uM_ABA_Mutants_cDNA_P Parameter: Plant Line Value: CS24
  misc_feature: MA Experiment 20000070 PARAMETER Experiment Name: At_100uM_ABA_Mutants_cDNA_P Parameter: Timepoint (hr) Value: 6
  misc_feature: MA Experiment 20000070 PARAMETER Experiment Name: At_100uM_ABA_Mutants_cDNA_P Parameter: Tissue Value: Aerial
  misc_feature: MA Experiment 20000070 PARAMETER Experiment Name: At_100uM_ABA_Mutants_cDNA_P Parameter: Treatment Value: 100uM ABA vs. No Treatment
  misc_feature: MA Experiment ID: 20000071 Result: Up-regulated in Transcription
  misc_feature: MA Experiment 20000071 PARAMETER Experiment Name: At_100uM_ABA_Mutants_cDNA_P Parameter: Plant Line Value: CS8104
  misc_feature: MA Experiment 20000071 PARAMETER Experiment Name: At_100uM_ABA_Mutants_cDNA_P Parameter: Timepoint (hr) Value: 6
  misc_feature: MA Experiment 20000071 PARAMETER Experiment Name: At_100uM_ABA_Mutants_cDNA_P Parameter: Tissue Value: Aerial
  misc_feature: MA Experiment 20000071 PARAMETER Experiment Name: At_100uM_ABA_Mutants_cDNA_P Parameter: Treatment Value: 100uM ABA vs. No Treatment
  misc_feature: MA Experiment ID: 20000072 Result: Up-regulated in Transcription
  misc_feature: MA Experiment 20000072 PARAMETER Experiment Name: At_100uM_ABA_Mutants_cDNA_P Parameter: Plant Line Value: CS8105
  misc_feature: MA Experiment 20000072 PARAMETER Experiment Name: At_100uM_ABA_Mutants_cDNA_P Parameter: Timepoint (hr) Value: 6
  misc_feature: MA Experiment 20000072 PARAMETER Experiment Name: At_100uM_ABA_Mutants_cDNA_P Parameter: Tissue Value: Aerial
  misc_feature: MA Experiment 20000072 PARAMETER Experiment Name: At_100uM_ABA_Mutants_cDNA_P Parameter: Treatment Value: 100uM ABA vs. No Treatment
  misc_feature: MA Experiment ID: 20000086 Result: Up-regulated in Transcription
  misc_feature: MA Experiment 20000086 PARAMETER Experiment Name: At_100uM_ABA_Mutants_cDNA_P Parameter: Plant Line Value: CS22
  misc_feature: MA Experiment 20000086 PARAMETER Experiment Name: At_100uM_ABA_Mutants_cDNA_P Parameter: Timepoint (hr) Value: 6
  misc_feature: MA Experiment 20000086 PARAMETER Experiment Name: At_100uM_ABA_Mutants_cDNA_P Parameter: Tissue Value: Aerial
  misc_feature: MA Experiment 20000086 PARAMETER Experiment Name: At_100uM_ABA_Mutants_cDNA_P Parameter: Treatment Value: 100uM ABA vs. No Treatment
  misc_feature: MA Experiment ID: 20000087 Result: Up-regulated in Transcription
  misc_feature: MA Experiment 20000087 PARAMETER Experiment Name: At_100uM_ABA_Mutants_cDNA_P Parameter: Plant Line Value: WS
  misc_feature: MA Experiment 20000087 PARAMETER Experiment Name: At_100uM_ABA_Mutants_cDNA_P Parameter: Timepoint (hr) Value: 6
  misc_feature: MA Experiment 20000087 PARAMETER Experiment Name: At_100uM_ABA_Mutants_cDNA_P Parameter: Tissue Value: Aerial
  misc_feature: MA Experiment 20000087 PARAMETER Experiment Name: At_100uM_ABA_Mutants_cDNA_P Parameter: Treatment Value: 100uM ABA vs. No Treatment
  misc_feature: MA Experiment ID: 20000088 Result: Up-regulated in Transcription
  misc_feature: MA Experiment 20000088 PARAMETER Experiment Name: At_100uM_ABA_Mutants_cDNA_P Parameter: Plant Line Value: Landsberg
  misc_feature: MA Experiment 20000088 PARAMETER Experiment Name: At_100uM_ABA_Mutants_cDNA_P Parameter: Timepoint (hr) Value: 6
  misc_feature: MA Experiment 20000088 PARAMETER Experiment Name: At_100uM_ABA_Mutants_cDNA_P Parameter: Tissue Value: Aerial
  misc_feature: MA Experiment 20000088 PARAMETER Experiment Name: At_100uM_ABA_Mutants_cDNA_P Parameter: Treatment Value: 100uM ABA vs. No Treatment
  misc_feature: MA Experiment ID: 20000090 Result: Up-regulated in Transcription
  misc_feature: MA Experiment ID: 20000117 Result: Up-regulated in Transcription
  misc_feature: MA Experiment 20000117 PARAMETER Experiment Name: At_100uM_ABA_Mutants_cDNA_P Parameter: Plant Line Value: Columbia
  misc_feature: MA Experiment 20000117 PARAMETER Experiment Name: At_100uM_ABA_Mutants_cDNA_P Parameter: Timepoint (hr) Value: 6
  misc_feature: MA Experiment 20000117 PARAMETER Experiment Name: At_100uM_ABA_Mutants_cDNA_P Parameter: Tissue Value: Aerial
  misc_feature: MA Experiment 20000117 PARAMETER Experiment Name: At_100uM_ABA_Mutants_cDNA_P Parameter: Treatment Value: 100uM ABA vs. No Treatment
  misc_feature: MA Experiment ID: 20000169 Result: Up-regulated in Transcription
  misc_feature: MA Experiment 20000169 PARAMETER Experiment Name: At_100uM_ABA_P Parameter: Age (day) Value: 14
  misc_feature: MA Experiment 20000169 PARAMETER Experiment Name: At_100uM_ABA_P Parameter: Organism Value: A. thaliana
  misc_feature: MA Experiment 20000169 PARAMETER Experiment Name: At_100uM_ABA_P Parameter: Plant Line Value: WS
  misc_feature: MA Experiment 20000169 PARAMETER Experiment Name: At_100uM_ABA_P Parameter: Timepoint (hr) Value: 6
  misc_feature: MA Experiment 20000169 PARAMETER Experiment Name: At_100uM_ABA_P Parameter: Tissue Value: Aerial
  misc_feature: MA Experiment 20000169 PARAMETER Experiment Name: At_100uM_ABA_P Parameter: Treatment Value: 100uM ABA vs. No Treatment
  misc_feature: MA Experiment ID: 20000180 Result: Up-regulated in Transcription
  misc_feature: MA Experiment 20000180 PARAMETER Experiment Name: At_Germinating_Seeds_P Parameter: Age (hr) Value: 24 vs. 0
  misc_feature: MA Experiment 20000180 PARAMETER Experiment Name: At_Germinating_Seeds_P Parameter: Tissue Value: Germinating Seeds
  misc_feature: MA Experiment ID: 20000185 Result: Up-regulated in Transcription
  misc_feature: MA Experiment 20000185 PARAMETER Experiment Name: At_Roots__P Parameter: Age (day) Value: 7 vs. 21
  misc_feature: MA Experiment 20000185 PARAMETER Experiment Name: At_Roots__P Parameter: Organism Value: A. thaliana
  misc_feature: MA Experiment 20000185 PARAMETER Experiment Name: At_Roots__P Parameter: Tissue Value: Roots vs. Whole Plant
  misc_feature: MA Experiment ID: 20000234 Result: Down-regulated in Transcription
  misc_feature: MA Experiment 20000234 PARAMETER Experiment Name: At_Siliques_P Parameter: Age (day) Value: 21
  misc_feature: MA Experiment 20000234 PARAMETER Experiment Name: At_Siliques_P Parameter: Organism Value: A. thaliana
  misc_feature: MA Experiment 20000234 PARAMETER Experiment Name: At_Siliques_P Parameter: Plant Line Value: WS
  misc_feature: MA Experiment 20000234 PARAMETER Experiment Name: At_Siliques_P Parameter: Tissue Value: Less Than 5mm Siliques vs. Whole Plant
  misc_feature: MA Experiment ID: 20000264 Result: Down-regulated in Transcription
  misc_feature: MA Experiment 20000264 PARAMETER Experiment Name: At_Open_Flower_P Parameter: Age (day) Value: 21
  misc_feature: MA Experiment 20000264 PARAMETER Experiment Name: At_Open_Flower_P Parameter: Plant Line Value: WS
  misc_feature: MA Experiment 20000264 PARAMETER Experiment Name: At_Open_Flower_P Parameter: Tissue Value: Open Flower vs. Whole Plant
  misc_feature: MA Experiment ID: 20000265 Result: Down-regulated in Transcription
  misc_feature: MA Experiment 20000265 PARAMETER Experiment Name: At_Open_Flower_P Parameter: Age (day) Value: 21
  misc_feature: MA Experiment 20000265 PARAMETER Experiment Name: At_Open_Flower_P Parameter: Plant Line Value: WS
  misc_feature: MA Experiment 20000265 PARAMETER Experiment Name: At_Open_Flower_P Parameter: Tissue Value: Closed Flower vs. Whole Plant
  misc_feature: MA Experiment ID: 20000267 Result: Up-regulated in Transcription
  misc_feature: MA Experiment 20000267 PARAMETER Experiment Name: At_Drought_P Parameter: Age (day) Value: 7
  misc_feature: MA Experiment 20000267 PARAMETER Experiment Name: At_Drought_P Parameter: Organism Value: A. thaliana
  misc_feature: MA Experiment 20000267 PARAMETER Experiment Name: At_Drought_P Parameter: Plant Line Value: WS
  misc_feature: MA Experiment 20000267 PARAMETER Experiment Name: At_Drought_P Parameter: Timepoint (hr) Value: 6
  misc_feature: MA Experiment 20000267 PARAMETER Experiment Name: At_Drought_P Parameter: Tissue Value: Whole Plant
  misc_feature: MA Experiment 20000267 PARAMETER Experiment Name: At_Drought_P Parameter: Treatment Value: Drought vs. No Drought
  misc_feature: MA Experiment ID: 20000268 Result: Up-regulated in Transcription
  misc_feature: MA Experiment 20000268 PARAMETER Experiment Name: At_100mM_NaCl__P Parameter: Age (day) Value: 14
  misc_feature: MA Experiment 20000268 PARAMETER Experiment Name: At_100mM_NaCl__P Parameter: Organism Value: A. thaliana
  misc_feature: MA Experiment 20000268 PARAMETER Experiment Name: At_100mM_NaCl__P Parameter: Plant Line Value: WS
  misc_feature: MA Experiment 20000268 PARAMETER Experiment Name: At_100mM_NaCl__P Parameter: Timepoint (hr) Value: 6
  misc_feature: MA Experiment 20000268 PARAMETER Experiment Name: At_100mM_NaCl__P Parameter: Tissue Value: Whole Plant
  misc_feature: MA Experiment 20000268 PARAMETER Experiment Name: At_100mM_NaCl__P Parameter: Treatment Value: 100mM NaCl vs. No Treatment
  misc_feature: MA Experiment ID: 20000286 Result: Down-regulated in Transcription
  misc_feature: MA Experiment 20000286 PARAMETER Experiment Name: At_Open_Flower_P Parameter: Age (day) Value: 21
  misc_feature: MA Experiment 20000286 PARAMETER Experiment Name: At_Open_Flower_P Parameter: Plant Line Value: WS
  misc_feature: MA Experiment 20000286 PARAMETER Experiment Name: At_Open_Flower_P Parameter: Tissue Value: Half Open vs. Whole Plant
  misc_feature: MA Experiment ID: 20000308 Result: Up-regulated in Transcription
  misc_feature: MA Experiment 20000308 PARAMETER Experiment Name: At_100mM_NaCl__P Parameter: Age (day) Value: 17
  misc_feature: MA Experiment 20000308 PARAMETER Experiment Name: At_100mM_NaCl__P Parameter: Organism Value: A. thaliana
  misc_feature: MA Experiment 20000308 PARAMETER Experiment Name: At_100mM_NaCl__P Parameter: Plant Line Value: WS
  misc_feature: MA Experiment 20000308 PARAMETER Experiment Name: At_100mM_NaCl__P Parameter: Timepoint (hr) Value: 72
  misc_feature: MA Experiment 20000308 PARAMETER Experiment Name: At_100mM_NaCl__P Parameter: Tissue Value: Whole Plant
  misc_feature: MA Experiment 20000308 PARAMETER Experiment Name: At_100mM_NaCl__P Parameter: Treatment Value: 100mM NaCl vs. No Treatment
  misc_feature: MA Experiment ID: 20000437 Result: Up-regulated in Transcription
  misc_feature: MA Experiment 20000437 PARAMETER Experiment Name: At_Drought_P Parameter: Age (day) Value: 8
  misc_feature: MA Experiment 20000437 PARAMETER Experiment Name: At_Drought_P Parameter: Organism Value: A. thaliana
  misc_feature: MA Experiment 20000437 PARAMETER Experiment Name: At_Drought_P Parameter: Plant Line Value: WS
  misc_feature: MA Experiment 20000437 PARAMETER Experiment Name: At_Drought_P Parameter: Timepoint (hr) Value: 24
  misc_feature: MA Experiment 20000437 PARAMETER Experiment Name: At_Drought_P Parameter: Tissue Value: Whole Plant
  misc_feature: MA Experiment 20000437 PARAMETER Experiment Name: At_Drought_P Parameter: Treatment Value: Drought vs. No Drought
  misc_feature: MA Experiment ID: 20000441 Result: Down-regulated in Transcription
  misc_feature: MA Experiment 20000441 PARAMETER Experiment Name: At_1uM_BR-BRZ__P Parameter: Tissue Value: Shoot Apices
  misc_feature: MA Experiment 20000441 PARAMETER Experiment Name: At_1uM_BR-BRZ__P Parameter: Treatment Value: 1uM BR vs. No Treatment
  misc_feature: MA Experiment ID: 20000451 Result: Up-regulated in Transcription
  misc_feature: MA Experiment 20000451 PARAMETER Experiment Name: At_CS6879_Shoots-Roots_P Parameter: Age (day) Value: 14
  misc_feature: MA Experiment 20000451 PARAMETER Experiment Name: At_CS6879_Shoots-Roots_P Parameter: Organism Value: A. thaliana
  misc_feature: MA Experiment 20000451 PARAMETER Experiment Name: At_CS6879_Shoots-Roots_P Parameter: Plant Line Value: CS6879 vs. WS
  misc_feature: MA Experiment 20000451 PARAMETER Experiment Name: At_CS6879_Shoots-Roots_P Parameter: Tissue Value: Roots
  misc_feature: MA Experiment ID: 20000452 Result: Up-regulated in Transcription
  misc_feature: MA Experiment 20000452 PARAMETER Experiment Name: At_CS6879_Shoots-Roots_P Parameter: Age (day) Value: 14
  misc_feature: MA Experiment 20000452 PARAMETER Experiment Name: At_CS6879_Shoots-Roots_P Parameter: Organism Value: A. thaliana
  misc_feature: MA Experiment 20000452 PARAMETER Experiment Name: At_CS6879_Shoots-Roots_P Parameter: Plant Line Value: CS6879 vs. WS
  misc_feature: MA Experiment 20000452 PARAMETER Experiment Name: At_CS6879_Shoots-Roots_P Parameter: Tissue Value: Shoots
  misc_feature: MA Experiment ID: 20000453 Result: Up-regulated in Transcription
  misc_feature: MA Experiment 20000453 PARAMETER Experiment Name: At_100uM_ABA_P Parameter: Age (day) Value: 15
  misc_feature: MA Experiment 20000453 PARAMETER Experiment Name: At_100uM_ABA_P Parameter: Organism Value: A. thaliana
  misc_feature: MA Experiment 20000453 PARAMETER Experiment Name: At_100uM_ABA_P Parameter: Plant Line Value: WS
  misc_feature: MA Experiment 20000453 PARAMETER Experiment Name: At_100uM_ABA_P Parameter: Timepoint (hr) Value: 24
  misc_feature: MA Experiment 20000453 PARAMETER Experiment Name: At_100uM_ABA_P Parameter: Tissue Value: Aerial
  misc_feature: MA Experiment 20000453 PARAMETER Experiment Name: At_100uM_ABA_P Parameter: Treatment Value: 100uM ABA vs. No Treatment
  misc_feature: MA Experiment ID: 20000455 Result: Up-regulated in Transcription
  misc_feature: MA Experiment 20000455 PARAMETER Experiment Name: At_100uM_ABA_P Parameter: Age (day) Value: 16
  misc_feature: MA Experiment 20000455 PARAMETER Experiment Name: At_100uM_ABA_P Parameter: Organism Value: A. thaliana
  misc_feature: MA Experiment 20000455 PARAMETER Experiment Name: At_100uM_ABA_P Parameter: Plant Line Value: WS
  misc_feature: MA Experiment 20000455 PARAMETER Experiment Name: At_100uM_ABA_P Parameter: Timepoint (hr) Value: 48
  misc_feature: MA Experiment 20000455 PARAMETER Experiment Name: At_100uM_ABA_P Parameter: Tissue Value: Aerial
  misc_feature: MA Experiment 20000455 PARAMETER Experiment Name: At_100uM_ABA_P Parameter: Treatment Value: 100uM ABA vs. No Treatment
  misc_feature: MA Experiment ID: 20000794 Result: Down-regulated in Transcription
  misc_feature: MA Experiment 20000794 PARAMETER Experiment Name: At_Petals_P Parameter: Age (day) Value: 23-25 days
  misc_feature: MA Experiment 20000794 PARAMETER Experiment Name: At_Petals_P Parameter: Plant Line Value: WS
  misc_feature: MA Experiment 20000794 PARAMETER Experiment Name: At_Petals_P Parameter: Tissue Value: Petals vs. Whole plant
  misc_feature: MA Experiment ID: 20001554 Result: Up-regulated in Transcription
  misc_feature: MA Experiment 20001554 PARAMETER Experiment Name: At_Drought_Soil_Dry_P Parameter: Age (day) Value: 21
  misc_feature: MA Experiment 20001554 PARAMETER Experiment Name: At_Drought_Soil_Dry_P Parameter: Organism Value: A. thaliana
  misc_feature: MA Experiment 20001554 PARAMETER Experiment Name: At_Drought_Soil_Dry_P Parameter: Plant Line Value: WS
  misc_feature: MA Experiment 20001554 PARAMETER Experiment Name: At_Drought_Soil_Dry_P Parameter: Post Timepoint (hr) Value: None
  misc_feature: MA Experiment 20001554 PARAMETER Experiment Name: At_Drought_Soil_Dry_P Parameter: Post-Treatment Value: None
  misc_feature: MA Experiment 20001554 PARAMETER Experiment Name: At_Drought_Soil_Dry_P Parameter: Timepoint (day) Value: 7
  misc_feature: MA Experiment 20001554 PARAMETER Experiment Name: At_Drought_Soil_Dry_P Parameter: Treatment Value: Drought vs. No Drought
  misc_feature: MA Experiment ID: 20001555 Result: Up-regulated in Transcription
  misc_feature: MA Experiment 20001555 PARAMETER Experiment Name: At_Drought_Soil_Dry_P Parameter: Age (day) Value: 24
  misc_feature: MA Experiment 20001555 PARAMETER Experiment Name: At_Drought_Soil_Dry_P Parameter: Organism Value: A. thaliana
  misc_feature: MA Experiment 20001555 PARAMETER Experiment Name: At_Drought_Soil_Dry_P Parameter: Plant Line Value: WS
  misc_feature: MA Experiment 20001555 PARAMETER Experiment Name: At_Drought_Soil_Dry_P Parameter: Post Timepoint (hr) Value: None
  misc_feature: MA Experiment 20001555 PARAMETER Experiment Name: At_Drought_Soil_Dry_P Parameter: Post-Treatment Value: None
  misc_feature: MA Experiment 20001555 PARAMETER Experiment Name: At_Drought_Soil_Dry_P Parameter: Timepoint (day) Value: 10
  misc_feature: MA Experiment 20001555 PARAMETER Experiment Name: At_Drought_Soil_Dry_P Parameter: Treatment Value: Drought vs. No Drought
  misc_feature: MA Experiment ID: 20001556 Result: Up-regulated in Transcription
  misc_feature: MA Experiment 20001556 PARAMETER Experiment Name: At_Drought_Soil_Dry_P Parameter: Age (day) Value: 26
  misc_feature: MA Experiment 20001556 PARAMETER Experiment Name: At_Drought_Soil_Dry_P Parameter: Organism Value: A. thaliana
  misc_feature: MA Experiment 20001556 PARAMETER Experiment Name: At_Drought_Soil_Dry_P Parameter: Plant Line Value: WS
  misc_feature: MA Experiment 20001556 PARAMETER Experiment Name: At_Drought_Soil_Dry_P Parameter: Post Timepoint (hr) Value: None
  misc_feature: MA Experiment 20001556 PARAMETER Experiment Name: At_Drought_Soil_Dry_P Parameter: Post-Treatment Value: None
  misc_feature: MA Experiment 20001556 PARAMETER Experiment Name: At_Drought_Soil_Dry_P Parameter: Timepoint (day) Value: 12
  misc_feature: MA Experiment 20001556 PARAMETER Experiment Name: At_Drought_Soil_Dry_P Parameter: Treatment Value: Drought vs. No Drought
  misc_feature: MA Experiment ID: 20001559 Result: Up-regulated in Transcription
  misc_feature: MA Experiment 20001559 PARAMETER Experiment Name: At_Drought_Soil_Dry_P Parameter: Age (day) Value: 28
  misc_feature: MA Experiment 20001559 PARAMETER Experiment Name: At_Drought_Soil_Dry_P Parameter: Organism Value: A. thaliana
  misc_feature: MA Experiment 20001559 PARAMETER Experiment Name: At_Drought_Soil_Dry_P Parameter: Plant Line Value: WS
  misc_feature: MA Experiment 20001559 PARAMETER Experiment Name: At_Drought_Soil_Dry_P Parameter: Post Timepoint (hr) Value: 29
  misc_feature: MA Experiment 20001559 PARAMETER Experiment Name: At_Drought_Soil_Dry_P Parameter: Post-Treatment Value: Re-Water vs. No Drought
  misc_feature: MA Experiment 20001559 PARAMETER Experiment Name: At_Drought_Soil_Dry_P Parameter: Timepoint (day) Value: 14
  misc_feature: MA Experiment 20001559 PARAMETER Experiment Name: At_Drought_Soil_Dry_P Parameter: Treatment Value: Drought vs. No Drought
  misc_feature: MA Experiment ID: 20001904 Result: Up-regulated in Transcription
  misc_feature: MA Experiment 20001904 PARAMETER Experiment Name: At_Drought_Reproduction_P Parameter: Age (day) Value: 37
  misc_feature: MA Experiment 20001904 PARAMETER Experiment Name: At_Drought_Reproduction_P Parameter: Organism Value: A. thaliana
  misc_feature: MA Experiment 20001904 PARAMETER Experiment Name: At_Drought_Reproduction_P Parameter: Plant Line Value: WS
  misc_feature: MA Experiment 20001904 PARAMETER Experiment Name: At_Drought_Reproduction_P Parameter: Timepoint (day) Value: 7
  misc_feature: MA Experiment 20001904 PARAMETER Experiment Name: At_Drought_Reproduction_P Parameter: Tissue Value: Rosettes
  misc_feature: MA Experiment 20001904 PARAMETER Experiment Name: At_Drought_Reproduction_P Parameter: Treatment Value: Drought vs. No Drought
  misc_feature: MA Experiment ID: 20001905 Result: Up-regulated in Transcription
  misc_feature: MA Experiment 20001905 PARAMETER Experiment Name: At_Drought_Reproduction_P Parameter: Age (day) Value: 40
  misc_feature: MA Experiment 20001905 PARAMETER Experiment Name: At_Drought_Reproduction_P Parameter: Organism Value: A. thaliana
  misc_feature: MA Experiment 20001905 PARAMETER Experiment Name: At_Drought_Reproduction_P Parameter: Plant Line Value: WS
  misc_feature: MA Experiment 20001905 PARAMETER Experiment Name: At_Drought_Reproduction_P Parameter: Timepoint (day) Value: 10
  misc_feature: MA Experiment 20001905 PARAMETER Experiment Name: At_Drought_Reproduction_P Parameter: Tissue Value: Rosettes
  misc_feature: MA Experiment 20001905 PARAMETER Experiment Name: At_Drought_Reproduction_P Parameter: Treatment Value: Drought vs. No Drought
  misc_feature: MA Experiment ID: 20001906 Result: Up-regulated in Transcription
  misc_feature: MA Experiment 20001906 PARAMETER Experiment Name: At_Drought_Reproduction_P Parameter: Age (day) Value: 35
  misc_feature: MA Experiment 20001906 PARAMETER Experiment Name: At_Drought_Reproduction_P Parameter: Organism Value: A. thaliana
  misc_feature: MA Experiment 20001906 PARAMETER Experiment Name: At_Drought_Reproduction_P Parameter: Plant Line Value: WS
  misc_feature: MA Experiment 20001906 PARAMETER Experiment Name: At_Drought_Reproduction_P Parameter: Timepoint (day) Value: 5
  misc_feature: MA Experiment 20001906 PARAMETER Experiment Name: At_Drought_Reproduction_P Parameter: Tissue Value: Siliques
  misc_feature: MA Experiment 20001906 PARAMETER Experiment Name: At_Drought_Reproduction_P Parameter: Treatment Value: Drought vs. No Drought
  misc_feature: MA Experiment ID: 20001910 Result: Up-regulated in Transcription
  misc_feature: MA Experiment 20001910 PARAMETER Experiment Name: At_Drought_Reproduction_P Parameter: Age (day) Value: 37
  misc_feature: MA Experiment 20001910 PARAMETER Experiment Name: At_Drought_Reproduction_P Parameter: Organism Value: A. thaliana
  misc_feature: MA Experiment 20001910 PARAMETER Experiment Name: At_Drought_Reproduction_P Parameter: Plant Line Value: WS
  misc_feature: MA Experiment 20001910 PARAMETER Experiment Name: At_Drought_Reproduction_P Parameter: Timepoint (day) Value: 7
  misc_feature: MA Experiment 20001910 PARAMETER Experiment Name: At_Drought_Reproduction_P Parameter: Tissue Value: Flowers
  misc_feature: MA Experiment 20001910 PARAMETER Experiment Name: At_Drought_Reproduction_P Parameter: Treatment Value: Drought vs. No Drought
  misc_feature: MA Experiment ID: 20001911 Result: Up-regulated in Transcription
  misc_feature: MA Experiment 20001911 PARAMETER Experiment Name: At_Drought_Reproduction_P Parameter: Age (day) Value: 40
  misc_feature: MA Experiment 20001911 PARAMETER Experiment Name: At_Drought_Reproduction_P Parameter: Organism Value: A. thaliana
  misc_feature: MA Experiment 20001911 PARAMETER Experiment Name: At_Drought_Reproduction_P Parameter: Plant Line Value: WS
  misc_feature: MA Experiment 20001911 PARAMETER Experiment Name: At_Drought_Reproduction_P Parameter: Timepoint (day) Value: 10
  misc_feature: MA Experiment 20001911 PARAMETER Experiment Name: At_Drought_Reproduction_P Parameter: Tissue Value: Flowers
  misc_feature: MA Experiment 20001911 PARAMETER Experiment Name: At_Drought_Reproduction_P Parameter: Treatment Value: Drought vs. No Drought
aacatacacatcaccactaagtagaagaaaaatggcgactcttaaggtttctgattctgttcctgctccttctgatgatgctgagcaattgagaaccgcttttgaaggatggggtacgaacgaggacttgatcatatcaatcttggctcacagaagtgctgaacagaggaaagtcatcaggcaagcataccatgaaacctacggcgaagaccttctcaagactcttgacaaggagctctctaacgacttcgagagagctatcttgttgtggactcttgaacccggtgagcgtgatgctttattggctaatgaagctacaaaaagatggacttcaagcaaccaagtgcttatggaagttgcttgcacaaggacatcaacgcagctgcttcacgctaggcaagcttaccatgctcgctacaagaagtctcttgaagaggacgttgctcaccacactaccggtgacttcagaaagcttttggtttctcttgttacctcatacaggtacgaaggagatgaagtgaacatgacattggctaagcaagaagctaagctggtccatgaaaaaatcaaggacaagcactacaatgatgaggatgttattagaatcttgtccacaagaagcaaagctcagatcaatgctacttttaaccgttaccaagatgatcatggcgaggaaattctcaagagtcttgaggaaggagatgatgatgacaagttccttgctttgttgaggtcaaccattcagtgcttgacaagaccagagctttactttgtcgatgttcttcgttcagcaatcaacaaaactggaactgatgaaggagcactcactagaattgtcaccacaagagctgagattgacttgaaggtcattggagaggagtaccagcgcaggaacagcattcctttggagaaagccattaccaaagacacacgtggagattacgagaagatgctcgtcgcacttctcggtgaagatgatgcttaatcaatcaatcctctacagagaaacataagcttctttatagcttatgttatctcttatctccctctctctatctctctttttgatgagtttcaaatcgtttgattttgtttctacaaaaaccttgtttgtttctgttgtgtgttttgagttactaaataatgcaaaagagagagacagagagaaccagtgtggtctcttaagttatatatatatgaagagcattggccc

SEQ ID NO: 35541 - protein, 327 aa, Arabidopsis thaliana
  peptide (1)..(327): Ceres Seq. ID no. 15219131
  misc_feature (23)..(90): Pfam Name: Annexin Pfam Description: Annexin
  misc_feature (23)..(90): Pfam Name: Annexin Pfam Description: Annexin
  misc_feature (11)..(326): Homolog of NCBI NO: 12084607 NR Description: Chain A, Crystal Structure Of Annexin 24(Ca32)
  misc_feature (11)..(326): Homolog of NCBI NO: 2129923 NR Description: annexin - pepper
  misc_feature (12)..(323): Homolog of NCBI NO: 7441510 NR Description: annexin - upland cotton (fragment)
  misc_feature (11)..(327): Homolog of NCBI NO: 2459926 NR Description: annexin [Lavatera thuringiaca]
  misc_feature (12)..(323): Homolog of NCBI NO: 33357398 NR Description: Chain A, Annexin Gh1 From Cotton
  misc_feature (11)..(326): Homolog of NCBI NO: 12084607 NR Description: Chain A, Crystal Structure Of Annexin 24(Ca32)
  misc_feature (12)..(323): Homolog of NCBI NO: 7441510 NR Description: annexin - upland cotton (fragment)
  misc_feature (12)..(323): Homolog of NCBI NO: 33357398 NR Description: Chain A, Annexin Gh1 From Cotton
  misc_feature (11)..(327): Homolog of NCBI NO: 15220216 NR Description: Ca2+-dependent membrane-binding protein annexin
  misc_feature (11)..(327): Homolog of NCBI NO: 1621539 NR Description: annexin-like protein
  misc_feature (13)..(327): Homolog of NCBI NO: 1429207 NR Description: annexin [Arabidopsis thaliana]
  misc_feature (11)..(323): Homolog of NCBI NO: 7484723 NR Description: fiber annexin - upland cotton
  misc_feature (12)..(323): Homolog of NCBI NO: 15214410 NR Description: annexin [Gossypium hirsutum]
  misc_feature (11)..(327): Homolog of NCBI NO: 2459926 NR Description: annexin [Lavatera thuringiaca]
  misc_feature (11)..(326): Homolog of NCBI NO: 2129923 NR Description: annexin - pepper
  misc_feature (12)..(323): Homolog of NCBI NO: 15214410 NR Description: annexin [Gossypium hirsutum]
  misc_feature (11)..(323): Homolog of NCBI NO: 7484723 NR Description: fiber annexin - upland cotton
  misc_feature (13)..(327): Homolog of NCBI NO: 1429207 NR Description: annexin [Arabidopsis thaliana]
  misc_feature (11)..(327): Homolog of NCBI NO: 1621539 NR Description: annexin-like protein
  misc_feature (11)..(327): Homolog of NCBI NO: 15220216 NR Description: Ca2+-dependent membrane-binding protein annexin
TYTSPLSRRKMATLKVSDSVPAPSDDAEQLRTAFEGWGTNEDLIISILAHRSAEQRKVIRQAYHETYGEDLLKTLDKELSNDFERAILLWTLEPGERDALLANEATKRWTSSNQVLMEVACTRTSTQLLHARQAYHARYKKSLEEDVAHHTTGDFRKLLVSLVTSYRYEGDEVNMTLAKQEAKLVHEKIKDKHYNDEDVIRILSTRSKAQINATFNRYQDDHGEEILKSLEEGDDDDKFLALLRSTIQCLTRPELYFVDVLRSAINKTGTDEGALTRIVTTRAEIDLKVIGEEYQRRNSIPLEKAITKDTRGDYEKMLVALLGEDDA

SEQ ID NO: 35542 - protein, 317 aa, Arabidopsis thaliana
  peptide (1)..(317): Ceres Seq. ID no. 15219132
  misc_feature (13)..(80): Pfam Name: Annexin Pfam Description: Annexin
  misc_feature (13)..(80): Pfam Name: Annexin Pfam Description: Annexin
  misc_feature (1)..(316): Homolog of NCBI NO: 12084607 NR Description: Chain A, Crystal Structure Of Annexin 24(Ca32)
  misc_feature (1)..(316): Homolog of NCBI NO: 2129923 NR Description: annexin - pepper
  misc_feature (2)..(313): Homolog of NCBI NO: 7441510 NR Description: annexin - upland cotton (fragment)
  misc_feature (1)..(317): Homolog of NCBI NO: 2459926 NR Description: annexin [Lavatera thuringiaca]
  misc_feature (2)..(313): Homolog of NCBI NO: 33357398 NR Description: Chain A, Annexin Gh1 From Cotton
  misc_feature (1)..(316): Homolog of NCBI NO: 12084607 NR Description: Chain A, Crystal Structure Of Annexin 24(Ca32)
  misc_feature (2)..(313): Homolog of NCBI NO: 7441510 NR Description: annexin - upland cotton (fragment)
  misc_feature (2)..(313): Homolog of NCBI NO: 33357398 NR Description: Chain A, Annexin Gh1 From Cotton
  misc_feature (1)..(317): Homolog of NCBI NO: 15220216 NR Description: Ca2+-dependent membrane-binding protein annexin
  misc_feature (1)..(317): Homolog of NCBI NO: 1621539 NR Description: annexin-like protein
  misc_feature (3)..(317): Homolog of NCBI NO: 1429207 NR Description: annexin [Arabidopsis thaliana]
  misc_feature (1)..(313): Homolog of NCBI NO: 7484723 NR Description: fiber annexin - upland cotton
  misc_feature (2)..(313): Homolog of NCBI NO: 15214410 NR Description: annexin [Gossypium hirsutum]
  misc_feature (1)..(317): Homolog of NCBI NO: 2459926 NR Description: annexin [Lavatera thuringiaca]
  misc_feature (1)..(316): Homolog of NCBI NO: 2129923 NR Description: annexin - pepper
  misc_feature (2)..(313): Homolog of NCBI NO: 15214410 NR Description: annexin [Gossypium hirsutum]
  misc_feature (1)..(313): Homolog of NCBI NO: 7484723 NR Description: fiber annexin - upland cotton
  misc_feature (3)..(317): Homolog of NCBI NO: 1429207 NR Description: annexin [Arabidopsis thaliana]
  misc_feature (1)..(317): Homolog of NCBI NO: 1621539 NR Description: annexin-like protein
  misc_feature (1)..(317): Homolog of NCBI NO: 15220216 NR Description: Ca2+-dependent membrane-binding protein annexin
MATLKVSDSVPAPSDDAEQLRTAFEGWGTNEDLIISILAHRSAEQRKVIRQAYHETYGEDLLKTLDKELSNDFERAILLWTLEPGERDALLANEATKRWTSSNQVLMEVACTRTSTQLLHARQAYHARYKKSLEEDVAHHTTGDFRKLLVSLVTSYRYEGDEVNMTLAKQEAKLVHEKIKDKHYNDEDVIRILSTRSKAQINATFNRYQDDHGEEILKSLEEGDDDDKFLALLRSTIQCLTRPELYFVDVLRSAINKTGTDEGALTRIVTTRAEIDLKVIGEEYQRRNSIPLEKAITKDTRGDYEKMLVALLGEDDA

SEQ ID NO: 35543 - protein, 211 aa, Arabidopsis thaliana; identical to SEQ ID NO: 24550
  peptide (1)..(211): Ceres Seq. ID no. 15219133
  misc_feature (1)..(210): Homolog of NCBI NO: 12084607 NR Description: Chain A, Crystal Structure Of Annexin 24(Ca32)
  misc_feature (1)..(210): Homolog of NCBI NO: 2129923 NR Description: annexin - pepper
  misc_feature (1)..(207): Homolog of NCBI NO: 7441510 NR Description: annexin - upland cotton (fragment)
  misc_feature (1)..(211): Homolog of NCBI NO: 2459926 NR Description: annexin [Lavatera thuringiaca]
  misc_feature (1)..(207): Homolog of NCBI NO: 33357398 NR Description: Chain A, Annexin Gh1 From Cotton
  misc_feature (1)..(207): Homolog of NCBI NO: 15214410 NR Description: annexin [Gossypium hirsutum]
  misc_feature (1)..(207): Homolog of NCBI NO: 7484723 NR Description: fiber annexin - upland cotton
  misc_feature (1)..(211): Homolog of NCBI NO: 1429207 NR Description: annexin [Arabidopsis thaliana]
  misc_feature (1)..(211): Homolog of NCBI NO: 1621539 NR Description: annexin-like protein
  misc_feature (1)..(211): Homolog of NCBI NO: 15220216 NR Description: Ca2+-dependent membrane-binding protein annexin
  misc_feature (1)..(210): Homolog of NCBI NO: 12084607 NR Description: Chain A, Crystal Structure Of Annexin 24(Ca32)
  misc_feature (1)..(210): Homolog of NCBI NO: 2129923 NR Description: annexin - pepper
  misc_feature (1)..(207): Homolog of NCBI NO: 7441510 NR Description: annexin - upland cotton (fragment)
  misc_feature (1)..(211): Homolog of NCBI NO: 2459926 NR Description: annexin [Lavatera thuringiaca]
  misc_feature (1)..(207): Homolog of NCBI NO: 33357398 NR Description: Chain A, Annexin Gh1 From Cotton
  misc_feature (1)..(207): Homolog of NCBI NO: 15214410 NR Description: annexin [Gossypium hirsutum]
  misc_feature (1)..(207): Homolog of NCBI NO: 7484723 NR Description: fiber annexin - upland cotton
  misc_feature (1)..(211): Homolog of NCBI NO: 1429207 NR Description: annexin [Arabidopsis thaliana]
  misc_feature (1)..(211): Homolog of NCBI NO: 1621539 NR Description: annexin-like protein
  misc_feature (1)..(211): Homolog of NCBI NO: 15220216 NR Description: Ca2+-dependent membrane-binding protein annexin

SEQ ID NO: 35544 - DNA, 710 bp, Arabidopsis thaliana; identical to SEQ ID NO: 20991
  misc_feature (1)..(710): Ceres Seq. ID no. 13489897
  misc_feature: MA Experiment ID: 108434 Result: Up-regulated in Transcription
  misc_feature: MA Experiment 108434 PARAMETER Experiment Name: At_Root_Tips_cDNA_P Parameter: Tissue Value: Root Tips
  misc_feature: MA Experiment ID: 108462 Result: Down-regulated in Transcription
  misc_feature: MA Experiment 108462 PARAMETER Experiment Name: At_Germinating_Seeds_cDNA_P Parameter: Age (day) Value: 2 vs. 0
  misc_feature: MA Experiment 108462 PARAMETER Experiment Name: At_Germinating_Seeds_cDNA_P Parameter: Tissue Value: Germinating Seeds
  misc_feature: MA Experiment ID: 108463 Result: Down-regulated in Transcription
  misc_feature: MA Experiment 108463 PARAMETER Experiment Name: At_Germinating_Seeds_cDNA_P Parameter: Age (day) Value: 3 vs. 0
  misc_feature: MA Experiment 108463 PARAMETER Experiment Name: At_Germinating_Seeds_cDNA_P Parameter: Tissue Value: Germinating Seeds
  misc_feature: MA Experiment ID: 108488 Result: Up-regulated in Transcription
  misc_feature: MA Experiment ID: 108561 Result: Down-regulated in Transcription
  misc_feature: MA Experiment 108561 PARAMETER Experiment Name: At_100uM_ABA_cDNA_P Parameter: Timepoint (hr) Value: 6
  misc_feature: MA Experiment 108561 PARAMETER Experiment Name: At_100uM_ABA_cDNA_P Parameter: Tissue Value: Aerial
  misc_feature: MA Experiment 108561 PARAMETER Experiment Name: At_100uM_ABA_cDNA_P Parameter: Treatment Value: 100uM ABA vs. No Treatment
  misc_feature: MA Experiment ID: 108573 Result: Down-regulated in Transcription
  misc_feature: MA Experiment 108573 PARAMETER Experiment Name: At_Drought_cDNA_P Parameter: Timepoint (hr) Value: 6
  misc_feature: MA Experiment 108573 PARAMETER Experiment Name: At_Drought_cDNA_P Parameter: Tissue Value: Aerial
  misc_feature: MA Experiment 108573 PARAMETER Experiment Name: At_Drought_cDNA_P Parameter: Treatment Value: Drought vs. No Drought
  misc_feature: MA Experiment ID: 108585 Result: Down-regulated in Transcription
  misc_feature: MA Experiment 108585 PARAMETER Experiment Name: At_5mM_NaNP_cDNA_P Parameter: Timepoint (hr) Value: 6
  misc_feature: MA Experiment 108585 PARAMETER Experiment Name: At_5mM_NaNP_cDNA_P Parameter: Tissue Value: Aerial
  misc_feature: MA Experiment 108585 PARAMETER Experiment Name: At_5mM_NaNP_cDNA_P Parameter: Treatment Value: null
  misc_feature: MA Experiment ID: 108595 Result: Down-regulated in Transcription
  misc_feature: MA Experiment 108595 PARAMETER Experiment Name: At_Ler-pi_Ovule_cDNA_P Parameter: Plant Line Value: null
  misc_feature: MA Experiment ID: 108607 Result: Down-regulated in Transcription
  misc_feature: MA Experiment 108607 PARAMETER Experiment Name: At_100uM_ABA_cDNA_P Parameter: Timepoint (hr) Value: 4
  misc_feature: MA Experiment 108607 PARAMETER Experiment Name: At_100uM_ABA_cDNA_P Parameter: Tissue Value: Aerial
  misc_feature: MA Experiment 108607 PARAMETER Experiment Name: At_100uM_ABA_cDNA_P Parameter: Treatment Value: 100uM ABA vs. No Treatment
  misc_feature: MA Experiment ID: 108668 Result: Down-regulated in Transcription
  misc_feature: MA Experiment 108668 PARAMETER Experiment Name: At_2mM_SA_cDNA_P Parameter: Plant Line Value: WS
  misc_feature: MA Experiment 108668 PARAMETER Experiment Name: At_2mM_SA_cDNA_P Parameter: Timepoint (hr) Value: 6
  misc_feature: MA Experiment 108668 PARAMETER Experiment Name: At_2mM_SA_cDNA_P Parameter: Treatment Value: 2mM SA vs. No Treatment
  misc_feature: MA Experiment ID: 20000089 Result: Up-regulated in Transcription
  misc_feature: MA Experiment ID: 20000224 Result: Down-regulated in Transcription
  misc_feature: MA Experiment ID: 20000307 Result: Up-regulated in Transcription
  misc_feature: MA Experiment 20000307 PARAMETER Experiment Name: At_Germinating_Seeds_Sub_P Parameter: Age (hr) Value: 24 vs. 0
  misc_feature: MA Experiment 20000307 PARAMETER Experiment Name: At_Germinating_Seeds_Sub_P Parameter: Organism Value: A. thaliana
  misc_feature: MA Experiment 20000307 PARAMETER Experiment Name: At_Germinating_Seeds_Sub_P Parameter: Plant Line Value: WS
  misc_feature: MA Experiment 20000307 PARAMETER Experiment Name: At_Germinating_Seeds_Sub_P Parameter: Tissue Value: Germinating Seeds
  misc_feature: MA Experiment ID: 20000314 Result: Down-regulated in Transcription
  misc_feature: MA Experiment 20000314 PARAMETER Experiment Name: At_14day_Shoots-Roots_Sub_P Parameter: Age (day) Value: 14
  misc_feature: MA Experiment 20000314 PARAMETER Experiment Name: At_14day_Shoots-Roots_Sub_P Parameter: Organism Value: A. thaliana
  misc_feature: MA Experiment 20000314 PARAMETER Experiment Name: At_14day_Shoots-Roots_Sub_P Parameter: Plant Line Value: WS
  misc_feature: MA Experiment 20000314 PARAMETER Experiment Name: At_14day_Shoots-Roots_Sub_P Parameter: Tissue Value: Roots vs. Whole Plant
  misc_feature: MA Experiment ID: 20000315 Result: Up-regulated in Transcription
  misc_feature: MA Experiment 20000315 PARAMETER Experiment Name: At_14day_Shoots-Roots_Sub_P Parameter: Age (day) Value: 14
  misc_feature: MA Experiment 20000315 PARAMETER Experiment Name: At_14day_Shoots-Roots_Sub_P Parameter: Organism Value: A. thaliana
  misc_feature: MA Experiment 20000315 PARAMETER Experiment Name: At_14day_Shoots-Roots_Sub_P Parameter: Plant Line Value: WS
  misc_feature: MA Experiment 20000315 PARAMETER Experiment Name: At_14day_Shoots-Roots_Sub_P Parameter: Tissue Value: Shoots vs. Whole Plant
  misc_feature: MA Experiment ID: 20000347 Result: Down-regulated in Transcription
  misc_feature: MA Experiment 20000347 PARAMETER Experiment Name: At_2mM_SA_Sub_P Parameter: Age (day) Value: 14
  misc_feature: MA Experiment 20000347 PARAMETER Experiment Name: At_2mM_SA_Sub_P Parameter: Organism Value: A. thaliana
  misc_feature: MA Experiment 20000347 PARAMETER Experiment Name: At_2mM_SA_Sub_P Parameter: Plant Line Value: WS
  misc_feature: MA Experiment 20000347 PARAMETER Experiment Name: At_2mM_SA_Sub_P Parameter: Timepoint (hr) Value: 6
  misc_feature: MA Experiment 20000347 PARAMETER Experiment Name: At_2mM_SA_Sub_P Parameter: Tissue Value: Aerial
  misc_feature: MA Experiment 20000347 PARAMETER Experiment Name: At_2mM_SA_Sub_P Parameter: Treatment Value: 2mM SA vs. No Treatment
  misc_feature: MA Experiment ID: 20000349 Result: Down-regulated in Transcription
  misc_feature: MA Experiment 20000349 PARAMETER Experiment Name: At_100uM_ABA_Sub_P Parameter: Age (day) Value: 14
  misc_feature: MA Experiment 20000349 PARAMETER Experiment Name: At_100uM_ABA_Sub_P Parameter: Organism Value: A. thaliana
  misc_feature: MA Experiment 20000349 PARAMETER Experiment Name: At_100uM_ABA_Sub_P Parameter: Plant Line Value: WS
  misc_feature: MA Experiment 20000349 PARAMETER Experiment Name: At_100uM_ABA_Sub_P Parameter: Timepoint (hr) Value: 6
  misc_feature: MA Experiment 20000349 PARAMETER Experiment Name: At_100uM_ABA_Sub_P Parameter: Tissue Value: Aerial
  misc_feature: MA Experiment 20000349 PARAMETER Experiment Name: At_100uM_ABA_Sub_P Parameter: Treatment Value: 100uM ABA vs. No Treatment
  misc_feature: MA Experiment ID: 20000352 Result: Down-regulated in Transcription
  misc_feature: MA Experiment 20000352 PARAMETER Experiment Name: At_Drought_Sub_P Parameter: Age (day) Value: 7
  misc_feature: MA Experiment 20000352 PARAMETER Experiment Name: At_Drought_Sub_P Parameter: Organism Value: A. thaliana
  misc_feature: MA Experiment 20000352 PARAMETER Experiment Name: At_Drought_Sub_P Parameter: Plant Line Value: WS
  misc_feature: MA Experiment 20000352 PARAMETER Experiment Name: At_Drought_Sub_P Parameter: Timepoint (hr) Value: 6
  misc_feature: MA Experiment 20000352 PARAMETER Experiment Name: At_Drought_Sub_P Parameter: Tissue Value: Whole Plant
  misc_feature: MA Experiment 20000352 PARAMETER Experiment Name: At_Drought_Sub_P Parameter: Treatment Value: Drought vs. No Drought
  misc_feature: MA Experiment ID: 20000355 Result: Up-regulated in Transcription
  misc_feature: MA Experiment 20000355 PARAMETER Experiment Name: At_Siliques_Sub_P Parameter: Age (day) Value: 21
  misc_feature: MA Experiment 20000355 PARAMETER Experiment Name: At_Siliques_Sub_P Parameter: Organism Value: A. thaliana
  misc_feature: MA Experiment 20000355 PARAMETER Experiment Name: At_Siliques_Sub_P Parameter: Plant Line Value: WS
  misc_feature: MA Experiment 20000355 PARAMETER Experiment Name: At_Siliques_Sub_P Parameter: Tissue Value: Less Than 5mm Siliques vs. Whole Plant

SEQ ID NO: 35545 - protein, 139 aa, Arabidopsis thaliana; identical to SEQ ID NO: 20992
  peptide (1)..(139): Ceres Seq. ID no. 13489898
  misc_feature (54)..(130): Pfam Name: Protein of unknown function (DUF861) Pfam Description: Protein of unknown function (DUF861)
  misc_feature (54)..(130): Pfam Name: Protein of unknown function (DUF861) Pfam Description: Protein of unknown function (DUF861)
  misc_feature (20)..(115): Homolog of NCBI NO: 15234988 NR Description: expressed protein [Arabidopsis thaliana]
  misc_feature (45)..(127): Homolog of NCBI NO: 15229267 NR Description: hypothetical protein [Arabidopsis thaliana]
  misc_feature (46)..(114): Homolog of NCBI NO: 23127631 NR Description: hypothetical protein [Nostoc punctiforme]
  misc_feature (42)..(134): Homolog of NCBI NO: 15235021 NR Description: expressed protein [Arabidopsis thaliana]
  misc_feature (24)..(134): Homolog of NCBI NO: 21553516 NR Description: unknown [Arabidopsis thaliana]
  misc_feature (20)..(115): Homolog of NCBI NO: 15234988 NR Description: expressed protein [Arabidopsis thaliana]
  misc_feature (46)..(114): Homolog of NCBI NO: 23127631 NR Description: hypothetical protein [Nostoc punctiforme]
  misc_feature (24)..(134): Homolog of NCBI NO: 21553516 NR Description: unknown [Arabidopsis thaliana]
  misc_feature (1)..(139): Homolog of NCBI NO: 15225202 NR Description: expressed protein [Arabidopsis thaliana]
  misc_feature (1)..(139): Homolog of NCBI NO: 18403036 NR Description: expressed protein [Arabidopsis thaliana]
  misc_feature (1)..(139): Homolog of NCBI NO: 21592432 NR Description: unknown [Arabidopsis thaliana]
  misc_feature (6)..(57): Homolog of NCBI NO: 26451964 NR Description: unknown protein [Arabidopsis thaliana]
  misc_feature (11)..(115): Homolog of NCBI NO: 38344542 NR Description: OSJNBa0027P08.10 [Oryza sativa (japonica
  misc_feature (42)..(134): Homolog of NCBI NO: 15235021 NR Description: expressed protein [Arabidopsis thaliana]
  misc_feature (45)..(127): Homolog of NCBI NO: 15229267 NR Description: hypothetical protein [Arabidopsis thaliana]
  misc_feature (11)..(115): Homolog of NCBI NO: 38344542 NR Description: OSJNBa0027P08.10 [Oryza sativa (japonica
  misc_feature (6)..(57): Homolog of NCBI NO: 26451964 NR Description: unknown protein [Arabidopsis thaliana]
  misc_feature (1)..(139): Homolog of NCBI NO: 21592432 NR Description: unknown [Arabidopsis thaliana]
  misc_feature (1)..(139): Homolog of NCBI NO: 18403036 NR Description: expressed protein [Arabidopsis thaliana]
  misc_feature (1)..(139): Homolog of NCBI NO: 15225202 NR Description: expressed protein [Arabidopsis thaliana]

SEQ ID NO: 35546 - protein, 134 aa, Arabidopsis thaliana; identical to SEQ ID NO: 20993
  peptide (1)..(134): Ceres Seq. ID no. 13489899
  misc_feature (49)..(125): Pfam Name: Protein of unknown function (DUF861) Pfam Description: Protein of unknown function (DUF861)
  misc_feature (49)..(125): Pfam Name: Protein of unknown function (DUF861) Pfam Description: Protein of unknown function (DUF861)
  misc_feature (15)..(110): Homolog of NCBI NO: 15234988 NR Description: expressed protein [Arabidopsis thaliana]
  misc_feature (40)..(122): Homolog of NCBI NO: 15229267 NR Description: hypothetical protein [Arabidopsis thaliana]
  misc_feature (41)..(109): Homolog of NCBI NO: 23127631 NR Description: hypothetical protein [Nostoc punctiforme]
  misc_feature (37)..(129): Homolog of NCBI NO: 15235021 NR Description: expressed protein [Arabidopsis thaliana]
  misc_feature (19)..(129): Homolog of NCBI NO: 21553516 NR Description: unknown [Arabidopsis thaliana]
  misc_feature (15)..(110): Homolog of NCBI NO: 15234988 NR Description: expressed protein [Arabidopsis thaliana]
  misc_feature (41)..(109): Homolog of NCBI NO: 23127631 NR Description: hypothetical protein [Nostoc punctiforme]
  misc_feature (19)..(129): Homolog of NCBI NO: 21553516 NR Description: unknown [Arabidopsis thaliana]
  misc_feature (1)..(134): Homolog of NCBI NO: 15225202 NR Description: expressed protein [Arabidopsis thaliana]
  misc_feature (1)..(134): Homolog of NCBI NO: 18403036 NR Description: expressed protein [Arabidopsis thaliana]
  misc_feature (1)..(134): Homolog of NCBI NO: 21592432 NR Description: unknown [Arabidopsis thaliana]
  misc_feature (1)..(52): Homolog of NCBI NO: 26451964 NR Description: unknown protein [Arabidopsis thaliana]
  misc_feature (6)..(110): Homolog of NCBI NO: 38344542 NR Description: OSJNBa0027P08.10 [Oryza sativa (japonica
  misc_feature (37)..(129): Homolog of NCBI NO: 15235021 NR Description: expressed protein [Arabidopsis thaliana]
  misc_feature (40)..(122): Homolog of NCBI NO: 15229267 NR Description: hypothetical protein [Arabidopsis thaliana]
  misc_feature (6)..(110): Homolog of NCBI NO: 38344542 NR Description: OSJNBa0027P08.10 [Oryza sativa (japonica
  misc_feature (1)..(52): Homolog of NCBI NO: 26451964 NR Description: unknown protein [Arabidopsis thaliana]
  misc_feature (1)..(134): Homolog of NCBI NO: 21592432 NR Description: unknown [Arabidopsis thaliana]
  misc_feature (1)..(134): Homolog of NCBI NO: 18403036 NR Description: expressed protein [Arabidopsis thaliana]
  misc_feature (1)..(134): Homolog of NCBI NO: 15225202 NR Description: expressed protein [Arabidopsis thaliana]

SEQ ID NO: 35547 - protein, 106 aa, Arabidopsis thaliana; identical to SEQ ID NO: 20994
  peptide (1)..(106): Ceres Seq. ID no. 13489900
  misc_feature (21)..(97): Pfam Name: Protein of unknown function (DUF861) Pfam Description: Protein of unknown function (DUF861)
  misc_feature (21)..(97): Pfam Name: Protein of unknown function (DUF861) Pfam Description: Protein of unknown function (DUF861)
  misc_feature (1)..(82): Homolog of NCBI NO: 15234988 NR Description: expressed protein [Arabidopsis thaliana]
  misc_feature (12)..(94): Homolog of NCBI NO: 15229267 NR Description: hypothetical protein [Arabidopsis thaliana]
  misc_feature (13)..(81): Homolog of NCBI NO: 23127631 NR Description: hypothetical protein [Nostoc punctiforme]
  misc_feature (9)..(101): Homolog of NCBI NO: 15235021 NR Description: expressed protein [Arabidopsis thaliana]
  misc_feature (1)..(101): Homolog of NCBI NO: 21553516 NR Description: unknown [Arabidopsis thaliana]
  misc_feature (1)..(82): Homolog of NCBI NO: 15234988 NR Description: expressed protein [Arabidopsis thaliana]
  misc_feature (13)..(81): Homolog of NCBI NO: 23127631 NR Description: hypothetical protein [Nostoc punctiforme]
  misc_feature (1)..(101): Homolog of NCBI NO: 21553516 NR Description: unknown [Arabidopsis thaliana]
  misc_feature (1)..(106): Homolog of NCBI NO: 15225202 NR Description: expressed protein [Arabidopsis thaliana]
  misc_feature (1)..(106): Homolog of NCBI NO: 18403036 NR Description: expressed protein [Arabidopsis thaliana]
  misc_feature (1)..(106): Homolog of NCBI NO: 21592432 NR Description: unknown [Arabidopsis thaliana]
  misc_feature (1)..(24): Homolog of NCBI NO: 26451964 NR Description: unknown protein [Arabidopsis thaliana]
  misc_feature (1)..(82): Homolog of NCBI NO: 38344542 NR Description: OSJNBa0027P08.10 [Oryza sativa (japonica
  misc_feature (9)..(101): Homolog of NCBI NO: 15235021 NR Description: expressed protein [Arabidopsis thaliana]
  misc_feature (12)..(94): Homolog of NCBI NO: 15229267 NR Description: hypothetical protein [Arabidopsis thaliana]
  misc_feature (1)..(82): Homolog of NCBI NO: 38344542 NR Description: OSJNBa0027P08.10 [Oryza sativa (japonica
  misc_feature (1)..(24): Homolog of NCBI NO: 26451964 NR Description: unknown protein [Arabidopsis thaliana]
  misc_feature (1)..(106): Homolog of NCBI NO: 21592432 NR Description: unknown [Arabidopsis thaliana]
  misc_feature (1)..(106): Homolog of NCBI NO: 18403036 NR Description: expressed protein [Arabidopsis thaliana]
  misc_feature (1)..(106): Homolog of NCBI NO: 15225202 NR Description: expressed protein [Arabidopsis thaliana]

SEQ ID NO: 35548 - DNA, 1263 bp, Arabidopsis thaliana
  misc_feature (1)..(1263): Ceres Seq. ID no. 12324361
  misc_feature: MA Experiment ID: 108461 Result: Down-regulated in Transcription
  misc_feature: MA Experiment 108461 PARAMETER Experiment Name: At_Germinating_Seeds_cDNA_P Parameter: Age (day) Value: 1 vs. 0
  misc_feature: MA Experiment 108461 PARAMETER Experiment Name: At_Germinating_Seeds_cDNA_P Parameter: Tissue Value: Germinating Seeds
  misc_feature: MA Experiment ID: 108501 Result: Down-regulated in Transcription
  misc_feature: MA Experiment 108501 PARAMETER Experiment Name: At_ap2_floral_buds_cDNA_P Parameter: Plant Line Value: ap2 (Ler.)
  misc_feature: MA Experiment 108501 PARAMETER Experiment Name: At_ap2_floral_buds_cDNA_P Parameter: Tissue Value: Closed Flower
  misc_feature: MA Experiment ID: 108572 Result: Down-regulated in Transcription
  misc_feature: MA Experiment 108572 PARAMETER Experiment Name: At_Drought_cDNA_P Parameter: Timepoint (hr) Value: 1
  misc_feature: MA Experiment 108572 PARAMETER Experiment Name: At_Drought_cDNA_P Parameter: Tissue Value: Aerial
  misc_feature: MA Experiment 108572 PARAMETER Experiment Name: At_Drought_cDNA_P Parameter: Treatment Value: Drought vs. No Drought
  misc_feature: MA Experiment ID: 20000286 Result: Up-regulated in Transcription
  misc_feature: MA Experiment 20000286 PARAMETER Experiment Name: At_Open_Flower_P Parameter: Age (day) Value: 21
  misc_feature: MA Experiment 20000286 PARAMETER Experiment Name: At_Open_Flower_P Parameter: Plant Line Value: WS
  misc_feature: MA Experiment 20000286 PARAMETER Experiment Name: At_Open_Flower_P Parameter: Tissue Value: Half Open vs. Whole Plant
  misc_feature: MA Experiment ID: 20001910 Result: Down-regulated in Transcription
  misc_feature: MA Experiment 20001910 PARAMETER Experiment Name: At_Drought_Reproduction_P Parameter: Age (day) Value: 37
  misc_feature: MA Experiment 20001910 PARAMETER Experiment Name: At_Drought_Reproduction_P Parameter: Organism Value: A. thaliana
  misc_feature: MA Experiment 20001910 PARAMETER Experiment Name: At_Drought_Reproduction_P Parameter: Plant Line Value: WS
  misc_feature: MA Experiment 20001910 PARAMETER Experiment Name: At_Drought_Reproduction_P Parameter: Timepoint (day) Value: 7
  misc_feature: MA Experiment 20001910 PARAMETER Experiment Name: At_Drought_Reproduction_P Parameter: Tissue Value: Flowers
  misc_feature: MA Experiment 20001910 PARAMETER Experiment Name: At_Drought_Reproduction_P Parameter: Treatment Value: Drought vs. No Drought
ttttcagagattgatgataggtgtagaagaaccatgaaatcgatattaattggatttgttttctttcttttatcatcatttcgtagcttcttcgtgaccaccacctattcccaagtgatccatcaccggcgtctacggccatggccaccgccagaatctgggtccggcccatcacctggcccatctccatcaccacataacaaaaccacaccggcagtgtttttctttggggattcgatcatagatacaggaaataataataatctaacaacagaaatgaaatgtaattttagtccttatggtaaggattttccactcggagttgcaactggtagattcagcaacggaaaggtcgtttccgattatatatctgaatatttgggagtaaaaccaattgtaccagcatattttgaccccaatgtacaactagaagatcttctcacgggtgtatcatttgcttcagagagtaaagtcaatgttggagcaattgacatatttccaacgacacatagcgagagtaaagaggttagtaggggaagagaagacggatcaactgttagccaagggcttatccgttgtggtcgcaggcagcaacgatttggctattacatattatggtcatggtgctcaattgctcaaagatgatatccactactttacttcaaagatggcaaattccgcggcaagttttgttatgcaattatacgaatatggagcaagacaaatagcagttctaggaacaccaccacttggctgcgtaccaatactaagaactctaaaaggaggtcttcgtagagagtgtgctcaagatataaactatgcttctcagcttttcaacgtcaaactctccaacattttggaccaattggcaaaaaacctaccaaattccaatctcatttacattgacatatactctgctttcagtcacatcttagaaaattcagcagattatgggtttgaagaaataaagagaggttgttgtggaactggatttgtggaagctggtccactttgcaatcgattcacaacatttgtgtgctccaatgtatctgcttacatgttttgggatagtctccatcctacccaaagattctataaaatcttaaccaaaatactttttgagaaatacatccacaatttaaattgagtagtgtgatcaaatgactcacattgtatgctttaagttttcttaaagcttgtgcagttgttattgtaagtcactatattgattaccaattgattttaagagaaacttttatcacg

SEQ ID NO: 35549 - protein, 223 aa, Arabidopsis thaliana
  peptide (1)..(223): Ceres Seq. ID no. 12324362
  misc_feature (1)..(214): Pfam Name: GDSL-like Lipase/Acylhydrolase Pfam Description: GDSL-like Lipase/Acylhydrolase
  misc_feature (1)..(198): Homolog of NCBI NO: 25511649 NR Description: T20H2.9 protein - Arabidopsis thaliana
  misc_feature (1)..(198): Homolog of NCBI NO: 15223790 NR Description: anter-specific proline-rich protein APG precursor
  misc_feature (1)..(219): Homolog of NCBI NO: 18266041 NR Description: anther-specific proline-rich protein [Brassica
  misc_feature (1)..(223): Homolog of NCBI NO: 21431729 NR Description: Anter-specific proline-rich protein APG precursor
  misc_feature (1)..(223): Homolog of NCBI NO: 99694 NR Description: proline-rich protein APG - Arabidopsis thaliana
  misc_feature (1)..(220): Homolog of NCBI NO: 728868 NR Description: ANTER-SPECIFIC PROLINE-RICH PROTEIN APG (PROTEIN
  misc_feature (1)..(221): Homolog of NCBI NO: 21592372 NR Description: anter-specific proline-rich protein APG
  misc_feature (1)..(221): Homolog of NCBI NO: 18394825 NR Description: anter-specific proline-rich protein APG
  misc_feature (1)..(159): Homolog of NCBI NO: 15223790 NR Description: anter-specific proline-rich protein APG precursor
  misc_feature (1)..(159): Homolog of NCBI NO: 25511649 NR Description: T20H2.9 protein - Arabidopsis thaliana
MLEQLTYFQRHIARVKRLVGEEKTDQLLAKGLSVVVAGSNDLAITYYGHGAQLLKDDIHYFTSKMANSAASFVMQLYEYGARQIAVLGTPPLGCVPILRTLKGGLRRECAQDINYASQLFNVKLSNILDQLAKNLPNSNLIYIDIYSAFSHILENSADYGFEEIKRGCCGTGFVEAGPLCNRFTTFVCSNVSAYMFWDSLHPTQRFYKILTKILFEKYIHNLN

SEQ ID NO: 35550 - protein, 214 aa, Arabidopsis thaliana
  peptide (1)..(214): Ceres Seq. ID no. 12324363
  misc_feature (73)..(177): Pfam Name: GDSL-like Lipase/Acylhydrolase Pfam Description: GDSL-like Lipase/Acylhydrolase
  misc_feature (47)..(176): Homolog of NCBI NO: 18266041 NR Description: anther-specific proline-rich protein [Brassica
  misc_feature (46)..(154): Homolog of NCBI NO: 21431729 NR Description: Anter-specific proline-rich protein APG precursor
  misc_feature (46)..(154): Homolog of NCBI NO: 99694 NR Description: proline-rich protein APG - Arabidopsis thaliana
  misc_feature (47)..(177): Homolog of NCBI NO: 728868 NR Description: ANTER-SPECIFIC PROLINE-RICH PROTEIN APG (PROTEIN
  misc_feature (4)..(154): Homolog of NCBI NO: 21592372 NR Description: anter-specific proline-rich protein APG
  misc_feature (4)..(154): Homolog of NCBI NO: 18394825 NR Description: anter-specific proline-rich protein APG
  misc_feature (46)..(154): Homolog of NCBI NO: 25511649 NR Description: T20H2.9 protein - Arabidopsis thaliana
  misc_feature (46)..(154): Homolog of NCBI NO: 15223790 NR Description: anter-specific proline-rich protein APG precursor
  misc_feature (72)..(154): Homolog of NCBI NO: 15223790 NR Description: anter-specific proline-rich protein APG precursor
  misc_feature (16)..(154): Homolog of NCBI NO: 25511649 NR Description: T20H2.9 protein - Arabidopsis thaliana
FSEIDDRCRRTMKSILIGFVFFLLSSFRSFFVTTTYSQVIHHRRLRPWPPPESGSGPSPGPSPSPHNKTTPAVFFFGDSIIDTGNNNNLTTEMKCNFSPYGKDFPLGVATGRFSNGKVVSDYISEYLGVKPIVPAYFDPNVQLEDLLTGVSFASESKVNVGAIDIFPTTHSESKEVSRGREDGSTVSQGLIRCGRRQQRFGYYILWSWCSIAQR

SEQ ID NO: 35551 - protein, 203 aa, Arabidopsis thaliana
  peptide (1)..(203): Ceres Seq. ID no. 12324364
  misc_feature (62)..(166): Pfam Name: GDSL-like Lipase/Acylhydrolase Pfam Description: GDSL-like Lipase/Acylhydrolase
  misc_feature (36)..(165): Homolog of NCBI NO: 18266041 NR Description: anther-specific proline-rich protein [Brassica
  misc_feature (35)..(143): Homolog of NCBI NO: 21431729 NR Description: Anter-specific proline-rich protein APG precursor
  misc_feature (35)..(143): Homolog of NCBI NO: 99694 NR Description: proline-rich protein APG - Arabidopsis thaliana
  misc_feature (36)..(166): Homolog of NCBI NO: 728868 NR Description: ANTER-SPECIFIC PROLINE-RICH PROTEIN APG (PROTEIN
  misc_feature (1)..(143): Homolog of NCBI NO: 21592372 NR Description: anter-specific proline-rich protein APG
  misc_feature (1)..(143): Homolog of NCBI NO: 18394825 NR Description: anter-specific proline-rich protein APG
  misc_feature (35)..(143): Homolog of NCBI NO: 25511649 NR Description: T20H2.9 protein - Arabidopsis thaliana
  misc_feature (35)..(143): Homolog of NCBI NO: 15223790 NR Description: anter-specific proline-rich protein APG precursor
  misc_feature (61)..(143): Homolog of NCBI NO: 15223790 NR Description: anter-specific proline-rich protein APG precursor
  misc_feature (5)..(143): Homolog of NCBI NO: 25511649 NR Description: T20H2.9 protein - Arabidopsis thaliana
MKSILIGFVFFLLSSFRSFFVTTTYSQVIHHRRLRPWPPPESGSGPSPGPSPSPHNKTTPAVFFFGDSIIDTGNNNNLTTEMKCNFSPYGKDFPLGVATGRFSNGKVVSDYISEYLGVKPIVPAYFDPNVQLEDLLTGVSFASESKVNVGAIDIFPTTHSESKEVSRGREDGSTVSQGLIRCGRRQQRFGYYILWSWCSIAQR

SEQ ID NO: 35552 - DNA, 1433 bp, Arabidopsis thaliana
  misc_feature (1)..(1433): Ceres Seq. ID no. 12439643
  misc_feature: MA Experiment ID: 108461 Result: Up-regulated in Transcription
  misc_feature: MA Experiment 108461 PARAMETER Experiment Name: At_Germinating_Seeds_cDNA_P Parameter: Age (day) Value: 1 vs. 0
  misc_feature: MA Experiment 108461 PARAMETER Experiment Name: At_Germinating_Seeds_cDNA_P Parameter: Tissue Value: Germinating Seeds
  misc_feature: MA Experiment ID: 108462 Result: Up-regulated in Transcription
  misc_feature: MA Experiment 108462 PARAMETER Experiment Name: At_Germinating_Seeds_cDNA_P Parameter: Age (day) Value: 2 vs. 0
  misc_feature: MA Experiment 108462 PARAMETER Experiment Name: At_Germinating_Seeds_cDNA_P Parameter: Tissue Value: Germinating Seeds
  misc_feature: MA Experiment ID: 108463 Result: Up-regulated in Transcription
  misc_feature: MA Experiment 108463 PARAMETER Experiment Name: At_Germinating_Seeds_cDNA_P Parameter: Age (day) Value: 3 vs. 0
  misc_feature: MA Experiment 108463 PARAMETER Experiment Name: At_Germinating_Seeds_cDNA_P Parameter: Tissue Value: Germinating Seeds
  misc_feature: MA Experiment ID: 20000180 Result: Up-regulated in Transcription
  misc_feature: MA Experiment 20000180 PARAMETER Experiment Name: At_Germinating_Seeds_P Parameter: Age (hr) Value: 24 vs. 0
  misc_feature: MA Experiment 20000180 PARAMETER Experiment Name: At_Germinating_Seeds_P Parameter: Tissue Value: Germinating Seeds
  misc_feature: MA Experiment ID: 20000184 Result: Down-regulated in Transcription
  misc_feature: MA Experiment 20000184 PARAMETER Experiment Name: At_Shoots__P Parameter: Age (day) Value: 7
  misc_feature: MA Experiment 20000184 PARAMETER Experiment Name: At_Shoots__P Parameter: Tissue Value: Shoots vs. Whole Plant
gtcgcatctcgattcaaagctattgataatttcgtcttcttcttccatggaataacgtgtttaggcgtgtatcacatggttctttctttgtgtgacacaaaaccaacataaagcttccatacgatttagacattgtcgatcgctattgtaagatctggtctgggtcctcgattttggtgaggattgtcgggtggaacaaaactctttcttaaaggctctgcagaaattaattctctgctctggctggatctgatagtgattttacagattgttcaggtcagaaatgggcaatccgggatcagacacagagagaaacaagggaaatgtggtctcaagtgtgtttgatcctgcactctctcgattcgttggattttcccagaaactccaaactcgtcttaagtcccagctgaagaatttgacagatgataagcatgggattggttcttcatggaggcaagataaaggaaactcatcgatctccatgcaaattgatctggagaaacagttagattgttggagggaaaacccttcgtggactgatcagatcccagtcgttaaggtgggtattccaaaaggatcgctttgcaatcttaaagccgaggtgaatgttggtttacctcctgatgcagtctataacattgtaattgaccctgacaatagaagagtcttcaagaatatcaaggaggttatgtcgcggaaagtattggtagatgacgggttaaggcaagtggtggaagttgaacaagcagctttgtggagatttctctggtggtcaggaacaatctcagttcatgtcttggtggatcaggatcgggcagatcactctatgaaattcaagcaagtgaaaagtggattcatgaagagattcgaaggaagctggcaagtaaagcctttgtttgtggatgaacatatgtgcgatcgtttgaaaccgaaaacgctggaggagtataacaggtgcactggaggtaaagggaggatcggatctaaggtaacgctggaccagctaatacagccagcgattgttccacctccgcccatttcttggtatctcagaggaatcacggctaagacgacagagatgcttatccatgacttgttggctgagaccgccaggatccgtgcagctggagtaatggaggatggtcactcgcccgatgagcaacggattggcacacctggagatataaaagaaagatggtctgcacatagaagaacatcaaggagacgacgcaatgatttgtgttaagtcacagactcacacagtccatgattctgggataatagatatcttgaggatttttggatcacccagcaatatgtgaacataatataatatttgttttcataagatacactggcatataaatgtgggaatctattccttgttgaagaagtttacaaccatgactcaatgactcatgaccattacaacc

SEQ ID NO: 35553 - protein, 320 aa, Arabidopsis thaliana
  peptide (1)..(320): Ceres Seq. ID no. 12439644
  misc_feature (163)..(262): Pfam Name: Domain of unknown function DUF220 Pfam Description: Domain of unknown function DUF220
  misc_feature (70)..(140): Homolog of NCBI NO: 8778583 NR Description: F28C11.19 [Arabidopsis thaliana]
  misc_feature (132)..(298): Homolog of NCBI NO: 8778583 NR Description: F28C11.19 [Arabidopsis thaliana]
  misc_feature (26)..(278): Homolog of NCBI NO: 15220845 NR Description: putative OBP32pep protein; protein id:
  misc_feature (53)..(278): Homolog of NCBI NO: 15220802 NR Description: putative OBP32pep protein; protein id:
  misc_feature (28)..(315): Homolog of NCBI NO: 8778583 NR Description: F28C11.19 [Arabidopsis thaliana]
  misc_feature (28)..(315): Homolog of NCBI NO: 21554971 NR Description: unknown [Arabidopsis thaliana]
  misc_feature (28)..(315): Homolog of NCBI NO: 18395257 NR Description: Expressed protein
  misc_feature (28)..(277): Homolog of NCBI NO: 2129655 NR Description: hypothetical protein OBP32 - Arabidopsis thaliana
  misc_feature (1)..(320): Homolog of NCBI NO: 21592433 NR Description: unknown [Arabidopsis thaliana]
  misc_feature (1)..(320): Homolog of NCBI NO: 18409585 NR Description: expressed protein
MGNPGSDTERNKGNVVSSVFDPALSRFVGFSQKLQTRLKSQLKNLTDDKHGIGSSWRQDKGNSSISMQIDLEKQLDCWRENPSWTDQIPVVKVGIPKGSLCNLKAEVNVGLPPDAVYNIVIDPDNRRVFKNIKEVMSRKVLVDDGLRQVVEVEQAALWRFLWWSGTISVHVLVDQDRADHSMKFKQVKSGFMKRFEGSWQVKPLFVDEHMCDRLKPKTLEEYNRCTGGKGRIGSKVTLDQLIQPAIVPPPPISWYLRGITAKTTEMLIHDLLAETARIRAAGVMEDGHSPDEQRIGTPGDIKERWSAHRRTSRRRRNDLC

SEQ ID NO: 35554 - protein, 254 aa, Arabidopsis thaliana
  peptide (1)..(254): Ceres Seq. ID no. 12439645
  misc_feature (97)..(196): Pfam Name: Domain of unknown function DUF220 Pfam Description: Domain of unknown function DUF220
  misc_feature (4)..(74): Homolog of NCBI NO: 8778583 NR Description: F28C11.19 [Arabidopsis thaliana]
  misc_feature (66)..(232): Homolog of NCBI NO: 8778583 NR Description: F28C11.19 [Arabidopsis thaliana]
  misc_feature (1)..(212): Homolog of NCBI NO: 15220845 NR Description: putative OBP32pep protein; protein id:
  misc_feature (1)..(212): Homolog of NCBI NO: 15220802 NR Description: putative OBP32pep protein; protein id:
  misc_feature (1)..(249): Homolog of NCBI NO: 8778583 NR Description: F28C11.19 [Arabidopsis thaliana]
  misc_feature (1)..(249): Homolog of NCBI NO: 21554971 NR Description: unknown [Arabidopsis thaliana]
  misc_feature (1)..(249): Homolog of NCBI NO: 18395257 NR Description: Expressed protein
  misc_feature (1)..(211): Homolog of NCBI NO: 2129655 NR Description: hypothetical protein OBP32 - Arabidopsis thaliana
  misc_feature (1)..(254): Homolog of NCBI NO: 21592433 NR Description: unknown [Arabidopsis thaliana]
  misc_feature (1)..(254): Homolog of NCBI NO: 18409585 NR Description: expressed protein
MQIDLEKQLDCWRENPSWTDQIPVVKVGIPKGSLCNLKAEVNVGLPPDAVYNIVIDPDNRRVFKNIKEVMSRKVLVDDGLRQVVEVEQAALWRFLWWSGTISVHVLVDQDRADHSMKFKQVKSGFMKRFEGSWQVKPLFVDEHMCDRLKPKTLEEYNRCTGGKGRIGSKVTLDQLIQPAIVPPPPISWYLRGITAKTTEMLIHDLLAETARIRAAGVMEDGHSPDEQRIGTPGDIKERWSAHRRTSRRRRNDLC

SEQ ID NO: 35555 - protein, 185 aa, Arabidopsis thaliana
  peptide (1)..(185): Ceres Seq. ID no. 12439646
  misc_feature (28)..(127): Pfam Name: Domain of unknown function DUF220 Pfam Description: Domain of unknown function DUF220
  misc_feature (1)..(144): Homolog of NCBI NO: 15220781 NR Description: OBP32pep protein, putative; protein id:
  misc_feature (1)..(163): Homolog of NCBI NO: 8778583 NR Description: F28C11.19 [Arabidopsis thaliana]
  misc_feature (1)..(143): Homolog of NCBI NO: 15220845 NR Description: putative OBP32pep protein; protein id:
  misc_feature (1)..(143): Homolog of NCBI NO: 15220802 NR Description: putative OBP32pep protein; protein id:
  misc_feature (1)..(180): Homolog of NCBI NO: 8778583 NR Description: F28C11.19 [Arabidopsis thaliana]
  misc_feature (1)..(180): Homolog of NCBI NO: 21554971 NR Description: unknown [Arabidopsis thaliana]
  misc_feature (1)..(180): Homolog of NCBI NO: 18395257 NR Description: Expressed protein
  misc_feature (1)..(142): Homolog of NCBI NO: 2129655 NR Description: hypothetical protein OBP32 - Arabidopsis thaliana
  misc_feature (1)..(185): Homolog of NCBI NO: 21592433 NR Description: unknown [Arabidopsis thaliana]
  misc_feature (1)..(185): Homolog of NCBI NO: 18409585 NR Description: expressed protein
MSRKVLVDDGLRQVVEVEQAALWRFLWWSGTISVHVLVDQDRADHSMKFKQVKSGFMKRFEGSWQVKPLFVDEHMCDRLKPKTLEEYNRCTGGKGRIGSKVTLDQLIQPAIVPPPPISWYLRGITAKTTEMLIHDLLAETARIRAAGVMEDGHSPDEQRIGTPGDIKERWSAHRRTSRRRRNDLC

SEQ ID NO: 35556 - DNA, 811 bp, Arabidopsis thaliana
  misc_feature (1)..(811): Ceres Seq. ID no. 12321167
  misc_feature: MA Experiment ID: 108461 Result: Up-regulated in Transcription
  misc_feature: MA Experiment 108461 PARAMETER Experiment Name: At_Germinating_Seeds_cDNA_P Parameter: Age (day) Value: 1 vs. 0
  misc_feature: MA Experiment 108461 PARAMETER Experiment Name: At_Germinating_Seeds_cDNA_P Parameter: Tissue Value: Germinating Seeds
  misc_feature: MA Experiment ID: 108462 Result: Up-regulated in Transcription
  misc_feature: MA Experiment 108462 PARAMETER Experiment Name: At_Germinating_Seeds_cDNA_P Parameter: Age (day) Value: 2 vs. 0
  misc_feature: MA Experiment 108462 PARAMETER Experiment Name: At_Germinating_Seeds_cDNA_P Parameter: Tissue Value: Germinating Seeds
  misc_feature: MA Experiment ID: 108463 Result: Up-regulated in Transcription
  misc_feature: MA Experiment 108463 PARAMETER Experiment Name: At_Germinating_Seeds_cDNA_P Parameter: Age (day) Value: 3 vs. 0
  misc_feature: MA Experiment 108463 PARAMETER Experiment Name: At_Germinating_Seeds_cDNA_P Parameter: Tissue Value: Germinating Seeds
  misc_feature: MA Experiment ID: 108595 Result: Down-regulated in Transcription
  misc_feature: MA Experiment 108595 PARAMETER Experiment Name: At_Ler-pi_Ovule_cDNA_P Parameter: Plant Line Value: null
  misc_feature: MA Experiment ID: 108607 Result: Up-regulated in Transcription
  misc_feature: MA Experiment 108607 PARAMETER Experiment Name: At_100uM_ABA_cDNA_P Parameter: Timepoint (hr) Value: 4
  misc_feature: MA Experiment 108607 PARAMETER Experiment Name: At_100uM_ABA_cDNA_P Parameter: Tissue Value: Aerial
  misc_feature: MA Experiment 108607 PARAMETER Experiment Name: At_100uM_ABA_cDNA_P Parameter: Treatment Value: 100uM ABA vs. No Treatment
  misc_feature: MA Experiment ID: 20000179 Result: Up-regulated in Transcription
  misc_feature: MA Experiment 20000179 PARAMETER Experiment Name: At_Germinating_Seeds_P Parameter: Age (hr) Value: 6 vs. 0
  misc_feature: MA Experiment 20000179 PARAMETER Experiment Name: At_Germinating_Seeds_P Parameter: Tissue Value: Germinating Seeds
  misc_feature: MA Experiment ID: 20000180 Result: Up-regulated in Transcription
  misc_feature: MA Experiment 20000180 PARAMETER Experiment Name: At_Germinating_Seeds_P Parameter: Age (hr) Value: 24 vs. 0
  misc_feature: MA Experiment 20000180 PARAMETER Experiment Name: At_Germinating_Seeds_P Parameter: Tissue Value: Germinating Seeds
  misc_feature: MA Experiment ID: 20000227 Result: Up-regulated in Transcription
  misc_feature: MA Experiment 20000227 PARAMETER Experiment Name: At_Root-Tips-vs-Tops_P Parameter: Tissue Value: Root Tips vs. Root Tops
  misc_feature: MA Experiment ID: 20000794 Result: Down-regulated in Transcription
  misc_feature: MA Experiment 20000794 PARAMETER Experiment Name: At_Petals_P Parameter: Age (day) Value: 23-25 days
  misc_feature: MA Experiment 20000794 PARAMETER Experiment Name: At_Petals_P Parameter: Plant Line Value: WS
  misc_feature: MA Experiment 20000794 PARAMETER Experiment Name: At_Petals_P Parameter: Tissue Value: Petals vs. Whole plant
  misc_feature: MA Experiment ID: 20001558 Result: Down-regulated in Transcription
  misc_feature: MA Experiment 20001558 PARAMETER Experiment Name: At_Drought_Soil_Dry_P Parameter: Age (day) Value: 27
  misc_feature: MA Experiment 20001558 PARAMETER Experiment Name: At_Drought_Soil_Dry_P Parameter: Organism Value: A. thaliana
  misc_feature: MA Experiment 20001558 PARAMETER Experiment Name: At_Drought_Soil_Dry_P Parameter: Plant Line Value: WS
  misc_feature: MA Experiment 20001558 PARAMETER Experiment Name: At_Drought_Soil_Dry_P Parameter: Post Timepoint (hr) Value: 6
  misc_feature: MA Experiment 20001558 PARAMETER Experiment Name: At_Drought_Soil_Dry_P Parameter: Post-Treatment Value: Re-Water vs. No Drought
  misc_feature: MA Experiment 20001558 PARAMETER Experiment Name: At_Drought_Soil_Dry_P Parameter: Timepoint (day) Value: 13
  misc_feature: MA Experiment 20001558 PARAMETER Experiment Name: At_Drought_Soil_Dry_P Parameter: Treatment Value: Drought vs. No Drought
aatctataatcattttgtgactcttggagcactctcttctctttgtctctgtgactcacatggagaagaaactgtgaagataccattgacgttgatctatgatgacatcaagagcacttacaacgatatcaaccccgggatgatcataccttacagaatcaaggttgatctgattgtggatgtgccagtattgggaagactgacattgccgctggagaaatgtggagagatcccaattccaaagaaacctgatgttgatatcgagaagattaagttccagaagttctctttggaggaaaccgtggcgattctccatgtgaggcttcagaacatgaatgatttcgacttggggctcaatgacttggactgtgaagtttggctgtgtgatgtaagcattgggaaagcagagatcgcggactcgatcaagcttgacaaaaacggaagcggattgattaatgtgccgatgacattccgaccaaaggactttggttctgcgctttgggatatgattcgtggtaaaggaacagggtacacaatcaaaggtaatattgatgttgatacaccatttggagctatgaagcttcctattatcaaggaaggtggagagacccgtctgaagaaggaagatgatgatgacgacgatgaggaataaggaaacaaagtgctgcagagacagaatggtcatagttactaaatctccgatcttgaaatgtctatttaaaattaaaaaaaaaaagaaagacttgttttgtgtgctttttgataactgatggatcagacttttgaatagagccgtctttttattggactc

SEQ ID NO: 35557 - protein, 216 aa, Arabidopsis thaliana
  peptide (1)..(216): Ceres Seq. ID no. 12321168
  misc_feature (19)..(86): Pfam Name: Late embryogenesis abundant protein Pfam Description: Late embryogenesis abundant protein
  misc_feature (19)..(216): Homolog of NCBI NO: 34394536 NR Description: late embryogenesis abundant proteins-like
  misc_feature (19)..(216): Homolog of NCBI NO: 3264769 NR Description: late embryogenesis-like protein [Prunus armeniaca]
  misc_feature (19)..(215): Homolog of NCBI NO: 21592483 NR Description: similar to late embryogenesis abundant proteins
  misc_feature (19)..(216): Homolog of NCBI NO: 15224810 NR Description: similar to late embryogenesis abundant proteins
IYNHFVTLGALSSLCLCDSHGEETVKIPLTLIYDDIKSTYNDINPGMIIPYRIKVDLIVDVPVLGRLTLPLEKCGEIPIPKKPDVDIEKIKFQKFSLEETVAILHVRLQNMNDFDLGLNDLDCEVWLCDVSIGKAEIADSIKLDKNGSGLINVPMTFRPKDFGSALWDMIRGKGTGYTIKGNIDVDTPFGAMKLPIIKEGGETRLKKEDDDDDDEE

SEQ ID NO: 35558 - protein, 170 aa, Arabidopsis thaliana
  peptide (1)..(170): Ceres Seq. ID no. 12321169
  misc_feature (36)..(166): Pfam Name: Late embryogenesis abundant protein Pfam Description: Late embryogenesis abundant protein
  misc_feature (1)..(170): Homolog of NCBI NO: 34394536 NR Description: late embryogenesis abundant proteins-like
  misc_feature (1)..(170): Homolog of NCBI NO: 3264769 NR Description: late embryogenesis-like protein [Prunus armeniaca]
  misc_feature (1)..(169): Homolog of NCBI NO: 21592483 NR Description: similar to late embryogenesis abundant proteins
  misc_feature (1)..(170): Homolog of NCBI NO: 15224810 NR Description: similar to late embryogenesis abundant proteins
MIIPYRIKVDLIVDVPVLGRLTLPLEKCGEIPIPKKPDVDIEKIKFQKFSLEETVAILHVRLQNMNDFDLGLNDLDCEVWLCDVSIGKAEIADSIKLDKNGSGLINVPMTFRPKDFGSALWDMIRGKGTGYTIKGNIDVDTPFGAMKLPIIKEGGETRLKKEDDDDDDEE

SEQ ID NO: 35559 - DNA, 842 bp, Arabidopsis thaliana
  misc_feature (1)..(842): Ceres Seq. ID no. 12332852
  misc_feature: MA Experiment ID: 108434 Result: Up-regulated in Transcription
  misc_feature: MA Experiment 108434 PARAMETER Experiment Name: At_Root_Tips_cDNA_P Parameter: Tissue Value: Root Tips
  misc_feature: MA Experiment ID: 108462 Result: Down-regulated in Transcription
  misc_feature: MA Experiment 108462 PARAMETER Experiment Name: At_Germinating_Seeds_cDNA_P Parameter: Age (day) Value: 2 vs. 0
  misc_feature: MA Experiment 108462 PARAMETER Experiment Name: At_Germinating_Seeds_cDNA_P Parameter: Tissue Value: Germinating Seeds
  misc_feature: MA Experiment ID: 108463 Result: Down-regulated in Transcription
  misc_feature: MA Experiment 108463 PARAMETER Experiment Name: At_Germinating_Seeds_cDNA_P Parameter: Age (day) Value: 3 vs. 0
  misc_feature: MA Experiment 108463 PARAMETER Experiment Name: At_Germinating_Seeds_cDNA_P Parameter: Tissue Value: Germinating Seeds
  misc_feature: MA Experiment ID: 108464 Result: Down-regulated in Transcription
  misc_feature: MA Experiment 108464 PARAMETER Experiment Name: At_Germinating_Seeds_cDNA_P Parameter: Age (day) Value: 4 vs. 0
  misc_feature: MA Experiment 108464 PARAMETER Experiment Name: At_Germinating_Seeds_cDNA_P Parameter: Tissue Value: Germinating Seeds
  misc_feature: MA Experiment ID: 108569 Result: Down-regulated in Transcription
  misc_feature: MA Experiment 108569 PARAMETER Experiment Name: At_0.001%_MeJA__cDNA_P Parameter: Timepoint (hr) Value: 6
  misc_feature: MA Experiment 108569 PARAMETER Experiment Name: At_0.001%_MeJA__cDNA_P Parameter: Tissue Value: Aerial
  misc_feature: MA Experiment 108569 PARAMETER Experiment Name: At_0.001%_MeJA__cDNA_P Parameter: Treatment Value: 0.001% MeJA vs. No Treatment
  misc_feature: MA Experiment ID: 108595 Result: Down-regulated in Transcription
  misc_feature: MA Experiment 108595 PARAMETER Experiment Name: At_Ler-pi_Ovule_cDNA_P Parameter: Plant Line Value: null
  misc_feature: MA Experiment ID: 20000227 Result: Up-regulated in Transcription
  misc_feature: MA Experiment 20000227 PARAMETER Experiment Name: At_Root-Tips-vs-Tops_P Parameter: Tissue Value: Root Tips vs. Root Tops
  misc_feature: MA Experiment ID: 20000496 Result: Up-regulated in Transcription
  misc_feature: MA Experiment 20000496 PARAMETER Experiment Name: At_Guard_Cells_P Parameter: Harvest Date Value: 7/19/2002
  misc_feature: MA Experiment 20000496 PARAMETER Experiment Name: At_Guard_Cells_P Parameter: Organism Value: Canola
  misc_feature: MA Experiment 20000496 PARAMETER Experiment Name: At_Guard_Cells_P Parameter: Tissue Value: Guard Cells vs. Leaves
  misc_feature: MA Experiment ID: 20001557 Result: Up-regulated in Transcription
  misc_feature: MA Experiment 20001557 PARAMETER Experiment Name: At_Drought_Soil_Dry_P Parameter: Age (day) Value: 27
  misc_feature: MA Experiment 20001557 PARAMETER Experiment Name: At_Drought_Soil_Dry_P Parameter: Organism Value: A. thaliana
  misc_feature: MA Experiment 20001557 PARAMETER Experiment Name: At_Drought_Soil_Dry_P Parameter: Plant Line Value: WS
  misc_feature: MA Experiment 20001557 PARAMETER Experiment Name: At_Drought_Soil_Dry_P Parameter: Post Timepoint (hr) Value: 3
  misc_feature: MA Experiment 20001557 PARAMETER Experiment Name: At_Drought_Soil_Dry_P Parameter: Post-Treatment Value: Re-Water vs. No Drought
  misc_feature: MA Experiment 20001557 PARAMETER Experiment Name: At_Drought_Soil_Dry_P Parameter: Timepoint (day) Value: 13
  misc_feature: MA Experiment 20001557 PARAMETER Experiment Name: At_Drought_Soil_Dry_P Parameter: Treatment Value: Drought vs. No Drought
  misc_feature: MA Experiment ID: 20001558 Result: Up-regulated in Transcription
  misc_feature: MA Experiment 20001558 PARAMETER Experiment Name: At_Drought_Soil_Dry_P Parameter: Age (day) Value: 27
  misc_feature: MA Experiment 20001558 PARAMETER Experiment Name: At_Drought_Soil_Dry_P Parameter: Organism Value: A. thaliana
  misc_feature: MA Experiment 20001558 PARAMETER Experiment Name: At_Drought_Soil_Dry_P Parameter: Plant Line Value: WS
  misc_feature: MA Experiment 20001558 PARAMETER Experiment Name: At_Drought_Soil_Dry_P Parameter: Post Timepoint (hr) Value: 6
  misc_feature: MA Experiment 20001558 PARAMETER Experiment Name: At_Drought_Soil_Dry_P Parameter: Post-Treatment Value: Re-Water vs. No Drought
  misc_feature: MA Experiment 20001558 PARAMETER Experiment Name: At_Drought_Soil_Dry_P Parameter: Timepoint (day) Value: 13
  misc_feature: MA Experiment 20001558 PARAMETER Experiment Name: At_Drought_Soil_Dry_P Parameter: Treatment Value: Drought vs. No Drought
  misc_feature: MA Experiment ID: 20001560 Result: Up-regulated in Transcription
  misc_feature: MA Experiment 20001560 PARAMETER Experiment Name: At_Drought_Soil_Dry_P Parameter: Age (day) Value: 28
  misc_feature: MA Experiment 20001560 PARAMETER Experiment Name: At_Drought_Soil_Dry_P Parameter: Organism Value: A. thaliana
  misc_feature: MA Experiment 20001560 PARAMETER Experiment Name: At_Drought_Soil_Dry_P Parameter: Plant Line Value: WS
  misc_feature: MA Experiment 20001560 PARAMETER Experiment Name: At_Drought_Soil_Dry_P Parameter: Post Timepoint (hr) Value: None
  misc_feature: MA Experiment 20001560 PARAMETER Experiment Name: At_Drought_Soil_Dry_P Parameter: Post-Treatment Value: None
  misc_feature: MA Experiment 20001560 PARAMETER Experiment Name: At_Drought_Soil_Dry_P Parameter: Timepoint (day) Value: 14
  misc_feature: MA Experiment 20001560 PARAMETER Experiment Name: At_Drought_Soil_Dry_P Parameter: Treatment Value: Drought vs. No Drought
ctctctgtccctctctcgtaaccaaaagccgtctcagaagaaaactcaactgcgaagaatatggcgaccgatgatgtgaacgagcctctcccggcggcggcggaattaccggcgacagaggcggagaaacaaccacacaagctcgaaagaaagtggagtttctggttcgataaccaatcaaagaaaggcgccgcctggggagcttctcttcgtaaagcctatactttcgacaccgtcgaagatttttggggattgcacgagactatatttcagactagcaaattgacagcgaatgctgaaattcacttgttcaaagctggtgttgagccaaagtgggaagatccagagtgtgctaatggaggaaagtggacttgggttgttactgctaataggaaggaagctttagacaaaggctggcttgaaactttgatggctttgattggagagcaatttgatgaagcagatgagatttgtggtgtggttgctagtgtccgtccacagtcgaagcaagacaagctctccttgtggactaggacgaagtctaatgaagctgttctgatgggtattgggaagaagtggaaggagatacttgatgtcaccgacaagataactttcaataaccatgatgattccagaagaagccggttcactgtctgaagaaacgagtgtgaagccagaggaagatgcaatatggctttttttgtgatactgtttggtcggtttactcaaatagctgagacatttagggacattcactttgaggtgtaaactctacaaagttttctgtttcattaaaatgattttttgttataaattaagttgagttatataaatctctttcg

SEQ ID NO: 35560 - protein, 198 aa, Arabidopsis thaliana
  peptide (1)..(198): Ceres Seq. ID no. 12332853
  misc_feature (1)..(198): Pfam Name: Eukaryotic initiation factor 4E Pfam Description: Eukaryotic initiation factor 4E
  misc_feature (1)..(193): Homolog of NCBI NO: 34905982 NR Description: eukaryotic translation initiation factor 4E
  misc_feature (2)..(193): Homolog of NCBI NO: 6016334 NR Description: EUKARYOTIC TRANSLATION INITIATION FACTOR 4E (EIF4E) (MRNA CAP-BINDING PROTEIN) (EIF-4F 25 KD SUBUNIT) (EIF-4F
  misc_feature (13)..(195): Homolog of NCBI NO: 547713 NR Description: EUKARYOTIC TRANSLATION INITIATION FACTOR 4E (EIF4E) (MRNA CAP-BINDING PROTEIN) (EIF-(ISO)4F 25 KD SUBUNIT)
  misc_feature (13)..(195): Homolog of NCBI NO: 170753 NR Description: initiation factor (iso)4F p28 subunit
  misc_feature (1)..(195): Homolog of NCBI NO: 6016335 NR Description: EUKARYOTIC TRANSLATION INITIATION FACTOR 4E (EIF4E) (MRNA CAP-BINDING PROTEIN) (EIF-(ISO)4F 25 KD SUBUNIT)
  misc_feature (9)..(195): Homolog of NCBI NO: 1352442 NR Description: EUKARYOTIC TRANSLATION INITIATION FACTOR 4E (EIF4E) (MRNA CAP-BINDING PROTEIN) (EIF-(ISO)4F 25 KD SUBUNIT)
  misc_feature (9)..(195): Homolog of NCBI NO: 37535224 NR Description: cap-binding protein p28 [Oryza sativa (japonica
  misc_feature (12)..(192): Homolog of NCBI NO: 32698526 NR Description: eukaryotic translation initiation factor iso4E
  misc_feature (1)..(198): Homolog of NCBI NO: 15238558 NR Description: eIF4Eiso protein (emb|CAA71579.1)
  misc_feature (1)..(198): Homolog of NCBI NO: 2209274 NR Description: eukaryotic initiation factor (iso)-4F p28 subunit
MATDDVNEPLPAAAELPATEAEKQPHKLERKWSFWFDNQSKKGAAWGASLRKAYTFDTVEDFWGLHETIFQTSKLTANAEIHLFKAGVEPKWEDPECANGGKWTWVVTANRKEALDKGWLETLMALIGEQFDEADEICGVVASVRPQSKQDKLSLWTRTKSNEAVLMGIGKKWKEILDVTDKITFNNHDDSRRSRFTV

SEQ ID NO: 35561 - DNA, 1742 bp, Arabidopsis thaliana; identical to SEQ ID NO: 24563
  misc_feature (1)..(1742): Ceres Seq. ID no. 12377355
  misc_feature: MA Experiment ID: 108461 Result: Up-regulated in Transcription
  misc_feature: MA Experiment 108461 PARAMETER Experiment Name: At_Germinating_Seeds_cDNA_P Parameter: Age (day) Value: 1 vs. 0
  misc_feature: MA Experiment 108461 PARAMETER Experiment Name: At_Germinating_Seeds_cDNA_P Parameter: Tissue Value: Germinating Seeds
  misc_feature: MA Experiment ID: 20000088 Result: Up-regulated in Transcription
  misc_feature: MA Experiment 20000088 PARAMETER Experiment Name: At_100uM_ABA_Mutants_cDNA_P Parameter: Plant Line Value: Landsberg
  misc_feature: MA Experiment 20000088 PARAMETER Experiment Name: At_100uM_ABA_Mutants_cDNA_P Parameter: Timepoint (hr) Value: 6
  misc_feature: MA Experiment 20000088 PARAMETER Experiment Name: At_100uM_ABA_Mutants_cDNA_P Parameter: Tissue Value: Aerial
  misc_feature: MA Experiment 20000088 PARAMETER Experiment Name: At_100uM_ABA_Mutants_cDNA_P Parameter: Treatment Value: 100uM ABA vs. No Treatment
  misc_feature: MA Experiment ID: 20000794 Result: Up-regulated in Transcription
  misc_feature: MA Experiment 20000794 PARAMETER Experiment Name: At_Petals_P Parameter: Age (day) Value: 23-25 days
  misc_feature: MA Experiment 20000794 PARAMETER Experiment Name: At_Petals_P Parameter: Plant Line Value: WS
  misc_feature: MA Experiment 20000794 PARAMETER Experiment Name: At_Petals_P Parameter: Tissue Value: Petals vs. Whole plant

SEQ ID NO: 35562 - protein, 503 aa, Arabidopsis thaliana; identical to SEQ ID NO: 24564
  peptide (1)..(503): Ceres Seq. ID no. 12377356
  misc_feature (1)..(500): Homolog of NCBI NO: 20135572 NR Description: betaine aldehyde dehydrogenase BADH1 [Atriplex
  misc_feature (1)..(503): Homolog of NCBI NO: 17221346 NR Description: aminoaldehyde dehydrogenase [Pisum sativum]
  misc_feature (5)..(503): Homolog of NCBI NO: 3913464 NR Description: Betaine-aldehyde dehydrogenase (BADH)
  misc_feature (1)..(503): Homolog of NCBI NO: 30698520 NR Description: betaine aldehyde dehydrogenase
  misc_feature (1)..(500): Homolog of NCBI NO: 2811031 NR Description: Betaine-aldehyde dehydrogenase, chloroplast
  misc_feature (1)..(503): Homolog of NCBI NO: 11414910 NR Description: betaine aldehyde dehydrogenase [Avicennia marina]
  misc_feature (1)..(503): Homolog of NCBI NO: 15131692 NR Description: putative aminoaldehyde dehydrogenase [Pisum
  misc_feature (1)..(500): Homolog of NCBI NO: 11251896 NR Description: betaine-aldehyde dehydrogenase (EC 1.2.1.8)
  misc_feature (1)..(501): Homolog of NCBI NO: 18410730 NR Description: betaine aldehyde dehydrogenase, putative
  misc_feature (1)..(503): Homolog of NCBI NO: 15228346 NR Description: betaine aldehyde dehydrogenase-like protein
  misc_feature (1)..(500): Homolog of NCBI NO: 20135572 NR Description: betaine aldehyde dehydrogenase BADH1 [Atriplex
  misc_feature (1)..(503): Homolog of NCBI NO: 17221346 NR Description: aminoaldehyde dehydrogenase [Pisum sativum]
  misc_feature (5)..(503): Homolog of NCBI NO: 3913464 NR Description: Betaine-aldehyde dehydrogenase (BADH)
  misc_feature (1)..(503): Homolog of NCBI NO: 30698520 NR Description: betaine aldehyde dehydrogenase
  misc_feature (1)..(500): Homolog of NCBI NO: 2811031 NR Description: Betaine-aldehyde dehydrogenase, chloroplast
  misc_feature (1)..(503): Homolog of NCBI NO: 11414910 NR Description: betaine aldehyde dehydrogenase [Avicennia marina]
  misc_feature (1)..(503): Homolog of NCBI NO: 15131692 NR Description: putative aminoaldehyde dehydrogenase [Pisum
  misc_feature (1)..(500): Homolog of NCBI NO: 11251896 NR Description: betaine-aldehyde dehydrogenase (EC 1.2.1.8)
  misc_feature (1)..(501): Homolog of NCBI NO: 18410730 NR Description: betaine aldehyde dehydrogenase, putative
  misc_feature (1)..(503): Homolog of NCBI NO: 15228346 NR Description: betaine aldehyde dehydrogenase-like protein

SEQ ID NO: 35563 - protein, 393 aa, Arabidopsis thaliana; identical to SEQ ID NO: 24565
  peptide (1)..(393): Ceres Seq. ID no. 12377357
  misc_feature (1)..(390): Homolog of NCBI NO: 20135572 NR Description: betaine aldehyde dehydrogenase BADH1 [Atriplex
  misc_feature (1)..(393): Homolog of NCBI NO: 17221346 NR Description: aminoaldehyde dehydrogenase [Pisum sativum]
  misc_feature (1)..(393): Homolog of NCBI NO: 3913464 NR Description: Betaine-aldehyde dehydrogenase (BADH)
  misc_feature (1)..(393): Homolog of NCBI NO: 30698520 NR Description: betaine aldehyde dehydrogenase
  misc_feature (1)..(390): Homolog of NCBI NO: 2811031 NR Description: Betaine-aldehyde dehydrogenase, chloroplast
  misc_feature (1)..(393): Homolog of NCBI NO: 11414910 NR Description: betaine aldehyde dehydrogenase [Avicennia marina]
  misc_feature (1)..(393): Homolog of NCBI NO: 15131692 NR Description: putative aminoaldehyde dehydrogenase [Pisum
  misc_feature (1)..(390): Homolog of NCBI NO: 11251896 NR Description: betaine-aldehyde dehydrogenase (EC 1.2.1.8)
  misc_feature (1)..(391): Homolog of NCBI NO: 18410730 NR Description: betaine aldehyde dehydrogenase, putative
  misc_feature (1)..(393): Homolog of NCBI NO: 15228346 NR Description: betaine aldehyde dehydrogenase-like protein
  misc_feature (1)..(390): Homolog of NCBI NO: 20135572 NR Description: betaine aldehyde dehydrogenase BADH1 [Atriplex
  misc_feature (1)..(393): Homolog of NCBI NO: 17221346 NR Description: aminoaldehyde dehydrogenase [Pisum sativum]
  misc_feature (1)..(393): Homolog of NCBI NO: 3913464 NR Description: Betaine-aldehyde dehydrogenase (BADH)
  misc_feature (1)..(393): Homolog of NCBI NO: 30698520 NR Description: betaine aldehyde dehydrogenase
  misc_feature (1)..(390): Homolog of NCBI NO: 2811031 NR Description: Betaine-aldehyde dehydrogenase, chloroplast
  misc_feature (1)..(393): Homolog of NCBI NO: 11414910 NR Description: betaine aldehyde dehydrogenase [Avicennia marina]
  misc_feature (1)..(393): Homolog of NCBI NO: 15131692 NR Description: putative aminoaldehyde dehydrogenase [Pisum
  misc_feature (1)..(390): Homolog of NCBI NO: 11251896 NR Description: betaine-aldehyde dehydrogenase (EC 1.2.1.8)
  misc_feature (1)..(391): Homolog of NCBI NO: 18410730 NR Description: betaine aldehyde dehydrogenase, putative
  misc_feature (1)..(393): Homolog of NCBI NO: 15228346 NR Description: betaine aldehyde dehydrogenase-like protein

SEQ ID NO: 35564 - protein, 364 aa, Arabidopsis thaliana; identical to SEQ ID NO: 24566
  peptide (1)..(364): Ceres Seq. ID no. 12377358
  misc_feature (1)..(361): Homolog of NCBI NO: 20135572 NR Description: betaine aldehyde dehydrogenase BADH1 [Atriplex
  misc_feature (1)..(364): Homolog of NCBI NO: 17221346 NR Description: aminoaldehyde dehydrogenase [Pisum sativum]
  misc_feature (1)..(364): Homolog of NCBI NO: 3913464 NR Description: Betaine-aldehyde dehydrogenase (BADH)
  misc_feature (1)..(364): Homolog of NCBI NO: 30698520 NR Description: betaine aldehyde dehydrogenase
  misc_feature (1)..(361): Homolog of NCBI NO: 2811031 NR Description: Betaine-aldehyde dehydrogenase, chloroplast
  misc_feature (1)..(364): Homolog of NCBI NO: 11414910 NR Description: betaine aldehyde dehydrogenase [Avicennia marina]
  misc_feature (1)..(364): Homolog of NCBI NO: 15131692 NR Description: putative aminoaldehyde dehydrogenase [Pisum
  misc_feature (1)..(361): Homolog of NCBI NO: 11251896 NR Description: betaine-aldehyde dehydrogenase (EC 1.2.1.8)
  misc_feature (1)..(362): Homolog of NCBI NO: 18410730 NR Description: betaine aldehyde dehydrogenase, putative
  misc_feature (1)..(364): Homolog of NCBI NO: 15228346 NR Description: betaine aldehyde dehydrogenase-like protein
  misc_feature (1)..(361): Homolog of NCBI NO: 20135572 NR Description: betaine aldehyde dehydrogenase BADH1 [Atriplex
  misc_feature (1)..(364): Homolog of NCBI NO: 17221346 NR Description: aminoaldehyde dehydrogenase [Pisum sativum]
  misc_feature (1)..(364): Homolog of NCBI NO: 3913464 NR Description: Betaine-aldehyde dehydrogenase (BADH)
  misc_feature (1)..(364): Homolog of NCBI NO: 30698520 NR Description: betaine aldehyde dehydrogenase
  misc_feature (1)..(361): Homolog of NCBI NO: 2811031 NR Description: Betaine-aldehyde dehydrogenase, chloroplast
  misc_feature (1)..(364): Homolog of NCBI NO: 11414910 NR Description: betaine aldehyde dehydrogenase [Avicennia marina]
  misc_feature (1)..(364): Homolog of NCBI NO: 15131692 NR Description: putative aminoaldehyde dehydrogenase [Pisum
  misc_feature (1)..(361): Homolog of NCBI NO: 11251896 NR Description: betaine-aldehyde dehydrogenase (EC 1.2.1.8)
  misc_feature (1)..(362): Homolog of NCBI NO: 18410730 NR Description: betaine aldehyde dehydrogenase, putative
  misc_feature (1)..(364): Homolog of NCBI NO: 15228346 NR Description: betaine aldehyde dehydrogenase-like protein

SEQ ID NO: 35565 - DNA, 1188 bp, Arabidopsis thaliana
  misc_feature (1)..(1188): Ceres Seq. ID no. 12324550
  misc_feature: MA Experiment ID: 20000086 Result: Up-regulated in Transcription
  misc_feature: MA Experiment 20000086 PARAMETER Experiment Name: At_100uM_ABA_Mutants_cDNA_P Parameter: Plant Line Value: CS22
  misc_feature: MA Experiment 20000086 PARAMETER Experiment Name: At_100uM_ABA_Mutants_cDNA_P Parameter: Timepoint (hr) Value: 6
  misc_feature: MA Experiment 20000086 PARAMETER Experiment Name: At_100uM_ABA_Mutants_cDNA_P Parameter: Tissue Value: Aerial
  misc_feature: MA Experiment 20000086 PARAMETER Experiment Name: At_100uM_ABA_Mutants_cDNA_P Parameter: Treatment Value: 100uM ABA vs. No Treatment
  misc_feature: MA Experiment ID: 20001451 Result: Up-regulated in Transcription
  misc_feature: MA Experiment 20001451 PARAMETER Experiment Name: At_Far-red-induction_P Parameter: Age (day) Value: 7
  misc_feature: MA Experiment 20001451 PARAMETER Experiment Name: At_Far-red-induction_P Parameter: Light Value: Far-red vs. White
  misc_feature: MA Experiment 20001451 PARAMETER Experiment Name: At_Far-red-induction_P Parameter: Organism Value: A. thaliana
  misc_feature: MA Experiment 20001451 PARAMETER Experiment Name: At_Far-red-induction_P Parameter: Plant Line Value: Columbia
  misc_feature: MA Experiment 20001451 PARAMETER Experiment Name: At_Far-red-induction_P Parameter: Timepoint (hr) Value: 24
  misc_feature: MA Experiment 20001451 PARAMETER Experiment Name: At_Far-red-induction_P Parameter: Tissue Value: Whole Plant
aatctagaacaagaaaccaaaacatacaccacttctgtttttaaaggtaaaaaagatcaagaagaaaccaaagaaaatcagacagcaacaagaaaagatcagtttttaagagaaggaaagtaggaaacgggtcagattgttggatagagagaggaagcgaaaaaagagtcgcagtgttctttttccactgcgtggttttggtataatcagctgtggctacaacgaggaggcataatctaccgacgtcggattccggtgcgttcaccgactgggcggccacgacgacgacaccttcccgtgccaccgaggatctctctcttggtttcaatgctggttcctccgtcatccacggtggtttaggctcagcttcagtcgccgccggcgttccatcatggcctccgggatcttctgtccgttacggcctaccttcttcggcggcggcgacggagatgggcatggttggtctaagagatgttttccttgttgctccggcttatcaccaccagaacgccggagtgatatctggatccgatcatatgaacagtaatgcagctgcggcggcggcgctcgctgtcggagtgattcctctactcacggcgggtccaccgcagcaaaacgtggaagactccgacattaacttcctcggaaacaaccggagatggcagaataacaacaacaaccacgaaacgcagtatcttcacttcaagagtactaaccagacaacggtcggaacgagctcgaacaactcggggtctggctcaggcgcatcaggaaccgccacgtgtcaagactgtggaaatcaggcgaagaaagaatgtaagcagaggcggtgtaggacttgctgcaagagccgtggctttgattgttctactcacgtgaagagcacgtgggtctctgctgctcggcggagagagaggcaggtcatgcctaccggcgctaatccaacggctggctcgtctctttcgacctcctccgggacgaagaagccgaggatcgtagggtctcaacaacaacaacaacaacaacaacaacaacaagccacttctcatacttcaacttctaacacaccacctcaaagtttcgagaccagctccagccgacaaggtagttttacattttcattagtatacatagctacatgattttatgtatgtatatacatgcatataacactattagcccttcttg

SEQ ID NO: 35566 - protein, 230 aa, Arabidopsis thaliana
  peptide (1)..(230): Ceres Seq. ID no. 12324551
  misc_feature (103)..(218): Pfam Name: Domain of unknown function (DUF702) Pfam Description: Domain of unknown function (DUF702)
  misc_feature (51)..(169): Homolog of NCBI NO: 15224110 NR Description: unknown protein; protein id: At2g18120.1
  misc_feature (73)..(178): Homolog of NCBI NO: 15222285 NR Description: unknown protein; protein id: At1g75520.1
  misc_feature (100)..(157): Homolog of NCBI NO: 15242760 NR Description: putative protein; protein id: At5g33210.1
  misc_feature (104)..(181): Homolog of NCBI NO: 15234365 NR Description: putative protein; protein id: At4g36260.1
  misc_feature (100)..(157): Homolog of NCBI NO: 15230389 NR Description: putative protein; protein id: At3g51060.1
  misc_feature (73)..(157): Homolog of NCBI NO: 15223669 NR Description: hypothetical protein; protein id: At1g19790.1
  misc_feature (102)..(216): Homolog of NCBI NO: 15239350 NR Description: zinc finger protein SHI-like
  misc_feature (1)..(225): Homolog of NCBI NO: 34906658 NR Description: putative LRP(lateral root primordia) 1
  misc_feature (1)..(218): Homolog of NCBI NO: 18416839 NR Description: lateral root primordia (LRP1); protein id:
  misc_feature (1)..(218): Homolog of NCBI NO: 882341 NR Description: LRP1
MGMVGLRDVFLVAPAYHHQNAGVISGSDHMNSNAAAAAALAVGVIPLLTAGPPQQNVEDSDINFLGNNRRWQNNNNNHETQYLHFKSTNQTTVGTSSNNSGSGSGASGTATCQDCGNQAKKECKQRRCRTCCKSRGFDCSTHVKSTWVSAARRRERQVMPTGANPTAGSSLSTSSGTKKPRIVGSQQQQQQQQQQQATSHTSTSNTPPQSFETSSSRQGSFTFSLVYIAT

SEQ ID NO: 35567 - protein, 228 aa, Arabidopsis thaliana
  peptide (1)..(228): Ceres Seq. ID no. 12324552
  misc_feature (101)..(216): Pfam Name: Domain of unknown function (DUF702) Pfam Description: Domain of unknown function (DUF702)
  misc_feature (49)..(167): Homolog of NCBI NO: 15224110 NR Description: unknown protein; protein id: At2g18120.1
  misc_feature (71)..(176): Homolog of NCBI NO: 15222285 NR Description: unknown protein; protein id: At1g75520.1
  misc_feature (98)..(155): Homolog of NCBI NO: 15242760 NR Description: putative protein; protein id: At5g33210.1
  misc_feature (102)..(179): Homolog of NCBI NO: 15234365 NR Description: putative protein; protein id: At4g36260.1
  misc_feature (98)..(155): Homolog of NCBI NO: 15230389 NR Description: putative protein; protein id: At3g51060.1
  misc_feature (71)..(155): Homolog of NCBI NO: 15223669 NR Description: hypothetical protein; protein id: At1g19790.1
  misc_feature (100)..(214): Homolog of NCBI NO: 15239350 NR Description: zinc finger protein SHI-like
  misc_feature (1)..(223): Homolog of NCBI NO: 34906658 NR Description: putative LRP(lateral root primordia) 1
  misc_feature (1)..(216): Homolog of NCBI NO: 18416839 NR Description: lateral root primordia (LRP1); protein id:
  misc_feature (1)..(216): Homolog of NCBI NO: 882341 NR Description: LRP1
MVGLRDVFLVAPAYHHQNAGVISGSDHMNSNAAAAAALAVGVIPLLTAGPPQQNVEDSDINFLGNNRRWQNNNNNHETQYLHFKSTNQTTVGTSSNNSGSGSGASGTATCQDCGNQAKKECKQRRCRTCCKSRGFDCSTHVKSTWVSAARRRERQVMPTGANPTAGSSLSTSSGTKKPRIVGSQQQQQQQQQQQATSHTSTSNTPPQSFETSSSRQGSFTFSLVYIAT

SEQ ID NO: 35568 - protein, 201 aa, Arabidopsis thaliana
  peptide (1)..(201): Ceres Seq. ID no. 12324553
  misc_feature (74)..(189): Pfam Name: Domain of unknown function (DUF702) Pfam Description: Domain of unknown function (DUF702)
  misc_feature (22)..(140): Homolog of NCBI NO: 15224110 NR Description: unknown protein; protein id: At2g18120.1
  misc_feature (44)..(149): Homolog of NCBI NO: 15222285 NR Description: unknown protein; protein id: At1g75520.1
  misc_feature (71)..(128): Homolog of NCBI NO: 15242760 NR Description: putative protein; protein id: At5g33210.1
  misc_feature (75)..(152): Homolog of NCBI NO: 15234365 NR Description: putative protein; protein id: At4g36260.1
  misc_feature (71)..(128): Homolog of NCBI NO: 15230389 NR Description: putative protein; protein id: At3g51060.1
  misc_feature (44)..(128): Homolog of NCBI NO: 15223669 NR Description: hypothetical protein; protein id: At1g19790.1
  misc_feature (73)..(187): Homolog of NCBI NO: 15239350 NR Description: zinc finger protein SHI-like
  misc_feature (1)..(196): Homolog of NCBI NO: 34906658 NR Description: putative LRP(lateral root primordia) 1
  misc_feature (1)..(189): Homolog of NCBI NO: 18416839 NR Description: lateral root primordia (LRP1); protein id:
  misc_feature (1)..(189): Homolog of NCBI NO: 882341 NR Description: LRP1
MNSNAAAAAALAVGVIPLLTAGPPQQNVEDSDINFLGNNRRWQNNNNNHETQYLHFKSTNQTTVGTSSNNSGSGSGASGTATCQDCGNQAKKECKQRRCRTCCKSRGFDCSTHVKSTWVSAARRRERQVMPTGANPTAGSSLSTSSGTKKPRIVGSQQQQQQQQQQQATSHTSTSNTPPQSFETSSSRQGSFTFSLVYIAT

SEQ ID NO: 35569 - DNA, 1162 bp, Arabidopsis thaliana
  misc_feature (1)..(1162): Ceres Seq. ID no. 12350405
  misc_feature: MA Experiment ID: 108573 Result: Up-regulated in Transcription
  misc_feature: MA Experiment 108573 PARAMETER Experiment Name: At_Drought_cDNA_P Parameter: Timepoint (hr) Value: 6
  misc_feature: MA Experiment 108573 PARAMETER Experiment Name: At_Drought_cDNA_P Parameter: Tissue Value: Aerial
  misc_feature: MA Experiment 108573 PARAMETER Experiment Name: At_Drought_cDNA_P Parameter: Treatment Value: Drought vs. No Drought
  misc_feature: MA Experiment ID: 108595 Result: Down-regulated in Transcription
  misc_feature: MA Experiment 108595 PARAMETER Experiment Name: At_Ler-pi_Ovule_cDNA_P Parameter: Plant Line Value: null
  misc_feature: MA Experiment ID: 20000224 Result: Down-regulated in Transcription
gtagcagatctgagttttggagagttcaaaggaagaagataactccaataccagaggttcgtaacgattgaaagcattcaggaaacatgcctcctcagaagattgaaactggtcatagcgacactattcatgatgtggtcatggattactatggaaagcgagtagcaactgcctcgtctgactgcacgatcaagataaccggagtaagcaacagcggtggatctcagcatctagctaccttaaccggtcatcgaggtcctgtctggcaagtcgcttgggcgcacccaaagtttggttcacttctcgcttcatgttcctatgatgggcaaattatattatggaaagaaggtaaccaaaaccaatggacacaagctcatgtcttcacagaccacaaagtatctgtcaactctatcgcttgggctcctcatgaacttggactctccttagcttgcggagcatctgatggaaacatatcagttttctcggctcgagctgatggcggttgggacacgacaaagatagaccaagcacaccctgttggtgtcacttcagtgtcgtgggcaccggccacagaaccaggcgcactcgttagctctggtatgatcgatccggtctacaaactagcatccggcgggtgtgatagcacggtgaaagtgtggaagttctcgaacgggtcatggaaaatggattgtttcccggctctcaacaagcacacggattgggtccgtgatgtggcttgggcaccgaacttgggtctcccaaagtcaaccatagccagtggttcagaagatgggaaagtgatcatatggaccatagggaaagaaggtgagcaatgggaaggtactgttttgaaagatttcaaaacaccagtgtggcgggtctcgtggtcgttgaccggtaatttgttggctgtttccgatgggaacaataacgttacagtgtggaaagagtctgttgatggagagtgggaacaagtgactgttgttgagccatagattgttgtttgtttgtttggttatcttttgttttgtggtaatatcaaaatgtggtgtgttctgtatacaatttctagggacctgtttctctctatacgtttctcaggaaagtatattcttatgtattttaatcagacaacagagattgcaaaagaaatgtatttttc

SEQ ID NO: 35570 - protein, 302 aa, Arabidopsis thaliana
  peptide (1)..(302): Ceres Seq. ID no. 12350406
  misc_feature (6)..(300): Homolog of NCBI NO: 27696242 NR Description: Similar to RIKEN cDNA 1110003H02 gene [Xenopus
  misc_feature (6)..(300): Homolog of NCBI NO: 38174439 NR Description: Unknown (protein for MGC:76017) [Silurana
  misc_feature (6)..(300): Homolog of NCBI NO: 32451650 NR Description: Unknown (protein for MGC:63980) [Danio rerio]
  misc_feature (1)..(302): Homolog of NCBI NO: 34897242 NR Description: putative coat protein complex II (COPII)
  misc_feature (1)..(302): Homolog of NCBI NO: 34393220 NR Description: putative Sec13p [Oryza sativa (japonica
  misc_feature (1)..(301): Homolog of NCBI NO: 18147582 NR Description: Sec13p [Oryza sativa]
  misc_feature (1)..(302): Homolog of NCBI NO: 21593146 NR Description: putative protein transport protein SEC13
  misc_feature (1)..(302): Homolog of NCBI NO: 15227692 NR Description: G-protein beta family
  misc_feature (1)..(302): Homolog of NCBI NO: 21593236 NR Description: transport protein SEC13, putative [Arabidopsis
  misc_feature (1)..(302): Homolog of NCBI NO: 15232095 NR Description: transport protein SEC13, putative
MPPQKIETGHSDTIHDVVMDYYGKRVATASSDCTIKITGVSNSGGSQHLATLTGHRGPVWQVAWAHPKFGSLLASCSYDGQIILWKEGNQNQWTQAHVFTDHKVSVNSIAWAPHELGLSLACGASDGNISVFSARADGGWDTTKIDQAHPVGVTSVSWAPATEPGALVSSGMIDPVYKLASGGCDSTVKVWKFSNGSWKMDCFPALNKHTDWVRDVAWAPNLGLPKSTIASGSEDGKVIIWTIGKEGEQWEGTVLKDFKTPVWRVSWSLTGNLLAVSDGNNNVTVWKESVDGEWEQVTVVEP

SEQ ID NO: 35571 - protein, 284 aa, Arabidopsis thaliana
  peptide (1)..(284): Ceres Seq. ID no. 12350407
  misc_feature (1)..(282): Homolog of NCBI NO: 27696242 NR Description: Similar to RIKEN cDNA 1110003H02 gene [Xenopus
  misc_feature (1)..(282): Homolog of NCBI NO: 38174439 NR Description: Unknown (protein for MGC:76017) [Silurana
  misc_feature (1)..(282): Homolog of NCBI NO: 32451650 NR Description: Unknown (protein for MGC:63980) [Danio rerio]
  misc_feature (1)..(284): Homolog of NCBI NO: 34897242 NR Description: putative coat protein complex II (COPII)
  misc_feature (1)..(284): Homolog of NCBI NO: 34393220 NR Description: putative Sec13p [Oryza sativa (japonica
  misc_feature (1)..(283): Homolog of NCBI NO: 18147582 NR Description: Sec13p [Oryza sativa]
  misc_feature (1)..(284): Homolog of NCBI NO: 21593146 NR Description: putative protein transport protein SEC13
  misc_feature (1)..(284): Homolog of NCBI NO: 15227692 NR Description: G-protein beta family
  misc_feature (1)..(284): Homolog of NCBI NO: 21593236 NR Description: transport protein SEC13, putative [Arabidopsis
  misc_feature (1)..(284): Homolog of NCBI NO: 15232095 NR Description: transport protein SEC13, putative
MDYYGKRVATASSDCTIKITGVSNSGGSQHLATLTGHRGPVWQVAWAHPKFGSLLASCSYDGQIILWKEGNQNQWTQAHVFTDHKVSVNSIAWAPHELGLSLACGASDGNISVFSARADGGWDTTKIDQAHPVGVTSVSWAPATEPGALVSSGMIDPVYKLASGGCDSTVKVWKFSNGSWKMDCFPALNKHTDWVRDVAWAPNLGLPKSTIASGSEDGKVIIWTIGKEGEQWEGTVLKDFKTPVWRVSWSLTGNLLAVSDGNNNVTVWKESVDGEWEQVTVVEP

SEQ ID NO: 35572 - DNA, 1318 bp, Arabidopsis thaliana
  misc_feature (1)..(1318): Ceres Seq. ID no. 12334532
  misc_feature: MA Experiment ID: 108488 Result: Down-regulated in Transcription
  misc_feature: MA Experiment ID: 108489 Result: Up-regulated in Transcription
  misc_feature: MA Experiment ID: 108573 Result: Up-regulated in Transcription
  misc_feature: MA Experiment 108573 PARAMETER Experiment Name: At_Drought_cDNA_P Parameter: Timepoint (hr) Value: 6
  misc_feature: MA Experiment 108573 PARAMETER Experiment Name: At_Drought_cDNA_P Parameter: Tissue Value: Aerial
  misc_feature: MA Experiment 108573 PARAMETER Experiment Name: At_Drought_cDNA_P Parameter: Treatment Value: Drought vs. No Drought
  misc_feature: MA Experiment ID: 108574 Result: Up-regulated in Transcription
  misc_feature: MA Experiment 108574 PARAMETER Experiment Name: At_Wounding__cDNA_P Parameter: Timepoint (hr) Value: 1
  misc_feature: MA Experiment 108574 PARAMETER Experiment Name: At_Wounding__cDNA_P Parameter: Tissue Value: Aerial
  misc_feature: MA Experiment 108574 PARAMETER Experiment Name: At_Wounding__cDNA_P Parameter: Treatment Value: Wounding vs. No Wounding
  misc_feature: MA Experiment ID: 108577 Result: Up-regulated in Transcription
  misc_feature: MA Experiment 108577 PARAMETER Experiment Name: At_42deg_Heat_cDNA_P Parameter: Temperature (deg C) Value: 42 vs. 22
  misc_feature: MA Experiment 108577 PARAMETER Experiment Name: At_42deg_Heat_cDNA_P Parameter: Timepoint (hr) Value: 6
  misc_feature: MA Experiment 108577 PARAMETER Experiment Name: At_42deg_Heat_cDNA_P Parameter: Tissue Value: Aerial
  misc_feature: MA Experiment ID: 108579 Result: Up-regulated in Transcription
  misc_feature: MA Experiment 108579 PARAMETER Experiment Name: At_4deg_Cold_cDNA_P Parameter: Temperature (deg C) Value: 4 vs. 22
  misc_feature: MA Experiment 108579 PARAMETER Experiment Name: At_4deg_Cold_cDNA_P Parameter: Timepoint (hr) Value: 6
  misc_feature: MA Experiment 108579 PARAMETER Experiment Name: At_4deg_Cold_cDNA_P Parameter: Tissue Value: Aerial
  misc_feature: MA Experiment ID: 108595 Result: Up-regulated in Transcription
  misc_feature: MA Experiment 108595 PARAMETER Experiment Name: At_Ler-pi_Ovule_cDNA_P Parameter: Plant Line Value: null
  misc_feature: MA Experiment ID: 20000087 Result: Up-regulated in Transcription
  misc_feature: MA Experiment 20000087 PARAMETER Experiment Name: At_100uM_ABA_Mutants_cDNA_P Parameter: Plant Line Value: WS
  misc_feature: MA Experiment 20000087 PARAMETER Experiment Name: At_100uM_ABA_Mutants_cDNA_P Parameter: Timepoint (hr) Value: 6
  misc_feature: MA Experiment 20000087 PARAMETER Experiment Name: At_100uM_ABA_Mutants_cDNA_P Parameter: Tissue Value: Aerial
  misc_feature: MA Experiment 20000087 PARAMETER Experiment Name: At_100uM_ABA_Mutants_cDNA_P Parameter: Treatment Value: 100uM ABA vs. No Treatment
  misc_feature: MA Experiment ID: 20000111 Result: Up-regulated in Transcription
  misc_feature: MA Experiment 20000111 PARAMETER Experiment Name: At_42deg_Heat_cDNA_P Parameter: Temperature (deg C) Value: 42 vs. 22
  misc_feature: MA Experiment 20000111 PARAMETER Experiment Name: At_42deg_Heat_cDNA_P Parameter: Timepoint (hr) Value: 6
  misc_feature: MA Experiment 20000111 PARAMETER Experiment Name: At_42deg_Heat_cDNA_P Parameter: Tissue Value: Aerial
  misc_feature: MA Experiment ID: 20000112 Result: Up-regulated in Transcription
  misc_feature: MA Experiment 20000112 PARAMETER Experiment Name: At_42deg_Heat_cDNA_P Parameter: Temperature (deg C) Value: 42 vs. 22
  misc_feature: MA Experiment 20000112 PARAMETER Experiment Name: At_42deg_Heat_cDNA_P Parameter: Timepoint (hr) Value: 2
  misc_feature: MA Experiment 20000112 PARAMETER Experiment Name: At_42deg_Heat_cDNA_P Parameter: Tissue Value: Aerial
  misc_feature: MA Experiment ID: 20000113 Result: Up-regulated in Transcription
  misc_feature: MA Experiment 20000113 PARAMETER Experiment Name: At_42deg_Heat_cDNA_P Parameter: Temperature (deg C) Value: 42 vs. 22
  misc_feature: MA Experiment 20000113 PARAMETER Experiment Name: At_42deg_Heat_cDNA_P Parameter: Timepoint (hr) Value: 8
  misc_feature: MA Experiment 20000113 PARAMETER Experiment Name: At_42deg_Heat_cDNA_P Parameter: Tissue Value: Aerial
  misc_feature: MA Experiment ID: 20000144 Result: Up-regulated in Transcription
  misc_feature: MA Experiment 20000144 PARAMETER Experiment Name: At_42deg_Heat_cDNA_P Parameter: Temperature (deg C) Value: 42 vs. 22
  misc_feature: MA Experiment 20000144 PARAMETER Experiment Name: At_42deg_Heat_cDNA_P Parameter: Timepoint (hr) Value: 1
  misc_feature: MA Experiment 20000144 PARAMETER Experiment Name: At_42deg_Heat_cDNA_P Parameter: Tissue Value: Aerial
  misc_feature: MA Experiment ID: 20000171 Result: Up-regulated in Transcription
  misc_feature: MA Experiment 20000171 PARAMETER Experiment Name: At_42deg_Heat_P Parameter: Age (day) Value: 14
  misc_feature: MA Experiment 20000171 PARAMETER Experiment Name: At_42deg_Heat_P Parameter: Organism Value: A. thaliana
  misc_feature: MA Experiment 20000171 PARAMETER Experiment Name: At_42deg_Heat_P Parameter: Plant Line Value: WS
  misc_feature: MA Experiment 20000171 PARAMETER Experiment Name: At_42deg_Heat_P Parameter: Temperature (deg C) Value: 42 vs. 22
  misc_feature: MA Experiment 20000171 PARAMETER Experiment Name: At_42deg_Heat_P Parameter: Timepoint (hr) Value: 1
  misc_feature: MA Experiment 20000171 PARAMETER Experiment Name: At_42deg_Heat_P Parameter: Tissue Value: Aerial
  misc_feature: MA Experiment ID: 20000173 Result: Up-regulated in Transcription
  misc_feature: MA Experiment 20000173 PARAMETER Experiment Name: At_42deg_Heat_P Parameter: Age (day) Value: 14
  misc_feature: MA Experiment 20000173 PARAMETER Experiment Name: At_42deg_Heat_P Parameter: Organism Value: A. thaliana
  misc_feature: MA Experiment 20000173 PARAMETER Experiment Name: At_42deg_Heat_P Parameter: Plant Line Value: WS
  misc_feature: MA Experiment 20000173 PARAMETER Experiment Name: At_42deg_Heat_P Parameter: Temperature (deg C) Value: 42 vs. 22
  misc_feature: MA Experiment 20000173 PARAMETER Experiment Name: At_42deg_Heat_P Parameter: Timepoint (hr) Value: 6
  misc_feature: MA Experiment 20000173 PARAMETER Experiment Name: At_42deg_Heat_P Parameter: Tissue Value: Aerial
  misc_feature: MA Experiment ID: 20000180 Result: Down-regulated in Transcription
  misc_feature: MA Experiment 20000180 PARAMETER Experiment Name: At_Germinating_Seeds_P Parameter: Age (hr) Value: 24 vs. 0
  misc_feature: MA Experiment 20000180 PARAMETER Experiment Name: At_Germinating_Seeds_P Parameter: Tissue Value: Germinating Seeds
  misc_feature: MA Experiment ID: 20000182 Result: Up-regulated in Transcription
  misc_feature: MA Experiment 20000182 PARAMETER Experiment Name: At_2mM_SA_P Parameter: Age (day) Value: 14
  misc_feature: MA Experiment 20000182 PARAMETER Experiment Name: At_2mM_SA_P Parameter: Organism Value: A. thaliana
  misc_feature: MA Experiment 20000182 PARAMETER Experiment Name: At_2mM_SA_P Parameter: Plant Line Value: WS
  misc_feature: MA Experiment 20000182 PARAMETER Experiment Name: At_2mM_SA_P Parameter: Timepoint (hr) Value: 6
  misc_feature: MA Experiment 20000182 PARAMETER Experiment Name: At_2mM_SA_P Parameter: Tissue Value: Aerial
  misc_feature: MA Experiment 20000182 PARAMETER Experiment Name: At_2mM_SA_P Parameter: Treatment Value: 2mM SA vs. No Treatment
  misc_feature: MA Experiment ID: 20000184 Result: Down-regulated in Transcription
  misc_feature: MA Experiment 20000184 PARAMETER Experiment Name: At_Shoots__P Parameter: Age (day) Value: 7
  misc_feature: MA Experiment 20000184 PARAMETER Experiment Name: At_Shoots__P Parameter: Tissue Value: Shoots vs. Whole Plant
  misc_feature: MA Experiment ID: 20000185 Result: Down-regulated in Transcription
  misc_feature: MA Experiment 20000185 PARAMETER Experiment Name: At_Roots__P Parameter: Age (day) Value: 7 vs. 21
  misc_feature: MA Experiment 20000185 PARAMETER Experiment Name: At_Roots__P Parameter: Organism Value: A. thaliana
  misc_feature: MA Experiment 20000185 PARAMETER Experiment Name: At_Roots__P Parameter: Tissue Value: Roots vs. Whole Plant
  misc_feature: MA Experiment ID: 20000234 Result: Down-regulated in Transcription
  misc_feature: MA Experiment 20000234 PARAMETER Experiment Name: At_Siliques_P Parameter: Age (day) Value: 21
  misc_feature: MA Experiment 20000234 PARAMETER Experiment Name: At_Siliques_P Parameter: Organism Value: A. thaliana
  misc_feature: MA Experiment 20000234 PARAMETER Experiment Name: At_Siliques_P Parameter: Plant Line Value: WS
  misc_feature: MA Experiment 20000234 PARAMETER Experiment Name: At_Siliques_P Parameter: Tissue Value: Less Than 5mm Siliques vs. Whole Plant
  misc_feature: MA Experiment ID: 20000235 Result: Down-regulated in Transcription
  misc_feature: MA Experiment 20000235 PARAMETER Experiment Name: At_Siliques_P Parameter: Age (day) Value: 21
  misc_feature: MA Experiment 20000235 PARAMETER Experiment Name: At_Siliques_P Parameter: Organism Value: A. thaliana
  misc_feature: MA Experiment 20000235 PARAMETER Experiment Name: At_Siliques_P Parameter: Plant Line Value: WS
  misc_feature: MA Experiment 20000235 PARAMETER Experiment Name: At_Siliques_P Parameter: Tissue Value: 5-10mm Siliques vs. Whole Plant
  misc_feature: MA Experiment ID: 20000264 Result: Down-regulated in Transcription
  misc_feature: MA Experiment 20000264 PARAMETER Experiment Name: At_Open_Flower_P Parameter: Age (day) Value: 21
  misc_feature: MA Experiment 20000264 PARAMETER Experiment Name: At_Open_Flower_P Parameter: Plant Line Value: WS
  misc_feature: MA Experiment 20000264 PARAMETER Experiment Name: At_Open_Flower_P Parameter: Tissue Value: Open Flower vs. Whole Plant
  misc_feature: MA Experiment ID: 20000265 Result: Down-regulated in Transcription
  misc_feature: MA Experiment 20000265 PARAMETER Experiment Name: At_Open_Flower_P Parameter: Age (day) Value: 21
  misc_feature: MA Experiment 20000265 PARAMETER Experiment Name: At_Open_Flower_P Parameter: Plant Line Value: WS
  misc_feature: MA Experiment 20000265 PARAMETER Experiment Name: At_Open_Flower_P Parameter: Tissue Value: Closed Flower vs. Whole Plant
  misc_feature: MA Experiment ID: 20000267 Result: Up-regulated in Transcription
  misc_feature: MA Experiment 20000267 PARAMETER Experiment Name: At_Drought_P Parameter: Age (day) Value: 7
  misc_feature: MA Experiment 20000267 PARAMETER Experiment Name: At_Drought_P Parameter: Organism Value: A. thaliana
  misc_feature: MA Experiment 20000267 PARAMETER Experiment Name: At_Drought_P Parameter: Plant Line Value: WS
  misc_feature: MA Experiment 20000267 PARAMETER Experiment Name: At_Drought_P Parameter: Timepoint (hr) Value: 6
  misc_feature: MA Experiment 20000267 PARAMETER Experiment Name: At_Drought_P Parameter: Tissue Value: Whole Plant
  misc_feature: MA Experiment 20000267 PARAMETER Experiment Name: At_Drought_P Parameter: Treatment Value: Drought vs. No Drought
  misc_feature: MA Experiment ID: 20000286 Result: Down-regulated in Transcription
  misc_feature: MA Experiment 20000286 PARAMETER Experiment Name: At_Open_Flower_P Parameter: Age (day) Value: 21
  misc_feature: MA Experiment 20000286 PARAMETER Experiment Name: At_Open_Flower_P Parameter: Plant Line Value: WS
  misc_feature: MA Experiment 20000286 PARAMETER Experiment Name: At_Open_Flower_P Parameter: Tissue Value: Half Open vs. Whole Plant
  misc_feature: MA Experiment ID: 20000436 Result: Up-regulated in Transcription
  misc_feature: MA Experiment 20000436 PARAMETER Experiment Name: At_Drought_P Parameter: Age (day) Value: 7
  misc_feature: MA Experiment 20000436 PARAMETER Experiment Name: At_Drought_P Parameter: Organism Value: A. thaliana
  misc_feature: MA Experiment 20000436 PARAMETER Experiment Name: At_Drought_P Parameter: Plant Line Value: WS
  misc_feature: MA Experiment 20000436 PARAMETER Experiment Name: At_Drought_P Parameter: Timepoint (hr) Value: 12
  misc_feature: MA Experiment 20000436 PARAMETER Experiment Name: At_Drought_P Parameter: Tissue Value: Whole Plant
  misc_feature: MA Experiment 20000436 PARAMETER Experiment Name: At_Drought_P Parameter: Treatment Value: Drought vs. No Drought
  misc_feature: MA Experiment ID: 20000437 Result: Up-regulated in Transcription
  misc_feature: MA Experiment 20000437 PARAMETER Experiment Name: At_Drought_P Parameter: Age (day) Value: 8
  misc_feature: MA Experiment 20000437 PARAMETER Experiment Name: At_Drought_P Parameter: Organism Value: A. thaliana
  misc_feature: MA Experiment 20000437 PARAMETER Experiment Name: At_Drought_P Parameter: Plant Line Value: WS
  misc_feature: MA Experiment 20000437 PARAMETER Experiment Name: At_Drought_P Parameter: Timepoint (hr) Value: 24
  misc_feature: MA Experiment 20000437 PARAMETER Experiment Name: At_Drought_P Parameter: Tissue Value: Whole Plant
  misc_feature: MA Experiment 20000437 PARAMETER Experiment Name: At_Drought_P Parameter: Treatment Value: Drought vs. No Drought
  misc_feature: MA Experiment ID: 20000438 Result: Down-regulated in Transcription
  misc_feature: MA Experiment 20000438 PARAMETER Experiment Name: At_Shoots__P Parameter: Age (day) Value: 14
  misc_feature: MA Experiment 20000438 PARAMETER Experiment Name: At_Shoots__P Parameter: Tissue Value: Shoots vs. Whole Plant
  misc_feature: MA Experiment ID: 20000439 Result: Down-regulated in Transcription
  misc_feature: MA Experiment 20000439 PARAMETER Experiment Name: At_Roots__P Parameter: Age (day) Value: 14 vs. 21
  misc_feature: MA Experiment 20000439 PARAMETER Experiment Name: At_Roots__P Parameter: Organism Value: A. thaliana
  misc_feature: MA Experiment 20000439 PARAMETER Experiment Name: At_Roots__P Parameter: Tissue Value: Roots vs. Whole Plant
  misc_feature: MA Experiment ID: 20000460 Result: Up-regulated in Transcription
  misc_feature: MA Experiment 20000460 PARAMETER Experiment Name: At_10percent_PEG_P Parameter: Age (day) Value: 12
  misc_feature: MA Experiment 20000460 PARAMETER Experiment Name: At_10percent_PEG_P Parameter: Organism Value: A. thaliana
  misc_feature: MA Experiment 20000460 PARAMETER Experiment Name: At_10percent_PEG_P Parameter: Plant Line Value: WS
  misc_feature: MA Experiment 20000460 PARAMETER Experiment Name: At_10percent_PEG_P Parameter: Timepoint (day) Value: 12
  misc_feature: MA Experiment 20000460 PARAMETER Experiment Name: At_10percent_PEG_P Parameter: Tissue Value: Whole Plant
  misc_feature: MA Experiment 20000460 PARAMETER Experiment Name: At_10percent_PEG_P Parameter: Treatment Value: 10percent PEG vs. No Treatment
  misc_feature: MA Experiment ID: 20000495 Result: Down-regulated in Transcription
  misc_feature: MA Experiment 20000495 PARAMETER Experiment Name: At_Guard_Cells_P Parameter: Harvest Date Value: 8/2/2002
  misc_feature: MA Experiment 20000495 PARAMETER Experiment Name: At_Guard_Cells_P Parameter: Organism Value: A. thaliana
  misc_feature: MA Experiment 20000495 PARAMETER Experiment Name: At_Guard_Cells_P Parameter: Tissue Value: Guard Cells vs. Leaves
  misc_feature: MA Experiment ID: 20000709 Result: Up-regulated in Transcription
  misc_feature: MA Experiment 20000709 PARAMETER Experiment Name: At_15mM_NH4NO3_L-to-H_P Parameter: Age (hr) Value: 14
  misc_feature: MA Experiment 20000709 PARAMETER Experiment Name: At_15mM_NH4NO3_L-to-H_P Parameter: Organism Value: A. thaliana
  misc_feature: MA Experiment 20000709 PARAMETER Experiment Name: At_15mM_NH4NO3_L-to-H_P Parameter: Plant Line Value: WS
  misc_feature: MA Experiment 20000709 PARAMETER Experiment Name: At_15mM_NH4NO3_L-to-H_P Parameter: Timepoint (hr) Value: 4
  misc_feature: MA Experiment 20000709 PARAMETER Experiment Name: At_15mM_NH4NO3_L-to-H_P Parameter: Tissue Value: Aerial
  misc_feature: MA Experiment 20000709 PARAMETER Experiment Name: At_15mM_NH4NO3_L-to-H_P Parameter: Treatment Value: 15mM NH4NO3 vs. 30mM Mannitol
  misc_feature: MA Experiment ID: 20001557 Result: Up-regulated in Transcription
  misc_feature: MA Experiment 20001557 PARAMETER Experiment Name: At_Drought_Soil_Dry_P Parameter: Age (day) Value: 27
  misc_feature: MA Experiment 20001557 PARAMETER Experiment Name: At_Drought_Soil_Dry_P Parameter: Organism Value: A. thaliana
  misc_feature: MA Experiment 20001557 PARAMETER Experiment Name: At_Drought_Soil_Dry_P Parameter: Plant Line Value: WS
  misc_feature: MA Experiment 20001557 PARAMETER Experiment Name: At_Drought_Soil_Dry_P Parameter: Post Timepoint (hr) Value: 3
  misc_feature: MA Experiment 20001557 PARAMETER Experiment Name: At_Drought_Soil_Dry_P Parameter: Post-Treatment Value: Re-Water vs. No Drought
  misc_feature: MA Experiment 20001557 PARAMETER Experiment Name: At_Drought_Soil_Dry_P Parameter: Timepoint (day) Value: 13
  misc_feature: MA Experiment 20001557 PARAMETER Experiment Name: At_Drought_Soil_Dry_P Parameter: Treatment Value: Drought vs. No Drought
  misc_feature: MA Experiment ID: 20001558 Result: Up-regulated in Transcription
  misc_feature: MA Experiment 20001558 PARAMETER Experiment Name: At_Drought_Soil_Dry_P Parameter: Age (day) Value: 27
  misc_feature: MA Experiment 20001558 PARAMETER Experiment Name: At_Drought_Soil_Dry_P Parameter: Organism Value: A. thaliana
  misc_feature: MA Experiment 20001558 PARAMETER Experiment Name: At_Drought_Soil_Dry_P Parameter: Plant Line Value: WS
  misc_feature: MA Experiment 20001558 PARAMETER Experiment Name: At_Drought_Soil_Dry_P Parameter: Post Timepoint (hr) Value: 6
  misc_feature: MA Experiment 20001558 PARAMETER Experiment Name: At_Drought_Soil_Dry_P Parameter: Post-Treatment Value: Re-Water vs. No Drought
  misc_feature: MA Experiment 20001558 PARAMETER Experiment Name: At_Drought_Soil_Dry_P Parameter: Timepoint (day) Value: 13
  misc_feature: MA Experiment 20001558 PARAMETER Experiment Name: At_Drought_Soil_Dry_P Parameter: Treatment Value: Drought vs. No Drought
  misc_feature: MA Experiment ID: 20001760 Result: Down-regulated in Transcription
  misc_feature: MA Experiment 20001760 PARAMETER Experiment Name: At_50mM_NH4NO3_L-to-H_P Parameter: Timepoint (hr) Value: 2
  misc_feature: MA Experiment 20001760 PARAMETER Experiment Name: At_50mM_NH4NO3_L-to-H_P Parameter: Tissue Value: Siliques
  misc_feature: MA Experiment 20001760 PARAMETER Experiment Name: At_50mM_NH4NO3_L-to-H_P Parameter: Treatment Value: 50mM NH4NO3 vs 100mM Mannitol
  misc_feature: MA Experiment ID: 20001761 Result: Down-regulated in Transcription
  misc_feature: MA Experiment 20001761 PARAMETER Experiment Name: At_50mM_NH4NO3_L-to-H_P Parameter: Timepoint (hr) Value: 4
  misc_feature: MA Experiment 20001761 PARAMETER Experiment Name: At_50mM_NH4NO3_L-to-H_P Parameter: Tissue Value: Siliques
  misc_feature: MA Experiment 20001761 PARAMETER Experiment Name: At_50mM_NH4NO3_L-to-H_P Parameter: Treatment Value: 50mM NH4NO3 vs 100mM Mannitol
  misc_feature: MA Experiment ID: 20001904 Result: Up-regulated in Transcription
  misc_feature: MA Experiment 20001904 PARAMETER Experiment Name: At_Drought_Reproduction_P Parameter: Age (day) Value: 37
  misc_feature: MA Experiment 20001904 PARAMETER Experiment Name: At_Drought_Reproduction_P Parameter: Organism Value: A. thaliana
  misc_feature: MA Experiment 20001904 PARAMETER Experiment Name: At_Drought_Reproduction_P Parameter: Plant Line Value: WS
  misc_feature: MA Experiment 20001904 PARAMETER Experiment Name: At_Drought_Reproduction_P Parameter: Timepoint (day) Value: 7
  misc_feature: MA Experiment 20001904 PARAMETER Experiment Name: At_Drought_Reproduction_P Parameter: Tissue Value: Rosettes
  misc_feature: MA Experiment 20001904 PARAMETER Experiment Name: At_Drought_Reproduction_P Parameter: Treatment Value: Drought vs. No Drought
aaagtaacaaaatactaattcaaaagctttataaagtttcttttctcattcggttctaaagttcctatttttcaatggattacgtgagaacccaagtcgaagctgtttttgatgattctgagcaagatggatcaaccatctctgaatctggaagctgcgattcttcttctgatcgatcttttgctgacgagcttgggcttatggagttgcttgaaggagataaagctcatgatttgatctatcgtaattgtaaatctggtcttggtgatcaatgtcagattctctctgttcttagaaacggatttaggaacgttggatctcgtgcaaagctcaagacttttcaggtttttcaagaggcggtgcagatgaaacacggtggagacggtggagctaaggtgaaatacggttggtgctctgtttcgaaacatgagcttaaaacgatttttgagtatgggtttagcgagccgctgaggaatgatggatcttttggccgtggattgtatctctcgccggataattctcctcttgattgtttgaaggattcagcttcagaatcagaagatgggatgagattcttgttgctttgtagagttctacttggaaaatcagagattgttcctcaaggctcgactagatcatgtccaagttcaccagagtttgattctggtgtggatgatttagtttctacgaagaagtatattgtgtggagtacacacatgaacactcatgttttgcctgagtttcttgtttgcatcaaagctccatttaacctaactcgaagtccaaagagattgagatcaccatggatggcatttcctgtattgatcaaagcattgtccaagtttctacctccttctcaaatacttgtcattcagaaacattacaaagatcaacaaaataggagaattacacggagcgaactaatccaacgagtcagaagcataaccggagacaagttactagttcacatcatcaaagcttgtggacataaagtacaacactaaatctccattgcagatcactttggcgtttttgtttcaaggacacaatcaccatggttgtatttgtctgtttaccaactccaaaatgatcaggactggtagagtccctttctattgttttcccatgatagtgatgaaaaaaaactgttcattagattatttaagatcgattagattagggtcttagcaacattattaatgaagagaacattaacaagttatcatcttgtttttcttttcactcttcttctttcaaaaacatttgtattattgtctggctttgagctgaagaaaatttctggtggactgagttttac

SEQ ID NO: 35573 - protein, 309 aa, Arabidopsis thaliana
  peptide (1)..(309): Ceres Seq. ID no. 12334533
  misc_feature (44)..(260): Homolog of NCBI NO: 14150488 NR Description: ATP8 [Arabidopsis thaliana]
  misc_feature (236)..(300): Homolog of NCBI NO: 29126336 NR Description: putative CEO protein [Oryza sativa (japonica
  misc_feature (1)..(231): Homolog of NCBI NO: 29126336 NR Description: putative CEO protein [Oryza sativa (japonica
  misc_feature (16)..(290): Homolog of NCBI NO: 7485680 NR Description: hypothetical protein F17O7.2 - Arabidopsis
  misc_feature (16)..(301): Homolog of NCBI NO: 15223159 NR Description: hypothetical protein; protein id: At1g70440.1
  misc_feature (11)..(306): Homolog of NCBI NO: 8778582 NR Description: F28C11.18 [Arabidopsis thaliana]
  misc_feature (11)..(306): Homolog of NCBI NO: 15220787 NR Description: hypothetical protein; protein id: At1g23550.1
  misc_feature (1)..(307): Homolog of NCBI NO: 15228235 NR Description: putative protein; protein id: At3g47720.1
  misc_feature (1)..(309): Homolog of NCBI NO: 21592445 NR Description: unknown [Arabidopsis thaliana]
  misc_feature (1)..(309): Homolog of NCBI NO: 15241862 NR Description: putative protein
MDYVRTQVEAVFDDSEQDGSTISESGSCDSSSDRSFADELGLMELLEGDKAHDLIYRNCKSGLGDQCQILSVLRNGFRNVGSRAKLKTFQVFQEAVQMKHGGDGGAKVKYGWCSVSKHELKTIFEYGFSEPLRNDGSFGRGLYLSPDNSPLDCLKDSASESEDGMRFLLLCRVLLGKSEIVPQGSTRSCPSSPEFDSGVDDLVSTKKYIVWSTHMNTHVLPEFLVCIKAPFNLTRSPKRLRSPWMAFPVLIKALSKFLPPSQILVIQKHYKDQQNRRITRSELIQRVRSITGDKLLVHIIKACGHKVQH

SEQ ID NO: 35574 - protein, 267 aa, Arabidopsis thaliana
  peptide (1)..(267): Ceres Seq. ID no. 12334534
  misc_feature (2)..(218): Homolog of NCBI NO: 14150488 NR Description: ATP8 [Arabidopsis thaliana]
  misc_feature (194)..(258): Homolog of NCBI NO: 29126336 NR Description: putative CEO protein [Oryza sativa (japonica
  misc_feature (1)..(189): Homolog of NCBI NO: 29126336 NR Description: putative CEO protein [Oryza sativa (japonica
  misc_feature (1)..(248): Homolog of NCBI NO: 7485680 NR Description: hypothetical protein F17O7.2 - Arabidopsis
  misc_feature (1)..(259): Homolog of NCBI NO: 15223159 NR Description: hypothetical protein; protein id: At1g70440.1
  misc_feature (1)..(264): Homolog of NCBI NO: 8778582 NR Description: F28C11.18 [Arabidopsis thaliana]
  misc_feature (1)..(264): Homolog of NCBI NO: 15220787 NR Description: hypothetical protein; protein id: At1g23550.1
  misc_feature (1)..(265): Homolog of NCBI NO: 15228235 NR Description: putative protein; protein id: At3g47720.1
  misc_feature (1)..(267): Homolog of NCBI NO: 21592445 NR Description: unknown [Arabidopsis thaliana]
  misc_feature (1)..(267): Homolog of NCBI NO: 15241862 NR Description: putative protein
MELLEGDKAHDLIYRNCKSGLGDQCQILSVLRNGFRNVGSRAKLKTFQVFQEAVQMKHGGDGGAKVKYGWCSVSKHELKTIFEYGFSEPLRNDGSFGRGLYLSPDNSPLDCLKDSASESEDGMRFLLLCRVLLGKSEIVPQGSTRSCPSSPEFDSGVDDLVSTKKYIVWSTHMNTHVLPEFLVCIKAPFNLTRSPKRLRSPWMAFPVLIKALSKFLPPSQILVIQKHYKDQQNRRITRSELIQRVRSITGDKLLVHIIKACGHKVQH

SEQ ID NO: 35575 - protein, 212 aa, Arabidopsis thaliana
  peptide (1)..(212): Ceres Seq. ID no. 12334535
  misc_feature (1)..(163): Homolog of NCBI NO: 14150488 NR Description: ATP8 [Arabidopsis thaliana]
  misc_feature (139)..(203): Homolog of NCBI NO: 29126336 NR Description: putative CEO protein [Oryza sativa (japonica
  misc_feature (1)..(134): Homolog of NCBI NO: 29126336 NR Description: putative CEO protein [Oryza sativa (japonica
  misc_feature (1)..(193): Homolog of NCBI NO: 7485680 NR Description: hypothetical protein F17O7.2 - Arabidopsis
  misc_feature (1)..(204): Homolog of NCBI NO: 15223159 NR Description: hypothetical protein; protein id: At1g70440.1
  misc_feature (1)..(209): Homolog of NCBI NO: 8778582 NR Description: F28C11.18 [Arabidopsis thaliana]
  misc_feature (1)..(209): Homolog of NCBI NO: 15220787 NR Description: hypothetical protein; protein id: At1g23550.1
  misc_feature (1)..(210): Homolog of NCBI NO: 15228235 NR Description: putative protein; protein id: At3g47720.1
  misc_feature (1)..(212): Homolog of NCBI NO: 21592445 NR Description: unknown [Arabidopsis thaliana]
  misc_feature (1)..(212): Homolog of NCBI NO: 15241862 NR Description: putative protein
MKHGGDGGAKVKYGWCSVSKHELKTIFEYGFSEPLRNDGSFGRGLYLSPDNSPLDCLKDSASESEDGMRFLLLCRVLLGKSEIVPQGSTRSCPSSPEFDSGVDDLVSTKKYIVWSTHMNTHVLPEFLVCIKAPFNLTRSPKRLRSPWMAFPVLIKALSKFLPPSQILVIQKHYKDQQNRRITRSELIQRVRSITGDKLLVHIIKACGHKVQH

SEQ ID NO: 35576 - DNA, 1195 bp, Arabidopsis thaliana; identical to SEQ ID NO: 28415
  misc_feature (1)..(1195): Ceres Seq. ID no. 13486843
  misc_feature: MA Experiment ID: 20000227 Result: Up-regulated in Transcription
  misc_feature: MA Experiment 20000227 PARAMETER Experiment Name: At_Root-Tips-vs-Tops_P Parameter: Tissue Value: Root Tips vs. Root Tops
  misc_feature: MA Experiment ID: 20000234 Result: Up-regulated in Transcription
  misc_feature: MA Experiment 20000234 PARAMETER Experiment Name: At_Siliques_P Parameter: Age (day) Value: 21
  misc_feature: MA Experiment 20000234 PARAMETER Experiment Name: At_Siliques_P Parameter: Organism Value: A. thaliana
  misc_feature: MA Experiment 20000234 PARAMETER Experiment Name: At_Siliques_P Parameter: Plant Line Value: WS
  misc_feature: MA Experiment 20000234 PARAMETER Experiment Name: At_Siliques_P Parameter: Tissue Value: Less Than 5mm Siliques vs. Whole Plant
  misc_feature: MA Experiment ID: 20001451 Result: Down-regulated in Transcription
  misc_feature: MA Experiment 20001451 PARAMETER Experiment Name: At_Far-red-induction_P Parameter: Age (day) Value: 7
  misc_feature: MA Experiment 20001451 PARAMETER Experiment Name: At_Far-red-induction_P Parameter: Light Value: Far-red vs. White
  misc_feature: MA Experiment 20001451 PARAMETER Experiment Name: At_Far-red-induction_P Parameter: Organism Value: A. thaliana
  misc_feature: MA Experiment 20001451 PARAMETER Experiment Name: At_Far-red-induction_P Parameter: Plant Line Value: Columbia
  misc_feature: MA Experiment 20001451 PARAMETER Experiment Name: At_Far-red-induction_P Parameter: Timepoint (hr) Value: 24
  misc_feature: MA Experiment 20001451 PARAMETER Experiment Name: At_Far-red-induction_P Parameter: Tissue Value: Whole Plant
  misc_feature: MA Experiment ID: 20001557 Result: Up-regulated in Transcription
  misc_feature: MA Experiment 20001557 PARAMETER Experiment Name: At_Drought_Soil_Dry_P Parameter: Age (day) Value: 27
  misc_feature: MA Experiment 20001557 PARAMETER Experiment Name: At_Drought_Soil_Dry_P Parameter: Organism Value: A. thaliana
  misc_feature: MA Experiment 20001557 PARAMETER Experiment Name: At_Drought_Soil_Dry_P Parameter: Plant Line Value: WS
  misc_feature: MA Experiment 20001557 PARAMETER Experiment Name: At_Drought_Soil_Dry_P Parameter: Post Timepoint (hr) Value: 3
  misc_feature: MA Experiment 20001557 PARAMETER Experiment Name: At_Drought_Soil_Dry_P Parameter: Post-Treatment Value: Re-Water vs. No Drought
  misc_feature: MA Experiment 20001557 PARAMETER Experiment Name: At_Drought_Soil_Dry_P Parameter: Timepoint (day) Value: 13
  misc_feature: MA Experiment 20001557 PARAMETER Experiment Name: At_Drought_Soil_Dry_P Parameter: Treatment Value: Drought vs. No Drought
  misc_feature: MA Experiment ID: 20001558 Result: Up-regulated in Transcription
  misc_feature: MA Experiment 20001558 PARAMETER Experiment Name: At_Drought_Soil_Dry_P Parameter: Age (day) Value: 27
  misc_feature: MA Experiment 20001558 PARAMETER Experiment Name: At_Drought_Soil_Dry_P Parameter: Organism Value: A. thaliana
  misc_feature: MA Experiment 20001558 PARAMETER Experiment Name: At_Drought_Soil_Dry_P Parameter: Plant Line Value: WS
  misc_feature: MA Experiment 20001558 PARAMETER Experiment Name: At_Drought_Soil_Dry_P Parameter: Post Timepoint (hr) Value: 6
  misc_feature: MA Experiment 20001558 PARAMETER Experiment Name: At_Drought_Soil_Dry_P Parameter: Post-Treatment Value: Re-Water vs. No Drought
  misc_feature: MA Experiment 20001558 PARAMETER Experiment Name: At_Drought_Soil_Dry_P Parameter: Timepoint (day) Value: 13
  misc_feature: MA Experiment 20001558 PARAMETER Experiment Name: At_Drought_Soil_Dry_P Parameter: Treatment Value: Drought vs. No Drought
  misc_feature: MA Experiment ID: 20001757 Result: Up-regulated in Transcription
  misc_feature: MA Experiment 20001757 PARAMETER Experiment Name: At_50mM_NH4NO3_L-to-H_P Parameter: Timepoint (hr) Value: 6
  misc_feature: MA Experiment 20001757 PARAMETER Experiment Name: At_50mM_NH4NO3_L-to-H_P Parameter: Tissue Value: Leaf
  misc_feature: MA Experiment 20001757 PARAMETER Experiment Name: At_50mM_NH4NO3_L-to-H_P Parameter: Treatment Value: 50mM NH4NO3 vs 100mM Mannitol

SEQ ID NO: 35577 - protein, 306 aa, Arabidopsis thaliana; identical to SEQ ID NO: 28416
  peptide (1)..(306): Ceres Seq. ID no. 13486844
  misc_feature (124)..(243): Pfam Name: AMP-binding enzyme Pfam Description: AMP-binding enzyme
  misc_feature (124)..(243): Pfam Name: AMP-binding enzyme Pfam Description: AMP-binding enzyme
  misc_feature (1)..(269): Homolog of NCBI NO: 7716950 NR Description: histone deacetylase 2 isoform c [Zea mays]
  misc_feature (1)..(285): Homolog of NCBI NO: 7716948 NR Description: histone deacetylase 2 isoform b [Zea mays]
  misc_feature (1)..(282): Homolog of NCBI NO: 7489751 NR Description: histone deacetylase (EC 3.5.1.-) HD2-p39,
  misc_feature (1)..(301): Homolog of NCBI NO: 7804960 NR Description: putative histone deacetylase HD2 [Oryza sativa]
  misc_feature (1)..(285): Homolog of NCBI NO: 7716948 NR Description: histone deacetylase 2 isoform b [Zea mays]
  misc_feature (1)..(301): Homolog of NCBI NO: 7804960 NR Description: putative histone deacetylase HD2 [Oryza sativa]
  misc_feature (1)..(306): Homolog of NCBI NO: 25352191 NR Description: probable histone deacetylase (EC 3.5.1.-)
  misc_feature (1)..(306): Homolog of NCBI NO: 30688577 NR Description: histone deacetylase-related protein [Arabidopsis
  misc_feature (95)..(306): Homolog of NCBI NO: 30688581 NR Description: histone deacetylase-related protein [Arabidopsis
  misc_feature (1)..(282): Homolog of NCBI NO: 7489751 NR Description: histone deacetylase (EC 3.5.1.-) HD2-p39,
  misc_feature (1)..(269): Homolog of NCBI NO: 7716950 NR Description: histone deacetylase 2 isoform c [Zea mays]
  misc_feature (95)..(306): Homolog of NCBI NO: 30688581 NR Description: histone deacetylase-related protein [Arabidopsis
  misc_feature (1)..(306): Homolog of NCBI NO: 25352191 NR Description: probable histone deacetylase (EC 3.5.1.-)
  misc_feature (1)..(306): Homolog of NCBI NO: 30688577 NR Description: histone deacetylase-related protein [Arabidopsis

SEQ ID NO: 35578 - DNA, 1335 bp, Arabidopsis thaliana
  misc_feature (1)..(1335): Ceres Seq. ID no. 13490506
  misc_feature: MA Experiment ID: 108435 Result: Up-regulated in Transcription
  misc_feature: MA Experiment 108435 PARAMETER Experiment Name: At_stm_Mutants_cDNA_P Parameter: Plant Line Value: wt Landsburg vs stm
  misc_feature: MA Experiment 108435 PARAMETER Experiment Name: At_stm_Mutants_cDNA_P Parameter: Tissue Value: Shoot Apical Meristem Region
  misc_feature: MA Experiment ID: 108461 Result: Up-regulated in Transcription
  misc_feature: MA Experiment 108461 PARAMETER Experiment Name: At_Germinating_Seeds_cDNA_P Parameter: Age (day) Value: 1 vs. 0
  misc_feature: MA Experiment 108461 PARAMETER Experiment Name: At_Germinating_Seeds_cDNA_P Parameter: Tissue Value: Germinating Seeds
  misc_feature: MA Experiment ID: 108462 Result: Up-regulated in Transcription
  misc_feature: MA Experiment 108462 PARAMETER Experiment Name: At_Germinating_Seeds_cDNA_P Parameter: Age (day) Value: 2 vs. 0
  misc_feature: MA Experiment 108462 PARAMETER Experiment Name: At_Germinating_Seeds_cDNA_P Parameter: Tissue Value: Germinating Seeds
  misc_feature: MA Experiment ID: 108463 Result: Up-regulated in Transcription
  misc_feature: MA Experiment 108463 PARAMETER Experiment Name: At_Germinating_Seeds_cDNA_P Parameter: Age (day) Value: 3 vs. 0
  misc_feature: MA Experiment 108463 PARAMETER Experiment Name: At_Germinating_Seeds_cDNA_P Parameter: Tissue Value: Germinating Seeds
  misc_feature: MA Experiment ID: 108464 Result: Up-regulated in Transcription
  misc_feature: MA Experiment 108464 PARAMETER Experiment Name: At_Germinating_Seeds_cDNA_P Parameter: Age (day) Value: 4 vs. 0
  misc_feature: MA Experiment 108464 PARAMETER Experiment Name: At_Germinating_Seeds_cDNA_P Parameter: Tissue Value: Germinating Seeds
  misc_feature: MA Experiment ID: 108501 Result: Up-regulated in Transcription
  misc_feature: MA Experiment 108501 PARAMETER Experiment Name: At_ap2_floral_buds_cDNA_P Parameter: Plant Line Value: ap2 (Ler.)
  misc_feature: MA Experiment 108501 PARAMETER Experiment Name: At_ap2_floral_buds_cDNA_P Parameter: Tissue Value: Closed Flower
  misc_feature: MA Experiment ID: 108561 Result: Down-regulated in Transcription
  misc_feature: MA Experiment 108561 PARAMETER Experiment Name: At_100uM_ABA_cDNA_P Parameter: Timepoint (hr) Value: 6
  misc_feature: MA Experiment 108561 PARAMETER Experiment Name: At_100uM_ABA_cDNA_P Parameter: Tissue Value: Aerial
  misc_feature: MA Experiment 108561 PARAMETER Experiment Name: At_100uM_ABA_cDNA_P Parameter: Treatment Value: 100uM ABA vs. No Treatment
  misc_feature: MA Experiment ID: 108573 Result: Down-regulated in Transcription
  misc_feature: MA Experiment 108573 PARAMETER Experiment Name: At_Drought_cDNA_P Parameter: Timepoint (hr) Value: 6
  misc_feature: MA Experiment 108573 PARAMETER Experiment Name: At_Drought_cDNA_P Parameter: Tissue Value: Aerial
  misc_feature: MA Experiment 108573 PARAMETER Experiment Name: At_Drought_cDNA_P Parameter: Treatment Value: Drought vs. No Drought
  misc_feature: MA Experiment ID: 108579 Result: Up-regulated in Transcription
  misc_feature: MA Experiment 108579 PARAMETER Experiment Name: At_4deg_Cold_cDNA_P Parameter: Temperature (deg C) Value: 4 vs. 22
  misc_feature: MA Experiment 108579 PARAMETER Experiment Name: At_4deg_Cold_cDNA_P Parameter: Timepoint (hr) Value: 6
  misc_feature: MA Experiment 108579 PARAMETER Experiment Name: At_4deg_Cold_cDNA_P Parameter: Tissue Value: Aerial
  misc_feature: MA Experiment ID: 108594 Result: Down-regulated in Transcription
  misc_feature: MA Experiment 108594 PARAMETER Experiment Name: At_Ler-rhl_Root_cDNA_P Parameter: Plant Line Value: null
  misc_feature: MA Experiment ID: 108605 Result: Down-regulated in Transcription
  misc_feature: MA Experiment 108605 PARAMETER Experiment Name: At_100uM_ABA_cDNA_P Parameter: Timepoint (hr) Value: 6
  misc_feature: MA Experiment 108605 PARAMETER Experiment Name: At_100uM_ABA_cDNA_P Parameter: Tissue Value: Aerial
  misc_feature: MA Experiment 108605 PARAMETER Experiment Name: At_100uM_ABA_cDNA_P Parameter: Treatment Value: 100uM ABA vs. No Treatment
  misc_feature: MA Experiment ID: 108609 Result: Down-regulated in Transcription
  misc_feature: MA Experiment 108609 PARAMETER Experiment Name: At_100uM_ABA_cDNA_P Parameter: Timepoint (hr) Value: 24
  misc_feature: MA Experiment 108609 PARAMETER Experiment Name: At_100uM_ABA_cDNA_P Parameter: Tissue Value: Aerial
  misc_feature: MA Experiment 108609 PARAMETER Experiment Name: At_100uM_ABA_cDNA_P Parameter: Treatment Value: 100uM ABA vs. No Treatment
  misc_feature: MA Experiment ID: 20000069 Result: Down-regulated in Transcription
  misc_feature: MA Experiment 20000069 PARAMETER Experiment Name: At_100uM_ABA_Mutants_cDNA_P Parameter: Plant Line Value: CS23
  misc_feature: MA Experiment 20000069 PARAMETER Experiment Name: At_100uM_ABA_Mutants_cDNA_P Parameter: Timepoint (hr) Value: 6
  misc_feature: MA Experiment 20000069 PARAMETER Experiment Name: At_100uM_ABA_Mutants_cDNA_P Parameter: Tissue Value: Aerial
  misc_feature: MA Experiment 20000069 PARAMETER Experiment Name: At_100uM_ABA_Mutants_cDNA_P Parameter: Treatment Value: 100uM ABA vs. No Treatment
  misc_feature: MA Experiment ID: 20000070 Result: Down-regulated in Transcription
  misc_feature: MA Experiment 20000070 PARAMETER Experiment Name: At_100uM_ABA_Mutants_cDNA_P Parameter: Plant Line Value: CS24
  misc_feature: MA Experiment 20000070 PARAMETER Experiment Name: At_100uM_ABA_Mutants_cDNA_P Parameter: Timepoint (hr) Value: 6
  misc_feature: MA Experiment 20000070 PARAMETER Experiment Name: At_100uM_ABA_Mutants_cDNA_P Parameter: Tissue Value: Aerial
  misc_feature: MA Experiment 20000070 PARAMETER Experiment Name: At_100uM_ABA_Mutants_cDNA_P Parameter: Treatment Value: 100uM ABA vs. No Treatment
  misc_feature: MA Experiment ID: 20000071 Result: Down-regulated in Transcription
  misc_feature: MA Experiment 20000071 PARAMETER Experiment Name: At_100uM_ABA_Mutants_cDNA_P Parameter: Plant Line Value: CS8104
  misc_feature: MA Experiment 20000071 PARAMETER Experiment Name: At_100uM_ABA_Mutants_cDNA_P Parameter: Timepoint (hr) Value: 6
  misc_feature: MA Experiment 20000071 PARAMETER Experiment Name: At_100uM_ABA_Mutants_cDNA_P Parameter: Tissue Value: Aerial
  misc_feature: MA Experiment 20000071 PARAMETER Experiment Name: At_100uM_ABA_Mutants_cDNA_P Parameter: Treatment Value: 100uM ABA vs. No Treatment
  misc_feature: MA Experiment ID: 20000086 Result: Down-regulated in Transcription
  misc_feature: MA Experiment 20000086 PARAMETER Experiment Name: At_100uM_ABA_Mutants_cDNA_P Parameter: Plant Line Value: CS22
  misc_feature: MA Experiment 20000086 PARAMETER Experiment Name: At_100uM_ABA_Mutants_cDNA_P Parameter: Timepoint (hr) Value: 6
  misc_feature: MA Experiment 20000086 PARAMETER Experiment Name: At_100uM_ABA_Mutants_cDNA_P Parameter: Tissue Value: Aerial
  misc_feature: MA Experiment 20000086 PARAMETER Experiment Name: At_100uM_ABA_Mutants_cDNA_P Parameter: Treatment Value: 100uM ABA vs. No Treatment
  misc_feature: MA Experiment ID: 20000087 Result: Down-regulated in Transcription
  misc_feature: MA Experiment 20000087 PARAMETER Experiment Name: At_100uM_ABA_Mutants_cDNA_P Parameter: Plant Line Value: WS
  misc_feature: MA Experiment 20000087 PARAMETER Experiment Name: At_100uM_ABA_Mutants_cDNA_P Parameter: Timepoint (hr) Value: 6
  misc_feature: MA Experiment 20000087 PARAMETER Experiment Name: At_100uM_ABA_Mutants_cDNA_P Parameter: Tissue Value: Aerial
  misc_feature: MA Experiment 20000087 PARAMETER Experiment Name: At_100uM_ABA_Mutants_cDNA_P Parameter: Treatment Value: 100uM ABA vs. No Treatment
  misc_feature: MA Experiment ID: 20000088 Result: Down-regulated in Transcription
  misc_feature: MA Experiment 20000088 PARAMETER Experiment Name: At_100uM_ABA_Mutants_cDNA_P Parameter: Plant Line Value: Landsberg
  misc_feature: MA Experiment 20000088 PARAMETER Experiment Name: At_100uM_ABA_Mutants_cDNA_P Parameter: Timepoint (hr) Value: 6
  misc_feature: MA Experiment 20000088 PARAMETER Experiment Name: At_100uM_ABA_Mutants_cDNA_P Parameter: Tissue Value: Aerial
  misc_feature: MA Experiment 20000088 PARAMETER Experiment Name: At_100uM_ABA_Mutants_cDNA_P Parameter: Treatment Value: 100uM ABA vs. No Treatment
  misc_feature: MA Experiment ID: 20000089 Result: Down-regulated in Transcription
  misc_feature: MA Experiment ID: 20000090 Result: Down-regulated in Transcription
  misc_feature: MA Experiment ID: 20000117 Result: Down-regulated in Transcription
  misc_feature: MA Experiment 20000117 PARAMETER Experiment Name: At_100uM_ABA_Mutants_cDNA_P Parameter: Plant Line Value: Columbia
  misc_feature: MA Experiment 20000117 PARAMETER Experiment Name: At_100uM_ABA_Mutants_cDNA_P Parameter: Timepoint (hr) Value: 6
  misc_feature: MA Experiment 20000117 PARAMETER Experiment Name: At_100uM_ABA_Mutants_cDNA_P Parameter: Tissue Value: Aerial
  misc_feature: MA Experiment 20000117 PARAMETER Experiment Name: At_100uM_ABA_Mutants_cDNA_P Parameter: Treatment Value: 100uM ABA vs. No Treatment
  misc_feature: MA Experiment ID: 20000169 Result: Down-regulated in Transcription
  misc_feature: MA Experiment 20000169 PARAMETER Experiment Name: At_100uM_ABA_P Parameter: Age (day) Value: 14
  misc_feature: MA Experiment 20000169 PARAMETER Experiment Name: At_100uM_ABA_P Parameter: Organism Value: A. thaliana
  misc_feature: MA Experiment 20000169 PARAMETER Experiment Name: At_100uM_ABA_P Parameter: Plant Line Value: WS
  misc_feature: MA Experiment 20000169 PARAMETER Experiment Name: At_100uM_ABA_P Parameter: Timepoint (hr) Value: 6
  misc_feature: MA Experiment 20000169 PARAMETER Experiment Name: At_100uM_ABA_P Parameter: Tissue Value: Aerial
  misc_feature: MA Experiment 20000169 PARAMETER Experiment Name: At_100uM_ABA_P Parameter: Treatment Value: 100uM ABA vs. No Treatment
  misc_feature: MA Experiment ID: 20000179 Result: Up-regulated in Transcription
  misc_feature: MA Experiment 20000179 PARAMETER Experiment Name: At_Germinating_Seeds_P Parameter: Age (hr) Value: 6 vs. 0
  misc_feature: MA Experiment 20000179 PARAMETER Experiment Name: At_Germinating_Seeds_P Parameter: Tissue Value: Germinating Seeds
  misc_feature: MA Experiment ID: 20000180 Result: Up-regulated in Transcription
  misc_feature: MA Experiment 20000180 PARAMETER Experiment Name: At_Germinating_Seeds_P Parameter: Age (hr) Value: 24 vs. 0
  misc_feature: MA Experiment 20000180 PARAMETER Experiment Name: At_Germinating_Seeds_P Parameter: Tissue Value: Germinating Seeds
  misc_feature: MA Experiment ID: 20000185 Result: Up-regulated in Transcription
  misc_feature: MA Experiment 20000185 PARAMETER Experiment Name: At_Roots__P Parameter: Age (day) Value: 7 vs. 21
  misc_feature: MA Experiment 20000185 PARAMETER Experiment Name: At_Roots__P Parameter: Organism Value: A. thaliana
  misc_feature: MA Experiment 20000185 PARAMETER Experiment Name: At_Roots__P Parameter: Tissue Value: Roots vs. Whole Plant
  misc_feature: MA Experiment ID: 20000224 Result: Up-regulated in Transcription
  misc_feature: MA Experiment ID: 20000264 Result: Up-regulated in Transcription
  misc_feature: MA Experiment 20000264 PARAMETER Experiment Name: At_Open_Flower_P Parameter: Age (day) Value: 21
  misc_feature: MA Experiment 20000264 PARAMETER Experiment Name: At_Open_Flower_P Parameter: Plant Line Value: WS
  misc_feature: MA Experiment 20000264 PARAMETER Experiment Name: At_Open_Flower_P Parameter: Tissue Value: Open Flower vs. Whole Plant
  misc_feature: MA Experiment ID: 20000286 Result: Up-regulated in Transcription
  misc_feature: MA Experiment 20000286 PARAMETER Experiment Name: At_Open_Flower_P Parameter: Age (day) Value: 21
  misc_feature: MA Experiment 20000286 PARAMETER Experiment Name: At_Open_Flower_P Parameter: Plant Line Value: WS
  misc_feature: MA Experiment 20000286 PARAMETER Experiment Name: At_Open_Flower_P Parameter: Tissue Value: Half Open vs. Whole Plant
  misc_feature: MA Experiment ID: 20000437 Result: Down-regulated in Transcription
  misc_feature: MA Experiment 20000437 PARAMETER Experiment Name: At_Drought_P Parameter: Age (day) Value: 8
  misc_feature: MA Experiment 20000437 PARAMETER Experiment Name: At_Drought_P Parameter: Organism Value: A. thaliana
  misc_feature: MA Experiment 20000437 PARAMETER Experiment Name: At_Drought_P Parameter: Plant Line Value: WS
  misc_feature: MA Experiment 20000437 PARAMETER Experiment Name: At_Drought_P Parameter: Timepoint (hr) Value: 24
  misc_feature: MA Experiment 20000437 PARAMETER Experiment Name: At_Drought_P Parameter: Tissue Value: Whole Plant
  misc_feature: MA Experiment 20000437 PARAMETER Experiment Name: At_Drought_P Parameter: Treatment Value: Drought vs. No Drought
  misc_feature: MA Experiment ID: 20000441 Result: Down-regulated in Transcription
  misc_feature: MA Experiment 20000441 PARAMETER Experiment Name: At_1uM_BR-BRZ__P Parameter: Tissue Value: Shoot Apices
  misc_feature: MA Experiment 20000441 PARAMETER Experiment Name: At_1uM_BR-BRZ__P Parameter: Treatment Value: 1uM BR vs. No Treatment
  misc_feature: MA Experiment ID: 20000443 Result: Down-regulated in Transcription
  misc_feature: MA Experiment 20000443 PARAMETER Experiment Name: At_1uM_BR-BRZ__P Parameter: Tissue Value: Shoot Apices
  misc_feature: MA Experiment 20000443 PARAMETER Experiment Name: At_1uM_BR-BRZ__P Parameter: Treatment Value: 1uM BRZ vs. No Treatment
  misc_feature: MA Experiment ID: 20000453 Result: Down-regulated in Transcription
  misc_feature: MA Experiment 20000453 PARAMETER Experiment Name: At_100uM_ABA_P Parameter: Age (day) Value: 15
  misc_feature: MA Experiment 20000453 PARAMETER Experiment Name: At_100uM_ABA_P Parameter: Organism Value: A. thaliana
  misc_feature: MA Experiment 20000453 PARAMETER Experiment Name: At_100uM_ABA_P Parameter: Plant Line Value: WS
  misc_feature: MA Experiment 20000453 PARAMETER Experiment Name: At_100uM_ABA_P Parameter: Timepoint (hr) Value: 24
  misc_feature: MA Experiment 20000453 PARAMETER Experiment Name: At_100uM_ABA_P Parameter: Tissue Value: Aerial
  misc_feature: MA Experiment 20000453 PARAMETER Experiment Name: At_100uM_ABA_P Parameter: Treatment Value: 100uM ABA vs. No Treatment
  misc_feature: MA Experiment ID: 20000495 Result: Down-regulated in Transcription
  misc_feature: MA Experiment 20000495 PARAMETER Experiment Name: At_Guard_Cells_P Parameter: Harvest Date Value: 8/2/2002
  misc_feature: MA Experiment 20000495 PARAMETER Experiment Name: At_Guard_Cells_P Parameter: Organism Value: A. thaliana
  misc_feature: MA Experiment 20000495 PARAMETER Experiment Name: At_Guard_Cells_P Parameter: Tissue Value: Guard Cells vs. Leaves
  misc_feature: MA Experiment ID: 20000573 Result: Down-regulated in Transcription
  misc_feature: MA Experiment 20000573 PARAMETER Experiment Name: At_100uM_ABA_Mutants__P Parameter: Organism Value: A. thaliana
  misc_feature: MA Experiment 20000573 PARAMETER Experiment Name: At_100uM_ABA_Mutants__P Parameter: Plant Line Value: CS22 vs. Ler wt
  misc_feature: MA Experiment 20000573 PARAMETER Experiment Name: At_100uM_ABA_Mutants__P Parameter: Timepoint (hr) Value: N/A
  misc_feature: MA Experiment 20000573 PARAMETER Experiment Name: At_100uM_ABA_Mutants__P Parameter: Tissue Value: Whole Plant
  misc_feature: MA Experiment 20000573 PARAMETER Experiment Name: At_100uM_ABA_Mutants__P Parameter: Treatment Value: None
  misc_feature: MA Experiment ID: 20000574 Result: Down-regulated in Transcription
  misc_feature: MA Experiment 20000574 PARAMETER Experiment Name: At_100uM_ABA_Mutants__P Parameter: Organism Value: A. thaliana
  misc_feature: MA Experiment 20000574 PARAMETER Experiment Name: At_100uM_ABA_Mutants__P Parameter: Plant Line Value: CS23 vs. Ler wt
  misc_feature: MA Experiment 20000574 PARAMETER Experiment Name: At_100uM_ABA_Mutants__P Parameter: Timepoint (hr) Value: N/A
  misc_feature: MA Experiment 20000574 PARAMETER Experiment Name: At_100uM_ABA_Mutants__P Parameter: Tissue Value: Whole Plant
  misc_feature: MA Experiment 20000574 PARAMETER Experiment Name: At_100uM_ABA_Mutants__P Parameter: Treatment Value: None
  misc_feature: MA Experiment ID: 20001247 Result: Down-regulated in Transcription
  misc_feature: MA Experiment 20001247 PARAMETER Experiment Name: At_Far-red-induction_P Parameter: Age (day) Value: 7
  misc_feature: MA Experiment 20001247 PARAMETER Experiment Name: At_Far-red-induction_P Parameter: Light Value: Far-red vs. White
  misc_feature: MA Experiment 20001247 PARAMETER Experiment Name: At_Far-red-induction_P Parameter: Organism Value: A. thaliana
  misc_feature: MA Experiment 20001247 PARAMETER Experiment Name: At_Far-red-induction_P Parameter: Plant Line Value: Columbia
  misc_feature: MA Experiment 20001247 PARAMETER Experiment Name: At_Far-red-induction_P Parameter: Timepoint (hr) Value: 1
  misc_feature: MA Experiment 20001247 PARAMETER Experiment Name: At_Far-red-induction_P Parameter: Tissue Value: Whole Plant
  misc_feature: MA Experiment ID: 20001450 Result: Down-regulated in Transcription
  misc_feature: MA Experiment 20001450 PARAMETER Experiment Name: At_Far-red-induction_P Parameter: Age (day) Value: 7
  misc_feature: MA Experiment 20001450 PARAMETER Experiment Name: At_Far-red-induction_P Parameter: Light Value: Far-red vs. White
  misc_feature: MA Experiment 20001450 PARAMETER Experiment Name: At_Far-red-induction_P Parameter: Organism Value: A. thaliana
  misc_feature: MA Experiment 20001450 PARAMETER Experiment Name: At_Far-red-induction_P Parameter: Plant Line Value: Columbia
  misc_feature: MA Experiment 20001450 PARAMETER Experiment Name: At_Far-red-induction_P Parameter: Timepoint (hr) Value: 8
  misc_feature: MA Experiment 20001450 PARAMETER Experiment Name: At_Far-red-induction_P Parameter: Tissue Value: Whole Plant
  misc_feature: MA Experiment ID: 20001504 Result: Up-regulated in Transcription
  misc_feature: MA Experiment 20001504 PARAMETER Experiment Name: At_Far-red-enriched_P Parameter: Age (day) Value: 10
  misc_feature: MA Experiment 20001504 PARAMETER Experiment Name: At_Far-red-enriched_P Parameter: Light Value: Far-red enriched vs. White
  misc_feature: MA Experiment 20001504 PARAMETER Experiment Name: At_Far-red-enriched_P Parameter: Organism Value: A. thaliana
  misc_feature: MA Experiment 20001504 PARAMETER Experiment Name: At_Far-red-enriched_P Parameter: Plant Line Value: Columbia
  misc_feature: MA Experiment 20001504 PARAMETER Experiment Name: At_Far-red-enriched_P Parameter: Timepoint (day) Value: 6
  misc_feature: MA Experiment 20001504 PARAMETER Experiment Name: At_Far-red-enriched_P Parameter: Tissue Value: Whole Plant
  misc_feature: MA Experiment ID: 20001556 Result: Up-regulated in Transcription
  misc_feature: MA Experiment 20001556 PARAMETER Experiment Name: At_Drought_Soil_Dry_P Parameter: Age (day) Value: 26
  misc_feature: MA Experiment 20001556 PARAMETER Experiment Name: At_Drought_Soil_Dry_P Parameter: Organism Value: A. thaliana
  misc_feature: MA Experiment 20001556 PARAMETER Experiment Name: At_Drought_Soil_Dry_P Parameter: Plant Line Value: WS
  misc_feature: MA Experiment 20001556 PARAMETER Experiment Name: At_Drought_Soil_Dry_P Parameter: Post Timepoint (hr) Value: None
  misc_feature: MA Experiment 20001556 PARAMETER Experiment Name: At_Drought_Soil_Dry_P Parameter: Post-Treatment Value: None
  misc_feature: MA Experiment 20001556 PARAMETER Experiment Name: At_Drought_Soil_Dry_P Parameter: Timepoint (day) Value: 12
  misc_feature: MA Experiment 20001556 PARAMETER Experiment Name: At_Drought_Soil_Dry_P Parameter: Treatment Value: Drought vs. No Drought
  misc_feature: MA Experiment ID: 20001557 Result: Up-regulated in Transcription
  misc_feature: MA Experiment 20001557 PARAMETER Experiment Name: At_Drought_Soil_Dry_P Parameter: Age (day) Value: 27
  misc_feature: MA Experiment 20001557 PARAMETER Experiment Name: At_Drought_Soil_Dry_P Parameter: Organism Value: A. thaliana
  misc_feature: MA Experiment 20001557 PARAMETER Experiment Name: At_Drought_Soil_Dry_P Parameter: Plant Line Value: WS
  misc_feature: MA Experiment 20001557 PARAMETER Experiment Name: At_Drought_Soil_Dry_P Parameter: Post Timepoint (hr) Value: 3
  misc_feature: MA Experiment 20001557 PARAMETER Experiment Name: At_Drought_Soil_Dry_P Parameter: Post-Treatment Value: Re-Water vs. No Drought
  misc_feature: MA Experiment 20001557 PARAMETER Experiment Name: At_Drought_Soil_Dry_P Parameter: Timepoint (day) Value: 13
  misc_feature: MA Experiment 20001557 PARAMETER Experiment Name: At_Drought_Soil_Dry_P Parameter: Treatment Value: Drought vs. No Drought
  misc_feature: MA Experiment ID: 20001558 Result: Up-regulated in Transcription
  misc_feature: MA Experiment 20001558 PARAMETER Experiment Name: At_Drought_Soil_Dry_P Parameter: Age (day) Value: 27
  misc_feature: MA Experiment 20001558 PARAMETER Experiment Name: At_Drought_Soil_Dry_P Parameter: Organism Value: A. thaliana
  misc_feature: MA Experiment 20001558 PARAMETER Experiment Name: At_Drought_Soil_Dry_P Parameter: Plant Line Value: WS
  misc_feature: MA Experiment 20001558 PARAMETER Experiment Name: At_Drought_Soil_Dry_P Parameter: Post Timepoint (hr) Value: 6
  misc_feature: MA Experiment 20001558 PARAMETER Experiment Name: At_Drought_Soil_Dry_P Parameter: Post-Treatment Value: Re-Water vs. No Drought
  misc_feature: MA Experiment 20001558 PARAMETER Experiment Name: At_Drought_Soil_Dry_P Parameter: Timepoint (day) Value: 13
  misc_feature: MA Experiment 20001558 PARAMETER Experiment Name: At_Drought_Soil_Dry_P Parameter: Treatment Value: Drought vs. No Drought
  misc_feature: MA Experiment ID: 20001911 Result: Down-regulated in Transcription
  misc_feature: MA Experiment 20001911 PARAMETER Experiment Name: At_Drought_Reproduction_P Parameter: Age (day) Value: 40
  misc_feature: MA Experiment 20001911 PARAMETER Experiment Name: At_Drought_Reproduction_P Parameter: Organism Value: A. thaliana
  misc_feature: MA Experiment 20001911 PARAMETER Experiment Name: At_Drought_Reproduction_P Parameter: Plant Line Value: WS
  misc_feature: MA Experiment 20001911 PARAMETER Experiment Name: At_Drought_Reproduction_P Parameter: Timepoint (day) Value: 10
  misc_feature: MA Experiment 20001911 PARAMETER Experiment Name: At_Drought_Reproduction_P Parameter: Tissue Value: Flowers
  misc_feature: MA Experiment 20001911 PARAMETER Experiment Name: At_Drought_Reproduction_P Parameter: Treatment Value: Drought vs. No Drought
aaaattacatatccgccattgtttccggcaacgcaaactaccaaaaaaaataatggaggtcgaaagagtccaagacatttcatcttcttctctactaacagaagcaatcccgttggagttcatcagatcagagaaagaacaaccagcgatcacaacattccgaggtccaacgccggcgattcccgtcgtcgatctaagcgatcccgacgaagaaagcgtgaggcgcgcggtggtgaaagcgagtgaagaatgggggctattccaagtggttaaccacgggattccgacggagctgatacgacgtttacaagacgtcggaagaaaattcttcgagcttccttcgtcggagaaagaatccgtcgctaaaccggaagattcgaaagacattgaaggatacggaacaaagcttcagaaagatccagaaggtaaaaaagcttgggtcgatcatctcttccatcgaatctggccaccgtcatgcgtcaattacagattctggcctaagaatccacctgaatacagggaggtgaatgaagagtatgcagtgcatgtgaagaagctatcggagacgttattagggattctctcggatggattagggttaaagcgtgatgcgttgaaagaaggtctcggcggagagatggcggagtatatgatgaagattaactattatccgccgtgtcctcggccggatttagctttaggtgtaccggctcatacagatctcagtggaatcactcttcttgttcctaacgaagttcctggacttcaagttttcaaagatgatcactggttcgatgcagagtatattccctccgccgtcattgttcacatcggcgatcagattctgaggttgagtaatgggaggtataaaaatgtgttgcataggacgacggtggataaagagaagacgaggatgtcgtggccggttttcttggagcctccccgtgaaaagattgttggacctttaccggaactaaccggagatgataatcctccaaagtttaaaccgtttgctttcaaggattacagttaccgcaagctcaataaacttcctctggattgagaaaaatcaatacgagaagaataatttgtggttgtggaataggaagtggttcgttattgagttgttgttttcccgcggttgtgtctcttgcttattgttattttatgtttaaaataaagattaaaacatctacctacattgtgtgtgatgttgacatgtttttattgtgttgcgatgcctttgcaagttatgtcggaccatttttaggcattggaaagagtaggtttgtattttgtaaatttttaacctgtcacggaaaaaaatcggtgatc

SEQ ID NO: 35579 - protein, 353 aa, Arabidopsis thaliana
  peptide (1)..(353): Ceres Seq. ID no. 13490507
  misc_feature (214)..(313): Pfam Name: 2OG-Fe(II) oxygenase superfamily Pfam Description: 2OG-Fe(II) oxygenase superfamily
  misc_feature (214)..(313): Pfam Name: 2OG-Fe(II) oxygenase superfamily Pfam Description: 2OG-Fe(II) oxygenase superfamily
  misc_feature (18)..(351): Homolog of NCBI NO: 29420435 NR Description: flavonol synthase [Rosa hybrid cultivar
  misc_feature (18)..(351): Homolog of NCBI NO: 2492613 NR Description: Flavonol synthase (FLS)
  misc_feature (60)..(353): Homolog of NCBI NO: 21554244 NR Description: flavonol synthase [Arabidopsis thaliana]
  misc_feature (18)..(351): Homolog of NCBI NO: 31978953 NR Description: flavonol synthase [Petroselinum crispum]
  misc_feature (60)..(353): Homolog of NCBI NO: 15242827 NR Description: flavonol synthase, putative [Arabidopsis
  misc_feature (18)..(351): Homolog of NCBI NO: 29420435 NR Description: flavonol synthase [Rosa hybrid cultivar
  misc_feature (60)..(353): Homolog of NCBI NO: 21554244 NR Description: flavonol synthase [Arabidopsis thaliana]
  misc_feature (60)..(353): Homolog of NCBI NO: 15242827 NR Description: flavonol synthase, putative [Arabidopsis
  misc_feature (18)..(353): Homolog of NCBI NO: 15242339 NR Description: flavonol synthase 1 (FLS1) [Arabidopsis thaliana]
  misc_feature (18)..(351): Homolog of NCBI NO: 14916566 NR Description: Flavonol synthase (FLS) (CitFLS)
  misc_feature (18)..(351): Homolog of NCBI NO: 14916564 NR Description: Flavonol synthase (FLS)
  misc_feature (18)..(351): Homolog of NCBI NO: 1706822 NR Description: Flavonol synthase (FLS)
  misc_feature (18)..(351): Homolog of NCBI NO: 29123532 NR Description: flavonol synthase [Allium cepa]
  misc_feature (18)..(351): Homolog of NCBI NO: 31978953 NR Description: flavonol synthase [Petroselinum crispum]
  misc_feature (18)..(351): Homolog of NCBI NO: 2492613 NR Description: Flavonol synthase (FLS)
  misc_feature (18)..(351): Homolog of NCBI NO: 29123532 NR Description: flavonol synthase [Allium cepa]
  misc_feature (18)..(351): Homolog of NCBI NO: 1706822 NR Description: Flavonol synthase (FLS)
  misc_feature (18)..(351): Homolog of NCBI NO: 14916564 NR Description: Flavonol synthase (FLS)
  misc_feature (18)..(351): Homolog of NCBI NO: 14916566 NR Description: Flavonol synthase (FLS) (CitFLS)
  misc_feature (18)..(353): Homolog of NCBI NO: 15242339 NR Description: flavonol synthase 1 (FLS1) [Arabidopsis thaliana]
KLHIRHCFRQRKLPKKIMEVERVQDISSSSLLTEAIPLEFIRSEKEQPAITTFRGPTPAIPVVDLSDPDEESVRRAVVKASEEWGLFQVVNHGIPTELIRRLQDVGRKFFELPSSEKESVAKPEDSKDIEGYGTKLQKDPEGKKAWVDHLFHRIWPPSCVNYRFWPKNPPEYREVNEEYAVHVKKLSETLLGILSDGLGLKRDALKEGLGGEMAEYMMKINYYPPCPRPDLALGVPAHTDLSGITLLVPNEVPGLQVFKDDHWFDAEYIPSAVIVHIGDQILRLSNGRYKNVLHRTTVDKEKTRMSWPVFLEPPREKIVGPLPELTGDDNPPKFKPFAFKDYSYRKLNKLPLD

SEQ ID NO: 35580 - protein, 336 aa, Arabidopsis thaliana
  peptide (1)..(336): Ceres Seq. ID no. 13490508
  misc_feature (197)..(296): Pfam Name: 2OG-Fe(II) oxygenase superfamily Pfam Description: 2OG-Fe(II) oxygenase superfamily
  misc_feature (197)..(296): Pfam Name: 2OG-Fe(II) oxygenase superfamily Pfam Description: 2OG-Fe(II) oxygenase superfamily
  misc_feature (1)..(334): Homolog of NCBI NO: 29420435 NR Description: flavonol synthase [Rosa hybrid cultivar
  misc_feature (1)..(334): Homolog of NCBI NO: 2492613 NR Description: Flavonol synthase (FLS)
  misc_feature (43)..(336): Homolog of NCBI NO: 21554244 NR Description: flavonol synthase [Arabidopsis thaliana]
  misc_feature (1)..(334): Homolog of NCBI NO: 31978953 NR Description: flavonol synthase [Petroselinum crispum]
  misc_feature (43)..(336): Homolog of NCBI NO: 15242827 NR Description: flavonol synthase, putative [Arabidopsis
  misc_feature (1)..(334): Homolog of NCBI NO: 29420435 NR Description: flavonol synthase [Rosa hybrid cultivar
  misc_feature (43)..(336): Homolog of NCBI NO: 21554244 NR Description: flavonol synthase [Arabidopsis thaliana]
  misc_feature (43)..(336): Homolog of NCBI NO: 15242827 NR Description: flavonol synthase, putative [Arabidopsis
  misc_feature (1)..(336): Homolog of NCBI NO: 15242339 NR Description: flavonol synthase 1 (FLS1) [Arabidopsis thaliana]
  misc_feature (1)..(334): Homolog of NCBI NO: 14916566 NR Description: Flavonol synthase (FLS) (CitFLS)
  misc_feature (1)..(334): Homolog of NCBI NO: 14916564 NR Description: Flavonol synthase (FLS)
  misc_feature (1)..(334): Homolog of NCBI NO: 1706822 NR Description: Flavonol synthase (FLS)
  misc_feature (1)..(334): Homolog of NCBI NO: 29123532 NR Description: flavonol synthase [Allium cepa]
  misc_feature (1)..(334): Homolog of NCBI NO: 31978953 NR Description: flavonol synthase [Petroselinum crispum]
  misc_feature (1)..(334): Homolog of NCBI NO: 2492613 NR Description: Flavonol synthase (FLS)
  misc_feature (1)..(334): Homolog of NCBI NO: 29123532 NR Description: flavonol synthase [Allium cepa]
  misc_feature (1)..(334): Homolog of NCBI NO: 1706822 NR Description: Flavonol synthase (FLS)
  misc_feature (1)..(334): Homolog of NCBI NO: 14916564 NR Description: Flavonol synthase (FLS)
  misc_feature (1)..(334): Homolog of NCBI NO: 14916566 NR Description: Flavonol synthase (FLS) (CitFLS)
  misc_feature (1)..(336): Homolog of NCBI NO: 15242339 NR Description: flavonol synthase 1 (FLS1) [Arabidopsis thaliana]
MEVERVQDISSSSLLTEAIPLEFIRSEKEQPAITTFRGPTPAIPVVDLSDPDEESVRRAVVKASEEWGLFQVVNHGIPTELIRRLQDVGRKFFELPSSEKESVAKPEDSKDIEGYGTKLQKDPEGKKAWVDHLFHRIWPPSCVNYRFWPKNPPEYREVNEEYAVHVKKLSETLLGILSDGLGLKRDALKEGLGGEMAEYMMKINYYPPCPRPDLALGVPAHTDLSGITLLVPNEVPGLQVFKDDHWFDAEYIPSAVIVHIGDQILRLSNGRYKNVLHRTTVDKEKTRMSWPVFLEPPREKIVGPLPELTGDDNPPKFKPFAFKDYSYRKLNKLPLD

SEQ ID NO: 35581 - DNA, 767 bp, Arabidopsis thaliana
  misc_feature (1)..(767): Ceres Seq. ID no. 12393433
  misc_feature: MA Experiment ID: 108434 Result: Up-regulated in Transcription
  misc_feature: MA Experiment 108434 PARAMETER Experiment Name: At_Root_Tips_cDNA_P Parameter: Tissue Value: Root Tips
  misc_feature: MA Experiment ID: 108462 Result: Down-regulated in Transcription
  misc_feature: MA Experiment 108462 PARAMETER Experiment Name: At_Germinating_Seeds_cDNA_P Parameter: Age (day) Value: 2 vs. 0
  misc_feature: MA Experiment 108462 PARAMETER Experiment Name: At_Germinating_Seeds_cDNA_P Parameter: Tissue Value: Germinating Seeds
  misc_feature: MA Experiment ID: 108463 Result: Down-regulated in Transcription
  misc_feature: MA Experiment 108463 PARAMETER Experiment Name: At_Germinating_Seeds_cDNA_P Parameter: Age (day) Value: 3 vs. 0
  misc_feature: MA Experiment 108463 PARAMETER Experiment Name: At_Germinating_Seeds_cDNA_P Parameter: Tissue Value: Germinating Seeds
  misc_feature: MA Experiment ID: 108464 Result: Down-regulated in Transcription
  misc_feature: MA Experiment 108464 PARAMETER Experiment Name: At_Germinating_Seeds_cDNA_P Parameter: Age (day) Value: 4 vs. 0
  misc_feature: MA Experiment 108464 PARAMETER Experiment Name: At_Germinating_Seeds_cDNA_P Parameter: Tissue Value: Germinating Seeds
  misc_feature: MA Experiment ID: 108573 Result: Down-regulated in Transcription
  misc_feature: MA Experiment 108573 PARAMETER Experiment Name: At_Drought_cDNA_P Parameter: Timepoint (hr) Value: 6
  misc_feature: MA Experiment 108573 PARAMETER Experiment Name: At_Drought_cDNA_P Parameter: Tissue Value: Aerial
  misc_feature: MA Experiment 108573 PARAMETER Experiment Name: At_Drought_cDNA_P Parameter: Treatment Value: Drought vs. No Drought
  misc_feature: MA Experiment ID: 108577 Result: Down-regulated in Transcription
  misc_feature: MA Experiment 108577 PARAMETER Experiment Name: At_42deg_Heat_cDNA_P Parameter: Temperature (deg C) Value: 42 vs. 22
  misc_feature: MA Experiment 108577 PARAMETER Experiment Name: At_42deg_Heat_cDNA_P Parameter: Timepoint (hr) Value: 6
  misc_feature: MA Experiment 108577 PARAMETER Experiment Name: At_42deg_Heat_cDNA_P Parameter: Tissue Value: Aerial
  misc_feature: MA Experiment ID: 108585 Result: Down-regulated in Transcription
  misc_feature: MA Experiment 108585 PARAMETER Experiment Name: At_5mM_NaNP_cDNA_P Parameter: Timepoint (hr) Value: 6
  misc_feature: MA Experiment 108585 PARAMETER Experiment Name: At_5mM_NaNP_cDNA_P Parameter: Tissue Value: Aerial
  misc_feature: MA Experiment 108585 PARAMETER Experiment Name: At_5mM_NaNP_cDNA_P Parameter: Treatment Value: null
  misc_feature: MA Experiment ID: 108595 Result: Down-regulated in Transcription
  misc_feature: MA Experiment 108595 PARAMETER Experiment Name: At_Ler-pi_Ovule_cDNA_P Parameter: Plant Line Value: null
  misc_feature: MA Experiment ID: 20000069 Result: Up-regulated in Transcription
  misc_feature: MA Experiment 20000069 PARAMETER Experiment Name: At_100uM_ABA_Mutants_cDNA_P Parameter: Plant Line Value: CS23
  misc_feature: MA Experiment 20000069 PARAMETER Experiment Name: At_100uM_ABA_Mutants_cDNA_P Parameter: Timepoint (hr) Value: 6
  misc_feature: MA Experiment 20000069 PARAMETER Experiment Name: At_100uM_ABA_Mutants_cDNA_P Parameter: Tissue Value: Aerial
  misc_feature: MA Experiment 20000069 PARAMETER Experiment Name: At_100uM_ABA_Mutants_cDNA_P Parameter: Treatment Value: 100uM ABA vs. No Treatment
  misc_feature: MA Experiment ID: 20000070 Result: Up-regulated in Transcription
  misc_feature: MA Experiment 20000070 PARAMETER Experiment Name: At_100uM_ABA_Mutants_cDNA_P Parameter: Plant Line Value: CS24
  misc_feature: MA Experiment 20000070 PARAMETER Experiment Name: At_100uM_ABA_Mutants_cDNA_P Parameter: Timepoint (hr) Value: 6
  misc_feature: MA Experiment 20000070 PARAMETER Experiment Name: At_100uM_ABA_Mutants_cDNA_P Parameter: Tissue Value: Aerial
  misc_feature: MA Experiment 20000070 PARAMETER Experiment Name: At_100uM_ABA_Mutants_cDNA_P Parameter: Treatment Value: 100uM ABA vs. No Treatment
  misc_feature: MA Experiment ID: 20000071 Result: Up-regulated in Transcription
  misc_feature: MA Experiment 20000071 PARAMETER Experiment Name: At_100uM_ABA_Mutants_cDNA_P Parameter: Plant Line Value: CS8104
  misc_feature: MA Experiment 20000071 PARAMETER Experiment Name: At_100uM_ABA_Mutants_cDNA_P Parameter: Timepoint (hr) Value: 6
  misc_feature: MA Experiment 20000071 PARAMETER Experiment Name: At_100uM_ABA_Mutants_cDNA_P Parameter: Tissue Value: Aerial
  misc_feature: MA Experiment 20000071 PARAMETER Experiment Name: At_100uM_ABA_Mutants_cDNA_P Parameter: Treatment Value: 100uM ABA vs. No Treatment
  misc_feature: MA Experiment ID: 20000072 Result: Up-regulated in Transcription
  misc_feature: MA Experiment 20000072 PARAMETER Experiment Name: At_100uM_ABA_Mutants_cDNA_P Parameter: Plant Line Value: CS8105
  misc_feature: MA Experiment 20000072 PARAMETER Experiment Name: At_100uM_ABA_Mutants_cDNA_P Parameter: Timepoint (hr) Value: 6
  misc_feature: MA Experiment 20000072 PARAMETER Experiment Name: At_100uM_ABA_Mutants_cDNA_P Parameter: Tissue Value: Aerial
  misc_feature: MA Experiment 20000072 PARAMETER Experiment Name: At_100uM_ABA_Mutants_cDNA_P Parameter: Treatment Value: 100uM ABA vs. No Treatment
  misc_feature: MA Experiment ID: 20000086 Result: Up-regulated in Transcription
  misc_feature: MA Experiment 20000086 PARAMETER Experiment Name: At_100uM_ABA_Mutants_cDNA_P Parameter: Plant Line Value: CS22
  misc_feature: MA Experiment 20000086 PARAMETER Experiment Name: At_100uM_ABA_Mutants_cDNA_P Parameter: Timepoint (hr) Value: 6
  misc_feature: MA Experiment 20000086 PARAMETER Experiment Name: At_100uM_ABA_Mutants_cDNA_P Parameter: Tissue Value: Aerial
  misc_feature: MA Experiment 20000086 PARAMETER Experiment Name: At_100uM_ABA_Mutants_cDNA_P Parameter: Treatment Value: 100uM ABA vs. No Treatment
  misc_feature: MA Experiment ID: 20000087 Result: Up-regulated in Transcription
  misc_feature: MA Experiment 20000087 PARAMETER Experiment Name: At_100uM_ABA_Mutants_cDNA_P Parameter: Plant Line Value: WS
  misc_feature: MA Experiment 20000087 PARAMETER Experiment Name: At_100uM_ABA_Mutants_cDNA_P Parameter: Timepoint (hr) Value: 6
  misc_feature: MA Experiment 20000087 PARAMETER Experiment Name: At_100uM_ABA_Mutants_cDNA_P Parameter: Tissue Value: Aerial
  misc_feature: MA Experiment 20000087 PARAMETER Experiment Name: At_100uM_ABA_Mutants_cDNA_P Parameter: Treatment Value: 100uM ABA vs. No Treatment
  misc_feature: MA Experiment ID: 20000088 Result: Up-regulated in Transcription
  misc_feature: MA Experiment 20000088 PARAMETER Experiment Name: At_100uM_ABA_Mutants_cDNA_P Parameter: Plant Line Value: Landsberg
  misc_feature: MA Experiment 20000088 PARAMETER Experiment Name: At_100uM_ABA_Mutants_cDNA_P Parameter: Timepoint (hr) Value: 6
  misc_feature: MA Experiment 20000088 PARAMETER Experiment Name: At_100uM_ABA_Mutants_cDNA_P Parameter: Tissue Value: Aerial
  misc_feature: MA Experiment 20000088 PARAMETER Experiment Name: At_100uM_ABA_Mutants_cDNA_P Parameter: Treatment Value: 100uM ABA vs. No Treatment
  misc_feature: MA Experiment ID: 20000089 Result: Up-regulated in Transcription
  misc_feature: MA Experiment ID: 20000111 Result: Down-regulated in Transcription
  misc_feature: MA Experiment 20000111 PARAMETER Experiment Name: At_42deg_Heat_cDNA_P Parameter: Temperature (deg C) Value: 42 vs. 22
  misc_feature: MA Experiment 20000111 PARAMETER Experiment Name: At_42deg_Heat_cDNA_P Parameter: Timepoint (hr) Value: 6
  misc_feature: MA Experiment 20000111 PARAMETER Experiment Name: At_42deg_Heat_cDNA_P Parameter: Tissue Value: Aerial
  misc_feature: MA Experiment ID: 20000112 Result: Down-regulated in Transcription
  misc_feature: MA Experiment 20000112 PARAMETER Experiment Name: At_42deg_Heat_cDNA_P Parameter: Temperature (deg C) Value: 42 vs. 22
  misc_feature: MA Experiment 20000112 PARAMETER Experiment Name: At_42deg_Heat_cDNA_P Parameter: Timepoint (hr) Value: 2
  misc_feature: MA Experiment 20000112 PARAMETER Experiment Name: At_42deg_Heat_cDNA_P Parameter: Tissue Value: Aerial
  misc_feature: MA Experiment ID: 20000113 Result: Down-regulated in Transcription
  misc_feature: MA Experiment 20000113 PARAMETER Experiment Name: At_42deg_Heat_cDNA_P Parameter: Temperature (deg C) Value: 42 vs. 22
  misc_feature: MA Experiment 20000113 PARAMETER Experiment Name: At_42deg_Heat_cDNA_P Parameter: Timepoint (hr) Value: 8
  misc_feature: MA Experiment 20000113 PARAMETER Experiment Name: At_42deg_Heat_cDNA_P Parameter: Tissue Value: Aerial
  misc_feature: MA Experiment ID: 20000117 Result: Up-regulated in Transcription
  misc_feature: MA Experiment 20000117 PARAMETER Experiment Name: At_100uM_ABA_Mutants_cDNA_P Parameter: Plant Line Value: Columbia
  misc_feature: MA Experiment 20000117 PARAMETER Experiment Name: At_100uM_ABA_Mutants_cDNA_P Parameter: Timepoint (hr) Value: 6
  misc_feature: MA Experiment 20000117 PARAMETER Experiment Name: At_100uM_ABA_Mutants_cDNA_P Parameter: Tissue Value: Aerial
  misc_feature: MA Experiment 20000117 PARAMETER Experiment Name: At_100uM_ABA_Mutants_cDNA_P Parameter: Treatment Value: 100uM ABA vs. No Treatment
  misc_feature: MA Experiment ID: 20000438 Result: Down-regulated in Transcription
  misc_feature: MA Experiment 20000438 PARAMETER Experiment Name: At_Shoots__P Parameter: Age (day) Value: 14
  misc_feature: MA Experiment 20000438 PARAMETER Experiment Name: At_Shoots__P Parameter: Tissue Value: Shoots vs. Whole Plant
  misc_feature: MA Experiment ID: 20001451 Result: Down-regulated in Transcription
  misc_feature: MA Experiment 20001451 PARAMETER Experiment Name: At_Far-red-induction_P Parameter: Age (day) Value: 7
  misc_feature: MA Experiment 20001451 PARAMETER Experiment Name: At_Far-red-induction_P Parameter: Light Value: Far-red vs. White
  misc_feature: MA Experiment 20001451 PARAMETER Experiment Name: At_Far-red-induction_P Parameter: Organism Value: A. thaliana
  misc_feature: MA Experiment 20001451 PARAMETER Experiment Name: At_Far-red-induction_P Parameter: Plant Line Value: Columbia
  misc_feature: MA Experiment 20001451 PARAMETER Experiment Name: At_Far-red-induction_P Parameter: Timepoint (hr) Value: 24
  misc_feature: MA Experiment 20001451 PARAMETER Experiment Name: At_Far-red-induction_P Parameter: Tissue Value: Whole Plant
  misc_feature: MA Experiment ID: 20001757 Result: Up-regulated in Transcription
  misc_feature: MA Experiment 20001757 PARAMETER Experiment Name: At_50mM_NH4NO3_L-to-H_P Parameter: Timepoint (hr) Value: 6
  misc_feature: MA Experiment 20001757 PARAMETER Experiment Name: At_50mM_NH4NO3_L-to-H_P Parameter: Tissue Value: Leaf
  misc_feature: MA Experiment 20001757 PARAMETER Experiment Name: At_50mM_NH4NO3_L-to-H_P Parameter: Treatment Value: 50mM NH4NO3 vs 100mM Mannitol
  misc_feature: MA Experiment ID: 20001905 Result: Down-regulated in Transcription
  misc_feature: MA Experiment 20001905 PARAMETER Experiment Name: At_Drought_Reproduction_P Parameter: Age (day) Value: 40
  misc_feature: MA Experiment 20001905 PARAMETER Experiment Name: At_Drought_Reproduction_P Parameter: Organism Value: A. thaliana
  misc_feature: MA Experiment 20001905 PARAMETER Experiment Name: At_Drought_Reproduction_P Parameter: Plant Line Value: WS
  misc_feature: MA Experiment 20001905 PARAMETER Experiment Name: At_Drought_Reproduction_P Parameter: Timepoint (day) Value: 10
  misc_feature: MA Experiment 20001905 PARAMETER Experiment Name: At_Drought_Reproduction_P Parameter: Tissue Value: Rosettes
  misc_feature: MA Experiment 20001905 PARAMETER Experiment Name: At_Drought_Reproduction_P Parameter: Treatment Value: Drought vs. No Drought
acacaatcacagaacctaatcttcttctccaatcaatctcagagaaaaaaagaaatggcaacaaaccctaaagtctacttcgacatgaccgtcggtggcaaatccgccggtcgtatcgtgatggagctttacgccgacacaacaccagaaaccgccgagaatttcagagcactctgtaccggagagagaggaatcggtaaacaaggtaagccattacactacaaaggatcaagctttcaccgagtgattccgaaattcatgtgtcaaggaggtgatttcacagccgggaatggtaccggaggtgaatctatctatggatcgaagttcaaagacgagaactttatcaagaaacatacaggaccaggtattttgtctatggctaacgctggtgcgaacacgaatggatctcagttttttatttgtactgagaagacttcgtggctcgatgggaaacatgttgtgtttggtcaagttgttgagggattgaatgttgttagagatattgagaaggttggatctgactctggaagaacttctaagcctgttgtcattgctgattgtggtcagatttcttagatctgtctgagattgttgatgatgatgatgatgatcttgaggatccaatggtagctttgtgttgtttctctttgatgttttctggtttatgtttttggattttgatgtttattgctgttgtgaaactttgagtttggctaccattgaataagaagaatgagaataaaatcttgagatccaaatttttgttt

SEQ ID NO: 35582 - protein, 191 aa, Arabidopsis thaliana
  peptide (1)..(191): Ceres Seq. ID no. 12393434
  misc_feature (23)..(190): Homolog of NCBI NO: 167138 NR Description: cyclophilin
  misc_feature (22)..(190): Homolog of NCBI NO: 68407 NR Description: peptidylprolyl isomerase (EC 5.2.1.8) - rape
  misc_feature (22)..(190): Homolog of NCBI NO: 1345921 NR Description: PEPTIDYL-PROLYL CIS-TRANS ISOMERASE (PPIASE)
  misc_feature (19)..(191): Homolog of NCBI NO: 15227259 NR Description: cytosolic cyclophilin (ROC3)
TQSQNLIFFSNQSQRKKEMATNPKVYFDMTVGGKSAGRIVMELYADTTPETAENFRALCTGERGIGKQGKPLHYKGSSFHRVIPKFMCQGGDFTAGNGTGGESIYGSKFKDENFIKKHTGPGILSMANAGANTNGSQFFICTEKTSWLDGKHVVFGQVVEGLNVVRDIEKVGSDSGRTSKPVVIADCGQIS

SEQ ID NO: 35583 - protein, 173 aa, Arabidopsis thaliana
  peptide (1)..(173): Ceres Seq. ID no. 12393435
  misc_feature (5)..(172): Homolog of NCBI NO: 167138 NR Description: cyclophilin
  misc_feature (4)..(172): Homolog of NCBI NO: 68407 NR Description: peptidylprolyl isomerase (EC 5.2.1.8) - rape
  misc_feature (4)..(172): Homolog of NCBI NO: 1345921 NR Description: PEPTIDYL-PROLYL CIS-TRANS ISOMERASE (PPIASE)
  misc_feature (1)..(173): Homolog of NCBI NO: 15227259 NR Description: cytosolic cyclophilin (ROC3)
MATNPKVYFDMTVGGKSAGRIVMELYADTTPETAENFRALCTGERGIGKQGKPLHYKGSSFHRVIPKFMCQGGDFTAGNGTGGESIYGSKFKDENFIKKHTGPGILSMANAGANTNGSQFFICTEKTSWLDGKHVVFGQVVEGLNVVRDIEKVGSDSGRTSKPVVIADCGQIS

SEQ ID NO: 35584 - protein, 163 aa, Arabidopsis thaliana
  peptide (1)..(163): Ceres Seq. ID no. 12393436
  misc_feature (1)..(162): Homolog of NCBI NO: 167138 NR Description: cyclophilin
  misc_feature (1)..(162): Homolog of NCBI NO: 68407 NR Description: peptidylprolyl isomerase (EC 5.2.1.8) - rape
  misc_feature (1)..(162): Homolog of NCBI NO: 1345921 NR Description: PEPTIDYL-PROLYL CIS-TRANS ISOMERASE (PPIASE)
  misc_feature (1)..(163): Homolog of NCBI NO: 15227259 NR Description: cytosolic cyclophilin (ROC3)
MTVGGKSAGRIVMELYADTTPETAENFRALCTGERGIGKQGKPLHYKGSSFHRVIPKFMCQGGDFTAGNGTGGESIYGSKFKDENFIKKHTGPGILSMANAGANTNGSQFFICTEKTSWLDGKHVVFGQVVEGLNVVRDIEKVGSDSGRTSKPVVIADCGQIS

SEQ ID NO: 35585 - DNA, 953 bp, Arabidopsis thaliana
  misc_feature (1)..(953): Ceres Seq. ID no. 12680745
  misc_feature: MA Experiment ID: 108434 Result: Up-regulated in Transcription
  misc_feature: MA Experiment 108434 PARAMETER Experiment Name: At_Root_Tips_cDNA_P Parameter: Tissue Value: Root Tips
  misc_feature: MA Experiment ID: 108464 Result: Down-regulated in Transcription
  misc_feature: MA Experiment 108464 PARAMETER Experiment Name: At_Germinating_Seeds_cDNA_P Parameter: Age (day) Value: 4 vs. 0
  misc_feature: MA Experiment 108464 PARAMETER Experiment Name: At_Germinating_Seeds_cDNA_P Parameter: Tissue Value: Germinating Seeds
  misc_feature: MA Experiment ID: 20000090 Result: Up-regulated in Transcription
ctctctcacacacccatagtcgtcttcctcgatcagtctctctctcaaattgcaaaggtttcttcgaggactttggcatactgcaggttgttggagctgtagtgcttaaaaaccctacctttatactgtttagagcagcagtccctccatgtcaggtcttgtggcgttatgcagagctcgagcttctgcttcgtcttctttattcaacagcgttattcgtccagcatttcgcaatttctctacaggttttgctgatacacagaacaaatcattggtagcacaaatgaaagaagagatgctccacatggacatcaactcaatgataggaagttccatgccactaggtatgatgcgtatcggaacaatcatccacaacatcgagatgaacccagggcaaggcgcaaagatggtccgagctgcaggaaccaacgccaagatcctaaaggagcctgctaaagggaaatgcttgataaagcttccgtcaggggacaccaagtggatcaatgccaaatgtcgtgctacgattggcacagtgtcgaacccgtctcatggaacgaagaagctatataaagcaggacagagtaggtggttagggataaggcccaaagttagaggagtggcgatgaatccgtgtgatcatccacacggtggaggtgaaggaaaaagcaaaagtagtggaagcagaggaaggacatcggttagtccgtggggaaaaccgtgtaaaggcggttacaaatcagctagtgtcaagaagaagaagaagcgtttggcagaagcagcagccaaaatgtgatatgggtgaacaagtttcgattttcttcaaacgtttctttcttttaaaaagcctccaatgttatttggttacgttattgaatctgttttttgagagttttttaggcttcatgaaactagaagatctttgatcagttgagaataaatatggttacgtgttt

SEQ ID NO: 35586 - protein, 214 aa, Arabidopsis thaliana; identical to SEQ ID NO: 35519
  peptide (1)..(214): Ceres Seq. ID no. 12680746
  misc_feature (57)..(190): Pfam Name: Ribosomal Proteins L2, C-terminal domain Pfam Description: Ribosomal Proteins L2, C-terminal domain
  misc_feature (53)..(192): Homolog of NCBI NO: 17933118 NR Description: ribosomal protein L2 [Platanus occidentalis]
  misc_feature (53)..(197): Homolog of NCBI NO: 17933116 NR Description: ribosomal protein L2 [Dicentra sp. Qiu 95026]
  misc_feature (53)..(207): Homolog of NCBI NO: 7440638 NR Description: probable ribosomal protein L2 [imported] - rice
  misc_feature (53)..(207): Homolog of NCBI NO: 6094106 NR Description: MITOCHONDRIAL 60S RIBOSOMAL PROTEIN L2
  misc_feature (29)..(204): Homolog of NCBI NO: 17644110 NR Description: ribosomal protein L2 [Zea mays]
  misc_feature (5)..(204): Homolog of NCBI NO: 17644112 NR Description: ribosomal protein L2 [Lycopersicon esculentum]
  misc_feature (18)..(203): Homolog of NCBI NO: 17644114 NR Description: ribosomal protein L2 [Gossypium arboreum]
  misc_feature (46)..(214): Homolog of NCBI NO: 1076398 NR Description: ribosomal protein L2 - Arabidopsis thaliana
  misc_feature (1)..(214): Homolog of NCBI NO: 21592449 NR Description: unknown [Arabidopsis thaliana]
  misc_feature (1)..(214): Homolog of NCBI NO: 18406440 NR Description: Expressed protein

SEQ ID NO: 35587 - protein, 169 aa, Arabidopsis thaliana; identical to SEQ ID NO: 35520
  peptide (1)..(169): Ceres Seq. ID no. 12680747
  misc_feature (12)..(145): Pfam Name: Ribosomal Proteins L2, C-terminal domain Pfam Description: Ribosomal Proteins L2, C-terminal domain
  misc_feature (8)..(147): Homolog of NCBI NO: 17933118 NR Description: ribosomal protein L2 [Platanus occidentalis]
  misc_feature (8)..(152): Homolog of NCBI NO: 17933116 NR Description: ribosomal protein L2 [Dicentra sp. Qiu 95026]
  misc_feature (8)..(162): Homolog of NCBI NO: 7440638 NR Description: probable ribosomal protein L2 [imported] - rice
  misc_feature (8)..(162): Homolog of NCBI NO: 6094106 NR Description: MITOCHONDRIAL 60S RIBOSOMAL PROTEIN L2
  misc_feature (1)..(159): Homolog of NCBI NO: 17644110 NR Description: ribosomal protein L2 [Zea mays]
  misc_feature (1)..(159): Homolog of NCBI NO: 17644112 NR Description: ribosomal protein L2 [Lycopersicon esculentum]
  misc_feature (1)..(158): Homolog of NCBI NO: 17644114 NR Description: ribosomal protein L2 [Gossypium arboreum]
  misc_feature (1)..(169): Homolog of NCBI NO: 1076398 NR Description: ribosomal protein L2 - Arabidopsis thaliana
  misc_feature (1)..(169): Homolog of NCBI NO: 21592449 NR Description: unknown [Arabidopsis thaliana]
  misc_feature (1)..(169): Homolog of NCBI NO: 18406440 NR Description: Expressed protein

SEQ ID NO: 35588 - protein, 165 aa, Arabidopsis thaliana; identical to SEQ ID NO: 35521
  peptide (1)..(165): Ceres Seq. ID no. 12680748
  misc_feature (8)..(141): Pfam Name: Ribosomal Proteins L2, C-terminal domain Pfam Description: Ribosomal Proteins L2, C-terminal domain
  misc_feature (4)..(143): Homolog of NCBI NO: 17933118 NR Description: ribosomal protein L2 [Platanus occidentalis]
  misc_feature (4)..(148): Homolog of NCBI NO: 17933116 NR Description: ribosomal protein L2 [Dicentra sp. Qiu 95026]
  misc_feature (4)..(158): Homolog of NCBI NO: 7440638 NR Description: probable ribosomal protein L2 [imported] - rice
  misc_feature (4)..(158): Homolog of NCBI NO: 6094106 NR Description: MITOCHONDRIAL 60S RIBOSOMAL PROTEIN L2
  misc_feature (1)..(155): Homolog of NCBI NO: 17644110 NR Description: ribosomal protein L2 [Zea mays]
  misc_feature (1)..(155): Homolog of NCBI NO: 17644112 NR Description: ribosomal protein L2 [Lycopersicon esculentum]
  misc_feature (1)..(154): Homolog of NCBI NO: 17644114 NR Description: ribosomal protein L2 [Gossypium arboreum]
  misc_feature (1)..(165): Homolog of NCBI NO: 1076398 NR Description: ribosomal protein L2 - Arabidopsis thaliana
  misc_feature (1)..(165): Homolog of NCBI NO: 21592449 NR Description: unknown [Arabidopsis thaliana]
  misc_feature (1)..(165): Homolog of NCBI NO: 18406440 NR Description: Expressed protein

SEQ ID NO: 35589 - DNA, 641 bp, Arabidopsis thaliana
  misc_feature (1)..(641): Ceres Seq. ID no. 12332271
  misc_feature: MA Experiment ID: 108573 Result: Up-regulated in Transcription
  misc_feature: MA Experiment 108573 PARAMETER Experiment Name: At_Drought_cDNA_P Parameter: Timepoint (hr) Value: 6
  misc_feature: MA Experiment 108573 PARAMETER Experiment Name: At_Drought_cDNA_P Parameter: Tissue Value: Aerial
  misc_feature: MA Experiment 108573 PARAMETER Experiment Name: At_Drought_cDNA_P Parameter: Treatment Value: Drought vs. No Drought
  misc_feature: MA Experiment ID: 20000113 Result: Down-regulated in Transcription
  misc_feature: MA Experiment 20000113 PARAMETER Experiment Name: At_42deg_Heat_cDNA_P Parameter: Temperature (deg C) Value: 42 vs. 22
  misc_feature: MA Experiment 20000113 PARAMETER Experiment Name: At_42deg_Heat_cDNA_P Parameter: Timepoint (hr) Value: 8
  misc_feature: MA Experiment 20000113 PARAMETER Experiment Name: At_42deg_Heat_cDNA_P Parameter: Tissue Value: Aerial
  misc_feature: MA Experiment ID: 20000306 Result: Up-regulated in Transcription
  misc_feature: MA Experiment 20000306 PARAMETER Experiment Name: At_Germinating_Seeds_Sub_P Parameter: Age (hr) Value: 6 vs. 0
  misc_feature: MA Experiment 20000306 PARAMETER Experiment Name: At_Germinating_Seeds_Sub_P Parameter: Organism Value: A. thaliana
  misc_feature: MA Experiment 20000306 PARAMETER Experiment Name: At_Germinating_Seeds_Sub_P Parameter: Plant Line Value: WS
  misc_feature: MA Experiment 20000306 PARAMETER Experiment Name: At_Germinating_Seeds_Sub_P Parameter: Tissue Value: Germinating Seeds
  misc_feature: MA Experiment ID: 20000307 Result: Up-regulated in Transcription
  misc_feature: MA Experiment 20000307 PARAMETER Experiment Name: At_Germinating_Seeds_Sub_P Parameter: Age (hr) Value: 24 vs. 0
  misc_feature: MA Experiment 20000307 PARAMETER Experiment Name: At_Germinating_Seeds_Sub_P Parameter: Organism Value: A. thaliana
  misc_feature: MA Experiment 20000307 PARAMETER Experiment Name: At_Germinating_Seeds_Sub_P Parameter: Plant Line Value: WS
  misc_feature: MA Experiment 20000307 PARAMETER Experiment Name: At_Germinating_Seeds_Sub_P Parameter: Tissue Value: Germinating Seeds
acgattagaatatgagtagtgcaacgcaaaataacactgccgtttaagacgacggtcccttgacagaatcttcatcaacgctcgatttgacgtctgccgatttccttagctccgacgtaaaccactgatcgtcggtattcagctatattttgatttctcagctccaaaaattcccaacgaaatggagaaaatggccaaaggatggttttcgatgagcggcactagtagcagcggagatcagcagcagcaaccgctgcaaacaggaggaacgtctctgctagctgattggaattcttacgcagcatcgagagattttgaagaagacaccggaactttaggcttcgatatcgaatccgccgttagatctgccaacgacactgtttccggcacctttaatgttgtttcgaaaggagttagagataacctgcagtctgcaacaagtagtatgccttcaggaaaagctttgatgtatttcggtttacttctagcaagtggtgtattcttcatcttcattgccttcaccatgtttcttccagtcatggtgcttatgccacagaagtttgcaatttgttttacccttggatgtggatttatcatcggatctttcttcgctcttcgtggcccgcaaaatcaactcgctc

SEQ ID NO: 35590 - protein, 153 aa, Arabidopsis thaliana
  peptide (1)..(153): Ceres Seq. ID no. 12332272
  misc_feature (1)..(73): Homolog of NCBI NO: 7486785 NR Description: hypothetical protein M3E9.20 - Arabidopsis
  misc_feature (74)..(152): Homolog of NCBI NO: 7486785 NR Description: hypothetical protein M3E9.20 - Arabidopsis
  misc_feature (4)..(152): Homolog of NCBI NO: 18416771 NR Description: putative protein; protein id: At4g26550.1
  misc_feature (1)..(152): Homolog of NCBI NO: 15241114 NR Description: putative protein; protein id: At5g56020.1
MEKMAKGWFSMSGTSSSGDQQQQPLQTGGTSLLADWNSYAASRDFEEDTGTLGFDIESAVRSANDTVSGTFNVVSKGVRDNLQSATSSMPSGKALMYFGLLLASGVFFIFIAFTMFLPVMVLMPQKFAICFTLGCGFIIGSFFALRGPQNQLA

SEQ ID NO: 35591 - protein, 150 aa, Arabidopsis thaliana
  peptide (1)..(150): Ceres Seq. ID no. 12332273
  misc_feature (1)..(70): Homolog of NCBI NO: 7486785 NR Description: hypothetical protein M3E9.20 - Arabidopsis
  misc_feature (71)..(149): Homolog of NCBI NO: 7486785 NR Description: hypothetical protein M3E9.20 - Arabidopsis
  misc_feature (1)..(149): Homolog of NCBI NO: 18416771 NR Description: putative protein; protein id: At4g26550.1
  misc_feature (1)..(149): Homolog of NCBI NO: 15241114 NR Description: putative protein; protein id: At5g56020.1
MAKGWFSMSGTSSSGDQQQQPLQTGGTSLLADWNSYAASRDFEEDTGTLGFDIESAVRSANDTVSGTFNVVSKGVRDNLQSATSSMPSGKALMYFGLLLASGVFFIFIAFTMFLPVMVLMPQKFAICFTLGCGFIIGSFFALRGPQNQLA

SEQ ID NO: 35592 - protein, 143 aa, Arabidopsis thaliana
  peptide (1)..(143): Ceres Seq. ID no. 12332274
  misc_feature (1)..(63): Homolog of NCBI NO: 7486785 NR Description: hypothetical protein M3E9.20 - Arabidopsis
  misc_feature (64)..(142): Homolog of NCBI NO: 7486785 NR Description: hypothetical protein M3E9.20 - Arabidopsis
  misc_feature (1)..(142): Homolog of NCBI NO: 18416771 NR Description: putative protein; protein id: At4g26550.1
  misc_feature (1)..(142): Homolog of NCBI NO: 15241114 NR Description: putative protein; protein id: At5g56020.1
MSGTSSSGDQQQQPLQTGGTSLLADWNSYAASRDFEEDTGTLGFDIESAVRSANDTVSGTFNVVSKGVRDNLQSATSSMPSGKALMYFGLLLASGVFFIFIAFTMFLPVMVLMPQKFAICFTLGCGFIIGSFFALRGPQNQLA

SEQ ID NO: 35593 - DNA, 806 bp, Arabidopsis thaliana
  misc_feature (1)..(806): Ceres Seq. ID no. 12323510
  misc_feature: MA Experiment ID: 20000173 Result: Down-regulated in Transcription
  misc_feature: MA Experiment 20000173 PARAMETER Experiment Name: At_42deg_Heat_P Parameter: Age (day) Value: 14
  misc_feature: MA Experiment 20000173 PARAMETER Experiment Name: At_42deg_Heat_P Parameter: Organism Value: A. thaliana
  misc_feature: MA Experiment 20000173 PARAMETER Experiment Name: At_42deg_Heat_P Parameter: Plant Line Value: WS
  misc_feature: MA Experiment 20000173 PARAMETER Experiment Name: At_42deg_Heat_P Parameter: Temperature (deg C) Value: 42 vs. 22
  misc_feature: MA Experiment 20000173 PARAMETER Experiment Name: At_42deg_Heat_P Parameter: Timepoint (hr) Value: 6
  misc_feature: MA Experiment 20000173 PARAMETER Experiment Name: At_42deg_Heat_P Parameter: Tissue Value: Aerial
  misc_feature: MA Experiment ID: 20000185 Result: Up-regulated in Transcription
  misc_feature: MA Experiment 20000185 PARAMETER Experiment Name: At_Roots__P Parameter: Age (day) Value: 7 vs. 21
  misc_feature: MA Experiment 20000185 PARAMETER Experiment Name: At_Roots__P Parameter: Organism Value: A. thaliana
  misc_feature: MA Experiment 20000185 PARAMETER Experiment Name: At_Roots__P Parameter: Tissue Value: Roots vs. Whole Plant
  misc_feature: MA Experiment ID: 20000227 Result: Up-regulated in Transcription
  misc_feature: MA Experiment 20000227 PARAMETER Experiment Name: At_Root-Tips-vs-Tops_P Parameter: Tissue Value: Root Tips vs. Root Tops
  misc_feature: MA Experiment ID: 20000234 Result: Up-regulated in Transcription
  misc_feature: MA Experiment 20000234 PARAMETER Experiment Name: At_Siliques_P Parameter: Age (day) Value: 21
  misc_feature: MA Experiment 20000234 PARAMETER Experiment Name: At_Siliques_P Parameter: Organism Value: A. thaliana
  misc_feature: MA Experiment 20000234 PARAMETER Experiment Name: At_Siliques_P Parameter: Plant Line Value: WS
  misc_feature: MA Experiment 20000234 PARAMETER Experiment Name: At_Siliques_P Parameter: Tissue Value: Less Than 5mm Siliques vs. Whole Plant
  misc_feature: MA Experiment ID: 20000264 Result: Up-regulated in Transcription
  misc_feature: MA Experiment 20000264 PARAMETER Experiment Name: At_Open_Flower_P Parameter: Age (day) Value: 21
  misc_feature: MA Experiment 20000264 PARAMETER Experiment Name: At_Open_Flower_P Parameter: Plant Line Value: WS
  misc_feature: MA Experiment 20000264 PARAMETER Experiment Name: At_Open_Flower_P Parameter: Tissue Value: Open Flower vs. Whole Plant
  misc_feature: MA Experiment ID: 20000265 Result: Up-regulated in Transcription
  misc_feature: MA Experiment 20000265 PARAMETER Experiment Name: At_Open_Flower_P Parameter: Age (day) Value: 21
  misc_feature: MA Experiment 20000265 PARAMETER Experiment Name: At_Open_Flower_P Parameter: Plant Line Value: WS
  misc_feature: MA Experiment 20000265 PARAMETER Experiment Name: At_Open_Flower_P Parameter: Tissue Value: Closed Flower vs. Whole Plant
  misc_feature: MA Experiment ID: 20000286 Result: Up-regulated in Transcription
  misc_feature: MA Experiment 20000286 PARAMETER Experiment Name: At_Open_Flower_P Parameter: Age (day) Value: 21
  misc_feature: MA Experiment 20000286 PARAMETER Experiment Name: At_Open_Flower_P Parameter: Plant Line Value: WS
  misc_feature: MA Experiment 20000286 PARAMETER Experiment Name: At_Open_Flower_P Parameter: Tissue Value: Half Open vs. Whole Plant
  misc_feature: MA Experiment ID: 20000439 Result: Up-regulated in Transcription
  misc_feature: MA Experiment 20000439 PARAMETER Experiment Name: At_Roots__P Parameter: Age (day) Value: 14 vs. 21
  misc_feature: MA Experiment 20000439 PARAMETER Experiment Name: At_Roots__P Parameter: Organism Value: A. thaliana
  misc_feature: MA Experiment 20000439 PARAMETER Experiment Name: At_Roots__P Parameter: Tissue Value: Roots vs. Whole Plant
atatcgcatctaaagccccccccaaaaaaaaaatcctattacacactcatacgctctctcgtcaaacaaaaaaaaaaaacctaaagaaacttcgacatgaaaggcggcgaatccaaagctgaagcaacgagcactgatcagagactcaaaaccagaggtagaaaggctgggaagaagacgaagaaggatccaaatcaacctaagagacctccaagtgctttcttcgtcttccttgaggatttccgaaaagagtttaacctagcgaatcctaataacaaatccgtcgctactgttggtaaggctgctggagctagatggaaggcaatgactgatgaagataaagctccttacgtcgctaaggctgagagcagaaagactgaatatattaagaatgtgcaacagtacaacttgaaactggctagtggaaccaatagagaagaggatgactctgacaaatccaagtctgaagttgatgaagcagtaagcgaagaggaggcagaagacgacgattgaagcatctaggtcttgctattgacttgactcagatttgagaatgtaaacttgcttaggtttatgaccaaaaacttttaaaaaactcttatttatgctttgtgtttgtgatatttgaacctcatttgctacatcaatgttgttttaggtcagtctgtagggataatatcacttgactgctatatttcccctatttccttatgttttactagtattcatatgttcttcaactttgtatgagttttagtatcagttttatttctacttatgcttatttgttgacttctgtttctacc

SEQ ID NO: 35594 - protein, 138 aa, Arabidopsis thaliana
  peptide (1)..(138): Ceres Seq. ID no. 12323511
  misc_feature (35)..(104): Pfam Name: HMG (high mobility group) box Pfam Description: HMG (high mobility group) box
  misc_feature (1)..(127): Homolog of NCBI NO: 15237040 NR Description: HMG delta protein
  misc_feature (1)..(138): Homolog of NCBI NO: 11346367 NR Description: high mobility group protein HMG-gamma
  misc_feature (1)..(138): Homolog of NCBI NO: 21592453 NR Description: putative HMG protein [Arabidopsis thaliana]
  misc_feature (1)..(138): Homolog of NCBI NO: 13877775 NR Description: putative HMG protein [Arabidopsis thaliana]
  misc_feature (1)..(138): Homolog of NCBI NO: 15227862 NR Description: putative HMG protein
MKGGESKAEATSTDQRLKTRGRKAGKKTKKDPNQPKRPPSAFFVFLEDFRKEFNLANPNNKSVATVGKAAGARWKAMTDEDKAPYVAKAESRKTEYIKNVQQYNLKLASGTNREEDDSDKSKSEVDEAVSEEEAEDDD

SEQ ID NO: 35595 - DNA, 896 bp, Arabidopsis thaliana
  misc_feature (1)..(896): Ceres Seq. ID no. 12332275
  misc_feature: MA Experiment ID: 20000224 Result: Down-regulated in Transcription
gacattgtttcccgcatacttttcttcttcttcttctctccacccatctgctttaaggaaggaacctcaaaagcttacaaaatagtagaagaagaactttttttgatctccgattcttacctctgcaatcttcagattctagctgattcaaggatcttgtttgtgatagaaattggaggagatgggagcattcatgtcgaggttttggttcatgatgtttcctgcaaaagagtataagattgttgttgttggtttggataatgctggtaaaacgacgacgctttataaacttcatttgggtgaagttgttactactcatcctactgttggtagcaatgttgaagagcttgtctacaagaatattcgctttgaggtatgggatcttggtgggcaagataggctaagaacttcatgggcaacatactatcgtggaacacatgctgtgattgtggttatagatagcacagacagagccagaatctctttcatgaaagatgagctagccaggttacttggtcatgaggatcttcaaaactcggtcatactagtttttgcaaacaaacaggatctgaaagacgcaatgactcctgctgagatcacggatgcacttaaccttcacagtatcaagaaccatgattggcatattcaagcaagttgtgcggttactggagaaggattgtatgatgggctcggttggattgcccaaaaagttaccggtaaagccacgagttaaggggaaaccagaactgaatcagagagagtacgtactattcttctttgtttcttttgtctccttcatatgttctttaacattgtatcctcttgacttttatgtaacaagcttcaactattttggttgctctcattgaaactgtgtccagaattttcatatatgg

SEQ ID NO: 35596 - protein, 183 aa, Arabidopsis thaliana
  peptide (1)..(183): Ceres Seq. ID no. 12332276
  misc_feature (4)..(177): Pfam Name: ADP-ribosylation factor family Pfam Description: ADP-ribosylation factor family
  misc_feature (1)..(180): Homolog of NCBI NO: 34909214 NR Description: putative ADP-ribosylation factor
  misc_feature (1)..(181): Homolog of NCBI NO: 34903082 NR Description: unnamed protein product [Oryza sativa (japonica
  misc_feature (1)..(177): Homolog of NCBI NO: 6320009 NR Description: implicated in signal transduction and
  misc_feature (1)..(181): Homolog of NCBI NO: 6320064 NR Description: ADP-ribosylation factor 2; Arf2p [Saccharomyces
  misc_feature (1)..(180): Homolog of NCBI NO: 7025460 NR Description: ADP ribosylation factor 1 [Toxoplasma gondii]
  misc_feature (1)..(177): Homolog of NCBI NO: 33695144 NR Description: RIKEN cDNA 2810410P22 [Mus musculus]
  misc_feature (1)..(177): Homolog of NCBI NO: 16758876 NR Description: ADP-ribosylation factor-like 5 [Rattus
  misc_feature (1)..(177): Homolog of NCBI NO: 6912244 NR Description: ADP-ribosylation factor-like 5 isoform 1 [Homo
  misc_feature (1)..(180): Homolog of NCBI NO: 24660781 NR Description: CG7197-PA [Drosophila melanogaster]
  misc_feature (1)..(183): Homolog of NCBI NO: 15228912 NR Description: ADP-ribosylation factor, putative
MGAFMSRFWFMMFPAKEYKIVVVGLDNAGKTTTLYKLHLGEVVTTHPTVGSNVEELVYKNIRFEVWDLGGQDRLRTSWATYYRGTHAVIVVIDSTDRARISFMKDELARLLGHEDLQNSVILVFANKQDLKDAMTPAEITDALNLHSIKNHDWHIQASCAVTGEGLYDGLGWIAQKVTGKATS

SEQ ID NO: 35597 - protein, 179 aa, Arabidopsis thaliana
  peptide (1)..(179): Ceres Seq. ID no. 12332277
  misc_feature (1)..(173): Pfam Name: ADP-ribosylation factor family Pfam Description: ADP-ribosylation factor family
  misc_feature (1)..(176): Homolog of NCBI NO: 34909214 NR Description: putative ADP-ribosylation factor
  misc_feature (1)..(177): Homolog of NCBI NO: 34903082 NR Description: unnamed protein product [Oryza sativa (japonica
  misc_feature (1)..(173): Homolog of NCBI NO: 6320009 NR Description: implicated in signal transduction and
  misc_feature (1)..(177): Homolog of NCBI NO: 6320064 NR Description: ADP-ribosylation factor 2; Arf2p [Saccharomyces
  misc_feature (1)..(176): Homolog of NCBI NO: 7025460 NR Description: ADP ribosylation factor 1 [Toxoplasma gondii]
  misc_feature (1)..(173): Homolog of NCBI NO: 33695144 NR Description: RIKEN cDNA 2810410P22 [Mus musculus]
  misc_feature (1)..(173): Homolog of NCBI NO: 16758876 NR Description: ADP-ribosylation factor-like 5 [Rattus
  misc_feature (1)..(173): Homolog of NCBI NO: 6912244 NR Description: ADP-ribosylation factor-like 5 isoform 1 [Homo
  misc_feature (1)..(176): Homolog of NCBI NO: 24660781 NR Description: CG7197-PA [Drosophila melanogaster]
  misc_feature (1)..(179): Homolog of NCBI NO: 15228912 NR Description: ADP-ribosylation factor, putative
MSRFWFMMFPAKEYKIVVVGLDNAGKTTTLYKLHLGEVVTTHPTVGSNVEELVYKNIRFEVWDLGGQDRLRTSWATYYRGTHAVIVVIDSTDRARISFMKDELARLLGHEDLQNSVILVFANKQDLKDAMTPAEITDALNLHSIKNHDWHIQASCAVTGEGLYDGLGWIAQKVTGKATS

SEQ ID NO: 35598 - protein, 173 aa, Arabidopsis thaliana
  peptide (1)..(173): Ceres Seq. ID no. 12332278
  misc_feature (1)..(167): Pfam Name: ADP-ribosylation factor family Pfam Description: ADP-ribosylation factor family
  misc_feature (1)..(170): Homolog of NCBI NO: 34909214 NR Description: putative ADP-ribosylation factor
  misc_feature (1)..(171): Homolog of NCBI NO: 34903082 NR Description: unnamed protein product [Oryza sativa (japonica
  misc_feature (1)..(167): Homolog of NCBI NO: 6320009 NR Description: implicated in signal transduction and
  misc_feature (1)..(171): Homolog of NCBI NO: 6320064 NR Description: ADP-ribosylation factor 2; Arf2p [Saccharomyces
  misc_feature (1)..(170): Homolog of NCBI NO: 7025460 NR Description: ADP ribosylation factor 1 [Toxoplasma gondii]
  misc_feature (1)..(167): Homolog of NCBI NO: 33695144 NR Description: RIKEN cDNA 2810410P22 [Mus musculus]
  misc_feature (1)..(167): Homolog of NCBI NO: 16758876 NR Description: ADP-ribosylation factor-like 5 [Rattus
  misc_feature (1)..(167): Homolog of NCBI NO: 6912244 NR Description: ADP-ribosylation factor-like 5 isoform 1 [Homo
  misc_feature (1)..(170): Homolog of NCBI NO: 24660781 NR Description: CG7197-PA [Drosophila melanogaster]
  misc_feature (1)..(173): Homolog of NCBI NO: 15228912 NR Description: ADP-ribosylation factor, putative
MMFPAKEYKIVVVGLDNAGKTTTLYKLHLGEVVTTHPTVGSNVEELVYKNIRFEVWDLGGQDRLRTSWATYYRGTHAVIVVIDSTDRARISFMKDELARLLGHEDLQNSVILVFANKQDLKDAMTPAEITDALNLHSIKNHDWHIQASCAVTGEGLYDGLGWIAQKVTGKATS

SEQ ID NO: 35599 - DNA, 831 bp, Arabidopsis thaliana
  misc_feature (1)..(831): Ceres Seq. ID no. 12562523
  misc_feature: MA Experiment ID: 108434 Result: Up-regulated in Transcription
  misc_feature: MA Experiment 108434 PARAMETER Experiment Name: At_Root_Tips_cDNA_P Parameter: Tissue Value: Root Tips
  misc_feature: MA Experiment ID: 108462 Result: Down-regulated in Transcription
  misc_feature: MA Experiment 108462 PARAMETER Experiment Name: At_Germinating_Seeds_cDNA_P Parameter: Age (day) Value: 2 vs. 0
  misc_feature: MA Experiment 108462 PARAMETER Experiment Name: At_Germinating_Seeds_cDNA_P Parameter: Tissue Value: Germinating Seeds
  misc_feature: MA Experiment ID: 108463 Result: Down-regulated in Transcription
  misc_feature: MA Experiment 108463 PARAMETER Experiment Name: At_Germinating_Seeds_cDNA_P Parameter: Age (day) Value: 3 vs. 0
  misc_feature: MA Experiment 108463 PARAMETER Experiment Name: At_Germinating_Seeds_cDNA_P Parameter: Tissue Value: Germinating Seeds
  misc_feature: MA Experiment ID: 108464 Result: Down-regulated in Transcription
  misc_feature: MA Experiment 108464 PARAMETER Experiment Name: At_Germinating_Seeds_cDNA_P Parameter: Age (day) Value: 4 vs. 0
  misc_feature: MA Experiment 108464 PARAMETER Experiment Name: At_Germinating_Seeds_cDNA_P Parameter: Tissue Value: Germinating Seeds
  misc_feature: MA Experiment ID: 20000113 Result: Up-regulated in Transcription
  misc_feature: MA Experiment 20000113 PARAMETER Experiment Name: At_42deg_Heat_cDNA_P Parameter: Temperature (deg C) Value: 42 vs. 22
  misc_feature: MA Experiment 20000113 PARAMETER Experiment Name: At_42deg_Heat_cDNA_P Parameter: Timepoint (hr) Value: 8
  misc_feature: MA Experiment 20000113 PARAMETER Experiment Name: At_42deg_Heat_cDNA_P Parameter: Tissue Value: Aerial
  misc_feature: MA Experiment ID: 20000224 Result: Down-regulated in Transcription
  misc_feature: MA Experiment ID: 20000794 Result: Down-regulated in Transcription
  misc_feature: MA Experiment 20000794 PARAMETER Experiment Name: At_Petals_P Parameter: Age (day) Value: 23-25 days
  misc_feature: MA Experiment 20000794 PARAMETER Experiment Name: At_Petals_P Parameter: Plant Line Value: WS
  misc_feature: MA Experiment 20000794 PARAMETER Experiment Name: At_Petals_P Parameter: Tissue Value: Petals vs. Whole plant
  misc_feature: MA Experiment ID: 20001556 Result: Up-regulated in Transcription
  misc_feature: MA Experiment 20001556 PARAMETER Experiment Name: At_Drought_Soil_Dry_P Parameter: Age (day) Value: 26
  misc_feature: MA Experiment 20001556 PARAMETER Experiment Name: At_Drought_Soil_Dry_P Parameter: Organism Value: A. thaliana
  misc_feature: MA Experiment 20001556 PARAMETER Experiment Name: At_Drought_Soil_Dry_P Parameter: Plant Line Value: WS
  misc_feature: MA Experiment 20001556 PARAMETER Experiment Name: At_Drought_Soil_Dry_P Parameter: Post Timepoint (hr) Value: None
  misc_feature: MA Experiment 20001556 PARAMETER Experiment Name: At_Drought_Soil_Dry_P Parameter: Post-Treatment Value: None
  misc_feature: MA Experiment 20001556 PARAMETER Experiment Name: At_Drought_Soil_Dry_P Parameter: Timepoint (day) Value: 12
  misc_feature: MA Experiment 20001556 PARAMETER Experiment Name: At_Drought_Soil_Dry_P Parameter: Treatment Value: Drought vs. No Drought
  misc_feature: MA Experiment ID: 20001559 Result: Up-regulated in Transcription
  misc_feature: MA Experiment 20001559 PARAMETER Experiment Name: At_Drought_Soil_Dry_P Parameter: Age (day) Value: 28
  misc_feature: MA Experiment 20001559 PARAMETER Experiment Name: At_Drought_Soil_Dry_P Parameter: Organism Value: A. thaliana
  misc_feature: MA Experiment 20001559 PARAMETER Experiment Name: At_Drought_Soil_Dry_P Parameter: Plant Line Value: WS
  misc_feature: MA Experiment 20001559 PARAMETER Experiment Name: At_Drought_Soil_Dry_P Parameter: Post Timepoint (hr) Value: 29
  misc_feature: MA Experiment 20001559 PARAMETER Experiment Name: At_Drought_Soil_Dry_P Parameter: Post-Treatment Value: Re-Water vs. No Drought
  misc_feature: MA Experiment 20001559 PARAMETER Experiment Name: At_Drought_Soil_Dry_P Parameter: Timepoint (day) Value: 14
  misc_feature: MA Experiment 20001559 PARAMETER Experiment Name: At_Drought_Soil_Dry_P Parameter: Treatment Value: Drought vs. No Drought
ctccgtaaacctgttattctcggagaaacgttgagagagggttttccattctctgtggccgtcaccgtcgccgtgaaatagctctcctctctctatctccgattatataactgcaagctcaaaggaattgtttgttgttaaaatgtttcttacgcgatttgtcgggaggagattcttggcggctgcatcggcgcgatcggagtccactacagcagcagcagctgcctcgacgattcggacgccaacaaatccactcgaagagttctttgagttcgacagaagccaagacgaagataaacctgttgtctatggtcgaggttggaaagcttcagagctgcgtctcaagtcatgggatgatcttcagaagctgtggtacgttcttctcaaagagaaaaacatgttgatgactcagcgtcagatgcttcaggctcagaacatgcagtttcctaaccctgaacgcattccaaaggtgaggagatcaatgtgccgcattaagcatgtgctgaccgagagagcgattgaagaaccagattctagaagatcagccgagatgaagagaatggtaaatggtatgtgatcccattggctcttgttttggcaacctagcagtaagcacgagtcaatccgcagaggtgttgagtttttcggagtaagaaataacgcatagctttcaagactttggaactggtccaatgattgtgactgtagtagtgtcggcagtagaaaaacgtttggttggtatctgtacgcacatttctgtaacttatggttgatgtttctttttgagacacatgttggtcagtgttgattcagagctttgtctttctctcc

SEQ ID NO: 35600 - protein, 144 aa, Arabidopsis thaliana
  peptide (1)..(144): Ceres Seq. ID no. 12562524
  misc_feature (1)..(124): Homolog of NCBI NO: 17505324 NR Description: Putative mitochondrial protein of eukaryotic
  misc_feature (38)..(124): Homolog of NCBI NO: 34856796 NR Description: similar to mitochondrial ribosomal protein L47
  misc_feature (13)..(124): Homolog of NCBI NO: 21618497 NR Description: Similar to mitochondrial ribosomal protein L47
  misc_feature (38)..(124): Homolog of NCBI NO: 23273006 NR Description: Unknown (protein for IMAGE:4489172) [Mus musculus]
  misc_feature (38)..(124): Homolog of NCBI NO: 20865861 NR Description: similar to CGI-204 [Mus musculus]
  misc_feature (38)..(124): Homolog of NCBI NO: 20810578 NR Description: Similar to mitochondrial ribosomal protein L47
  misc_feature (12)..(139): Homolog of NCBI NO: 39595870 NR Description: Hypothetical protein CBG12849 [Caenorhabditis
  misc_feature (1)..(57): Homolog of NCBI NO: 25407010 NR Description: hypothetical protein [imported] - Arabidopsis
  misc_feature (58)..(142): Homolog of NCBI NO: 25407010 NR Description: hypothetical protein [imported] - Arabidopsis
  misc_feature (1)..(144): Homolog of NCBI NO: 15223019 NR Description: mitochondrial ribosomal protein, putative
MFLTRFVGRRFLAAASARSESTTAAAAASTIRTPTNPLEEFFEFDRSQDEDKPVVYGRGWKASELRLKSWDDLQKLWYVLLKEKNMLMTQRQMLQAQNMQFPNPERIPKVRRSMCRIKHVLTERAIEEPDSRRSAEMKRMVNGM

SEQ ID NO: 35601 - DNA, 1359 bp, Arabidopsis thaliana
  misc_feature (1)..(1359): Ceres Seq. ID no. 12602450
  misc_feature: MA Experiment ID: 108461 Result: Up-regulated in Transcription
  misc_feature: MA Experiment 108461 PARAMETER Experiment Name: At_Germinating_Seeds_cDNA_P Parameter: Age (day) Value: 1 vs. 0
  misc_feature: MA Experiment 108461 PARAMETER Experiment Name: At_Germinating_Seeds_cDNA_P Parameter: Tissue Value: Germinating Seeds
  misc_feature: MA Experiment ID: 108462 Result: Up-regulated in Transcription
  misc_feature: MA Experiment 108462 PARAMETER Experiment Name: At_Germinating_Seeds_cDNA_P Parameter: Age (day) Value: 2 vs. 0
  misc_feature: MA Experiment 108462 PARAMETER Experiment Name: At_Germinating_Seeds_cDNA_P Parameter: Tissue Value: Germinating Seeds
  misc_feature: MA Experiment ID: 108463 Result: Up-regulated in Transcription
  misc_feature: MA Experiment 108463 PARAMETER Experiment Name: At_Germinating_Seeds_cDNA_P Parameter: Age (day) Value: 3 vs. 0
  misc_feature: MA Experiment 108463 PARAMETER Experiment Name: At_Germinating_Seeds_cDNA_P Parameter: Tissue Value: Germinating Seeds
  misc_feature: MA Experiment ID: 108464 Result: Up-regulated in Transcription
  misc_feature: MA Experiment 108464 PARAMETER Experiment Name: At_Germinating_Seeds_cDNA_P Parameter: Age (day) Value: 4 vs. 0
  misc_feature: MA Experiment 108464 PARAMETER Experiment Name: At_Germinating_Seeds_cDNA_P Parameter: Tissue Value: Germinating Seeds
  misc_feature: MA Experiment ID: 108572 Result: Up-regulated in Transcription
  misc_feature: MA Experiment 108572 PARAMETER Experiment Name: At_Drought_cDNA_P Parameter: Timepoint (hr) Value: 1
  misc_feature: MA Experiment 108572 PARAMETER Experiment Name: At_Drought_cDNA_P Parameter: Tissue Value: Aerial
  misc_feature: MA Experiment 108572 PARAMETER Experiment Name: At_Drought_cDNA_P Parameter: Treatment Value: Drought vs. No Drought
  misc_feature: MA Experiment ID: 108573 Result: Up-regulated in Transcription
  misc_feature: MA Experiment 108573 PARAMETER Experiment Name: At_Drought_cDNA_P Parameter: Timepoint (hr) Value: 6
  misc_feature: MA Experiment 108573 PARAMETER Experiment Name: At_Drought_cDNA_P Parameter: Tissue Value: Aerial
  misc_feature: MA Experiment 108573 PARAMETER Experiment Name: At_Drought_cDNA_P Parameter: Treatment Value: Drought vs. No Drought
  misc_feature: MA Experiment ID: 108576 Result: Down-regulated in Transcription
  misc_feature: MA Experiment 108576 PARAMETER Experiment Name: At_42deg_Heat_cDNA_P Parameter: Temperature (deg C) Value: 42 vs. 22
  misc_feature: MA Experiment 108576 PARAMETER Experiment Name: At_42deg_Heat_cDNA_P Parameter: Timepoint (hr) Value: 1
  misc_feature: MA Experiment 108576 PARAMETER Experiment Name: At_42deg_Heat_cDNA_P Parameter: Tissue Value: Aerial
  misc_feature: MA Experiment ID: 108577 Result: Down-regulated in Transcription
  misc_feature: MA Experiment 108577 PARAMETER Experiment Name: At_42deg_Heat_cDNA_P Parameter: Temperature (deg C) Value: 42 vs. 22
  misc_feature: MA Experiment 108577 PARAMETER Experiment Name: At_42deg_Heat_cDNA_P Parameter: Timepoint (hr) Value: 6
  misc_feature: MA Experiment 108577 PARAMETER Experiment Name: At_42deg_Heat_cDNA_P Parameter: Tissue Value: Aerial
  misc_feature: MA Experiment ID: 108595 Result: Down-regulated in Transcription
  misc_feature: MA Experiment 108595 PARAMETER Experiment Name: At_Ler-pi_Ovule_cDNA_P Parameter: Plant Line Value: null
  misc_feature: MA Experiment ID: 108668 Result: Down-regulated in Transcription
  misc_feature: MA Experiment 108668 PARAMETER Experiment Name: At_2mM_SA_cDNA_P Parameter: Plant Line Value: WS
  misc_feature: MA Experiment 108668 PARAMETER Experiment Name: At_2mM_SA_cDNA_P Parameter: Timepoint (hr) Value: 6
  misc_feature: MA Experiment 108668 PARAMETER Experiment Name: At_2mM_SA_cDNA_P Parameter: Treatment Value: 2mM SA vs. No Treatment
  misc_feature: MA Experiment ID: 20000089 Result: Down-regulated in Transcription
  misc_feature: MA Experiment ID: 20000090 Result: Down-regulated in Transcription
  misc_feature: MA Experiment ID: 20000113 Result: Down-regulated in Transcription
  misc_feature: MA Experiment 20000113 PARAMETER Experiment Name: At_42deg_Heat_cDNA_P Parameter: Temperature (deg C) Value: 42 vs. 22
  misc_feature: MA Experiment 20000113 PARAMETER Experiment Name: At_42deg_Heat_cDNA_P Parameter: Timepoint (hr) Value: 8
  misc_feature: MA Experiment 20000113 PARAMETER Experiment Name: At_42deg_Heat_cDNA_P Parameter: Tissue Value: Aerial
  misc_feature: MA Experiment ID: 20000180 Result: Up-regulated in Transcription
  misc_feature: MA Experiment 20000180 PARAMETER Experiment Name: At_Germinating_Seeds_P Parameter: Age (hr) Value: 24 vs. 0
  misc_feature: MA Experiment 20000180 PARAMETER Experiment Name: At_Germinating_Seeds_P Parameter: Tissue Value: Germinating Seeds
  misc_feature: MA Experiment ID: 20000182 Result: Down-regulated in Transcription
  misc_feature: MA Experiment 20000182 PARAMETER Experiment Name: At_2mM_SA_P Parameter: Age (day) Value: 14
  misc_feature: MA Experiment 20000182 PARAMETER Experiment Name: At_2mM_SA_P Parameter: Organism Value: A. thaliana
  misc_feature: MA Experiment 20000182 PARAMETER Experiment Name: At_2mM_SA_P Parameter: Plant Line Value: WS
  misc_feature: MA Experiment 20000182 PARAMETER Experiment Name: At_2mM_SA_P Parameter: Timepoint (hr) Value: 6
  misc_feature: MA Experiment 20000182 PARAMETER Experiment Name: At_2mM_SA_P Parameter: Tissue Value: Aerial
  misc_feature: MA Experiment 20000182 PARAMETER Experiment Name: At_2mM_SA_P Parameter: Treatment Value: 2mM SA vs. No Treatment
  misc_feature: MA Experiment ID: 20000185 Result: Down-regulated in Transcription
  misc_feature: MA Experiment 20000185 PARAMETER Experiment Name: At_Roots__P Parameter: Age (day) Value: 7 vs. 21
  misc_feature: MA Experiment 20000185 PARAMETER Experiment Name: At_Roots__P Parameter: Organism Value: A. thaliana
  misc_feature: MA Experiment 20000185 PARAMETER Experiment Name: At_Roots__P Parameter: Tissue Value: Roots vs. Whole Plant
  misc_feature: MA Experiment ID: 20000437 Result: Down-regulated in Transcription
  misc_feature: MA Experiment 20000437 PARAMETER Experiment Name: At_Drought_P Parameter: Age (day) Value: 8
  misc_feature: MA Experiment 20000437 PARAMETER Experiment Name: At_Drought_P Parameter: Organism Value: A. thaliana
  misc_feature: MA Experiment 20000437 PARAMETER Experiment Name: At_Drought_P Parameter: Plant Line Value: WS
  misc_feature: MA Experiment 20000437 PARAMETER Experiment Name: At_Drought_P Parameter: Timepoint (hr) Value: 24
  misc_feature: MA Experiment 20000437 PARAMETER Experiment Name: At_Drought_P Parameter: Tissue Value: Whole Plant
  misc_feature: MA Experiment 20000437 PARAMETER Experiment Name: At_Drought_P Parameter: Treatment Value: Drought vs. No Drought
  misc_feature: MA Experiment ID: 20000438 Result: Up-regulated in Transcription
  misc_feature: MA Experiment 20000438 PARAMETER Experiment Name: At_Shoots__P Parameter: Age (day) Value: 14
  misc_feature: MA Experiment 20000438 PARAMETER Experiment Name: At_Shoots__P Parameter: Tissue Value: Shoots vs. Whole Plant
  misc_feature: MA Experiment ID: 20000439 Result: Down-regulated in Transcription
  misc_feature: MA Experiment 20000439 PARAMETER Experiment Name: At_Roots__P Parameter: Age (day) Value: 14 vs. 21
  misc_feature: MA Experiment 20000439 PARAMETER Experiment Name: At_Roots__P Parameter: Organism Value: A. thaliana
  misc_feature: MA Experiment 20000439 PARAMETER Experiment Name: At_Roots__P Parameter: Tissue Value: Roots vs. Whole Plant
gtattcctcgtgagcactaacttctcactcattcttcttcttcagctgaatccaaatacccatttccatttttaaccgtggttggattgttttgagagttgaaggaagaagatgacgtctgacggagcaacgtcgacgtcagctgcagctgcagcagcagcgatggcgacgaggaggaaaccgtcgtggagagagagggagaacaatcggagaagagagcggcggagaagagctgttgcggcgaagatttatactggtcttagagctcaaggtaactacaatcttccaaaacattgtgacaacaatgaggttcttaaggctctttgttctgaagctggttgggttgttgaagaagacggaactacttatcgcaagggacacaagcctctacctggtgacatggctggatcatcttctcgagcaactccttactcttcccataaccaaagtcctctttcttccacttttgatagccccatcttatcttaccaagtcagtccttcctcttcttcattcccgagtccttctcgagttggtgatccacacaatatctccacaatcttccctttcctcaggaatggtggtattccttcatcgcttcctccacttagaatctcaaacagtgctcctgtcactccaccagtgtcatccccaacttctagaaactccaaaccattgcctacttgggaatcttttaccaaacaatccatgtccatggctgctaaacagtcaatgacttctttgaactacccgttttatgcggtgtctgcacctgccagtcctactcatcatcgccagttccatgctccggctactatacctgaatgtgatgagtctgactcttccactgttgattctggtcattggataagctttcaaaagtttgcacaacaacagccattctctgcctctatggtgccaacctcgcctaccttcaatctcgtgaaacctgcaccacagcaattgtctccaaacacagcagcaatccaagagattggtcaaagctccgagtttaagtttgagaacagccaagttaagccatgggaaggggagaggatccatgatgtggctatggaggatctagagctcacgcttggaaatggtaaagctcatagttgagatgaagtatacatgaacctgttatgtcatgtcggaaggaaggattggagaatgagaattagtgtgttgttcattcagttcatggttttggttcttgttctagaatcgatattcattgtaccagtgagtttgtttcacaacgcattatttgtagatagaatgtttaagatgtatgtttctattatcattccttttaggtcttgaaaacattacaaatatattacatgattaagtggcttc

SEQ ID NO: 35602 - protein, 335 aa, Arabidopsis thaliana
  peptide (1)..(335): Ceres Seq. ID no. 12602451
  misc_feature (200)..(335): Homolog of NCBI NO: 13937167 NR Description: At1g19350/F18O14_4 [Arabidopsis thaliana]
  misc_feature (9)..(273): Homolog of NCBI NO: 33146833 NR Description: putative mature anther-specific protein LAT61
  misc_feature (21)..(280): Homolog of NCBI NO: 14626761 NR Description: mature anther-specific protein LAT61
  misc_feature (22)..(333): Homolog of NCBI NO: 15215731 NR Description: AT4g36780/C7A10_580 [Arabidopsis thaliana]
  misc_feature (1)..(333): Homolog of NCBI NO: 25352558 NR Description: unknown protein F9E10.7 [imported] - Arabidopsis
  misc_feature (1)..(333): Homolog of NCBI NO: 18086461 NR Description: At1g75080/F9E10_7 [Arabidopsis thaliana]
  misc_feature (1)..(333): Homolog of NCBI NO: 18410764 NR Description: expressed protein
  misc_feature (1)..(335): Homolog of NCBI NO: 6651069 NR Description: 107 protein [Arabidopsis thaliana]
  misc_feature (1)..(335): Homolog of NCBI NO: 18394728 NR Description: expressed protein
  misc_feature (1)..(335): Homolog of NCBI NO: 21592457 NR Description: unknown [Arabidopsis thaliana]
MTSDGATSTSAAAAAAAMATRRKPSWRERENNRRRERRRRAVAAKIYTGLRAQGNYNLPKHCDNNEVLKALCSEAGWVVEEDGTTYRKGHKPLPGDMAGSSSRATPYSSHNQSPLSSTFDSPILSYQVSPSSSSFPSPSRVGDPHNISTIFPFLRNGGIPSSLPPLRISNSAPVTPPVSSPTSRNSKPLPTWESFTKQSMSMAAKQSMTSLNYPFYAVSAPASPTHHRQFHAPATIPECDESDSSTVDSGHWISFQKFAQQQPFSASMVPTSPTFNLVKPAPQQLSPNTAAIQEIGQSSEFKFENSQVKPWEGERIHDVAMEDLELTLGNGKAHS

SEQ ID NO: 35603 - protein, 318 aa, Arabidopsis thaliana
  peptide (1)..(318): Ceres Seq. ID no. 12602452
  misc_feature (183)..(318): Homolog of NCBI NO: 13937167 NR Description: At1g19350/F18O14_4 [Arabidopsis thaliana]
  misc_feature (1)..(256): Homolog of NCBI NO: 33146833 NR Description: putative mature anther-specific protein LAT61
  misc_feature (4)..(263): Homolog of NCBI NO: 14626761 NR Description: mature anther-specific protein LAT61
  misc_feature (5)..(316): Homolog of NCBI NO: 15215731 NR Description: AT4g36780/C7A10_580 [Arabidopsis thaliana]
  misc_feature (1)..(316): Homolog of NCBI NO: 25352558 NR Description: unknown protein F9E10.7 [imported] - Arabidopsis
  misc_feature (1)..(316): Homolog of NCBI NO: 18086461 NR Description: At1g75080/F9E10_7 [Arabidopsis thaliana]
  misc_feature (1)..(316): Homolog of NCBI NO: 18410764 NR Description: expressed protein
  misc_feature (1)..(318): Homolog of NCBI NO: 6651069 NR Description: 107 protein [Arabidopsis thaliana]
  misc_feature (1)..(318): Homolog of NCBI NO: 18394728 NR Description: expressed protein
  misc_feature (1)..(318): Homolog of NCBI NO: 21592457 NR Description: unknown [Arabidopsis thaliana]
MATRRKPSWRERENNRRRERRRRAVAAKIYTGLRAQGNYNLPKHCDNNEVLKALCSEAGWVVEEDGTTYRKGHKPLPGDMAGSSSRATPYSSHNQSPLSSTFDSPILSYQVSPSSSSFPSPSRVGDPHNISTIFPFLRNGGIPSSLPPLRISNSAPVTPPVSSPTSRNSKPLPTWESFTKQSMSMAAKQSMTSLNYPFYAVSAPASPTHHRQFHAPATIPECDESDSSTVDSGHWISFQKFAQQQPFSASMVPTSPTFNLVKPAPQQLSPNTAAIQEIGQSSEFKFENSQVKPWEGERIHDVAMEDLELTLGNGKAHS

SEQ ID NO: 35604 - protein, 239 aa, Arabidopsis thaliana
  peptide (1)..(239): Ceres Seq. ID no. 12602453
  misc_feature (104)..(239): Homolog of NCBI NO: 13937167 NR Description: At1g19350/F18O14_4 [Arabidopsis thaliana]
  misc_feature (1)..(177): Homolog of NCBI NO: 33146833 NR Description: putative mature anther-specific protein LAT61
  misc_feature (1)..(184): Homolog of NCBI NO: 14626761 NR Description: mature anther-specific protein LAT61
  misc_feature (1)..(237): Homolog of NCBI NO: 15215731 NR Description: AT4g36780/C7A10_580 [Arabidopsis thaliana]
  misc_feature (1)..(237): Homolog of NCBI NO: 25352558 NR Description: unknown protein F9E10.7 [imported] - Arabidopsis
  misc_feature (1)..(237): Homolog of NCBI NO: 18086461 NR Description: At1g75080/F9E10_7 [Arabidopsis thaliana]
  misc_feature (1)..(237): Homolog of NCBI NO: 18410764 NR Description: expressed protein
  misc_feature (1)..(239): Homolog of NCBI NO: 6651069 NR Description: 107 protein [Arabidopsis thaliana]
  misc_feature (1)..(239): Homolog of NCBI NO: 18394728 NR Description: expressed protein
  misc_feature (1)..(239): Homolog of NCBI NO: 21592457 NR Description: unknown [Arabidopsis thaliana]
MAGSSSRATPYSSHNQSPLSSTFDSPILSYQVSPSSSSFPSPSRVGDPHNISTIFPFLRNGGIPSSLPPLRISNSAPVTPPVSSPTSRNSKPLPTWESFTKQSMSMAAKQSMTSLNYPFYAVSAPASPTHHRQFHAPATIPECDESDSSTVDSGHWISFQKFAQQQPFSASMVPTSPTFNLVKPAPQQLSPNTAAIQEIGQSSEFKFENSQVKPWEGERIHDVAMEDLELTLGNGKAHS

SEQ ID NO: 35605 - DNA, 984 bp, Arabidopsis thaliana
  misc_feature (1)..(984): Ceres Seq. ID no. 12370505
  misc_feature: MA Experiment ID: 108462 Result: Down-regulated in Transcription
  misc_feature: MA Experiment 108462 PARAMETER Experiment Name: At_Germinating_Seeds_cDNA_P Parameter: Age (day) Value: 2 vs. 0
  misc_feature: MA Experiment 108462 PARAMETER Experiment Name: At_Germinating_Seeds_cDNA_P Parameter: Tissue Value: Germinating Seeds
  misc_feature: MA Experiment ID: 108463 Result: Down-regulated in Transcription
  misc_feature: MA Experiment 108463 PARAMETER Experiment Name: At_Germinating_Seeds_cDNA_P Parameter: Age (day) Value: 3 vs. 0
  misc_feature: MA Experiment 108463 PARAMETER Experiment Name: At_Germinating_Seeds_cDNA_P Parameter: Tissue Value: Germinating Seeds
  misc_feature: MA Experiment ID: 108668 Result: Up-regulated in Transcription
  misc_feature: MA Experiment 108668 PARAMETER Experiment Name: At_2mM_SA_cDNA_P Parameter: Plant Line Value: WS
  misc_feature: MA Experiment 108668 PARAMETER Experiment Name: At_2mM_SA_cDNA_P Parameter: Timepoint (hr) Value: 6
  misc_feature: MA Experiment 108668 PARAMETER Experiment Name: At_2mM_SA_cDNA_P Parameter: Treatment Value: 2mM SA vs. No Treatment
  misc_feature: MA Experiment ID: 20000090 Result: Up-regulated in Transcription
  misc_feature: MA Experiment ID: 20000173 Result: Down-regulated in Transcription
  misc_feature: MA Experiment 20000173 PARAMETER Experiment Name: At_42deg_Heat_P Parameter: Age (day) Value: 14
  misc_feature: MA Experiment 20000173 PARAMETER Experiment Name: At_42deg_Heat_P Parameter: Organism Value: A. thaliana
  misc_feature: MA Experiment 20000173 PARAMETER Experiment Name: At_42deg_Heat_P Parameter: Plant Line Value: WS
  misc_feature: MA Experiment 20000173 PARAMETER Experiment Name: At_42deg_Heat_P Parameter: Temperature (deg C) Value: 42 vs. 22
  misc_feature: MA Experiment 20000173 PARAMETER Experiment Name: At_42deg_Heat_P Parameter: Timepoint (hr) Value: 6
  misc_feature: MA Experiment 20000173 PARAMETER Experiment Name: At_42deg_Heat_P Parameter: Tissue Value: Aerial
  misc_feature: MA Experiment ID: 20000182 Result: Up-regulated in Transcription
  misc_feature: MA Experiment 20000182 PARAMETER Experiment Name: At_2mM_SA_P Parameter: Age (day) Value: 14
  misc_feature: MA Experiment 20000182 PARAMETER Experiment Name: At_2mM_SA_P Parameter: Organism Value: A. thaliana
  misc_feature: MA Experiment 20000182 PARAMETER Experiment Name: At_2mM_SA_P Parameter: Plant Line Value: WS
  misc_feature: MA Experiment 20000182 PARAMETER Experiment Name: At_2mM_SA_P Parameter: Timepoint (hr) Value: 6
  misc_feature: MA Experiment 20000182 PARAMETER Experiment Name: At_2mM_SA_P Parameter: Tissue Value: Aerial
  misc_feature: MA Experiment 20000182 PARAMETER Experiment Name: At_2mM_SA_P Parameter: Treatment Value: 2mM SA vs. No Treatment
  misc_feature: MA Experiment ID: 20000184 Result: Down-regulated in Transcription
  misc_feature: MA Experiment 20000184 PARAMETER Experiment Name: At_Shoots__P Parameter: Age (day) Value: 7
  misc_feature: MA Experiment 20000184 PARAMETER Experiment Name: At_Shoots__P Parameter: Tissue Value: Shoots vs. Whole Plant
  misc_feature: MA Experiment ID: 20000224 Result: Up-regulated in Transcription
agagctcaagagaagtaaagaaactgcgacaagagaaagaagattgactttggagaagagaggagtaacgatggaagatattcataatctcgatatagagaaaagtgatagatcgatttggttgatgaagtgtcctgtagttgtagacaaggcatggcacaagatagcagcttcgtcgtcttcttcttttgcttcctcggattctcctcccgacatggcaaagattgttcgcgaagttgatcctctacgggacgattctccccccgagttcaaaatgtatatggttggtgctgagtatgggaacatgccaaagtgctacgctttgaacatgttcacagactttgttccgatggggggcttttccgatgttaatcaaggttgtgcagctgctgaaggaaaggttgatcacaaattcgatatgaagccatatggtgaaaccattgaagaatatgctaggctttgtcgtgagagaacgagcaaagccatggttaaaaatcgacagattcaggttattgataatgaccgcggagttcatatgaggcccatgcctggaatgcttggtttagtttcctccaattccaaggaaaagaggaaacctcccccagtcaagcaaaccgaggtgaagaggacgaggagagatcgtggtgagcttgaagctataatgttcaagctatttgaaggccagcctaactggacattgaagcagcttgtacaagagacggaccagccagctcagttcctgaaagaaatactaaacgagctgtgcgtgtacaataagagaggatcgaaccaagggacatatgagcttaaacctgaatacaagaaatctgctgaagatgatacaggtgggcagtgaaatcaaccccttgtgtaattcactattatatacatgtgacatagtcataacattattataaaccctgagtcattattcatcagaagaaaaaaacaaaaaaaaaaaaaaaaaaaaaaaaaaaaaaacaa

SEQ ID NO: 35606 - protein, 284 aa, Arabidopsis thaliana
  peptide (1)..(284): Ceres Seq. ID no. 12370506
  misc_feature (27)..(283): Pfam Name: Transcription initiation factor IIF, beta subunit Pfam Description: Transcription initiation factor IIF, beta
  misc_feature (131)..(280): Homolog of NCBI NO: 31199641 NR Description: ENSANGP00000015059 [Anopheles gambiae]
  misc_feature (128)..(275): Homolog of NCBI NO: 19073998 NR Description: TRANSCRIPTION INITIATION FACTOR TFIIF BETA
  misc_feature (29)..(280): Homolog of NCBI NO: 38174399 NR Description: Unknown (protein for MGC:75790) [Silurana
  misc_feature (29)..(274): Homolog of NCBI NO: 24645751 NR Description: Transcription factor TFIIFbeta CG6538-PA
  misc_feature (25)..(274): Homolog of NCBI NO: 19111874 NR Description: transcription initiation factor iif, beta subunit
  misc_feature (89)..(122): Homolog of NCBI NO: 11285686 NR Description: hypothetical protein T25B15.40 - Arabidopsis
  misc_feature (126)..(279): Homolog of NCBI NO: 11285686 NR Description: hypothetical protein T25B15.40 - Arabidopsis
  misc_feature (89)..(279): Homolog of NCBI NO: 15231173 NR Description: transcription initiation factor IIF, beta
  misc_feature (25)..(279): Homolog of NCBI NO: 34909946 NR Description: putative transcription initiation factor
  misc_feature (24)..(284): Homolog of NCBI NO: 15222264 NR Description: transcription initiation factor, putative
ELKRSKETATRERRLTLEKRGVTMEDIHNLDIEKSDRSIWLMKCPVVVDKAWHKIAASSSSSFASSDSPPDMAKIVREVDPLRDDSPPEFKMYMVGAEYGNMPKCYALNMFTDFVPMGGFSDVNQGCAAAEGKVDHKFDMKPYGETIEEYARLCRERTSKAMVKNRQIQVIDNDRGVHMRPMPGMLGLVSSNSKEKRKPPPVKQTEVKRTRRDRGELEAIMFKLFEGQPNWTLKQLVQETDQPAQFLKEILNELCVYNKRGSNQGTYELKPEYKKSAEDDTGGQ

SEQ ID NO: 35607 - protein, 261 aa, Arabidopsis thaliana
  peptide (1)..(261): Ceres Seq. ID no. 12370507
  misc_feature (4)..(260): Pfam Name: Transcription initiation factor IIF, beta subunit Pfam Description: Transcription initiation factor IIF, beta
  misc_feature (108)..(257): Homolog of NCBI NO: 31199641 NR Description: ENSANGP00000015059 [Anopheles gambiae]
  misc_feature (105)..(252): Homolog of NCBI NO: 19073998 NR Description: TRANSCRIPTION INITIATION FACTOR TFIIF BETA
  misc_feature (6)..(257): Homolog of NCBI NO: 38174399 NR Description: Unknown (protein for MGC:75790) [Silurana
  misc_feature (6)..(251): Homolog of NCBI NO: 24645751 NR Description: Transcription factor TFIIFbeta CG6538-PA
  misc_feature (2)..(251): Homolog of NCBI NO: 19111874 NR Description: transcription initiation factor iif, beta subunit
  misc_feature (66)..(99): Homolog of NCBI NO: 11285686 NR Description: hypothetical protein T25B15.40 - Arabidopsis
  misc_feature (103)..(256): Homolog of NCBI NO: 11285686 NR Description: hypothetical protein T25B15.40 - Arabidopsis
  misc_feature (66)..(256): Homolog of NCBI NO: 15231173 NR Description: transcription initiation factor IIF, beta
  misc_feature (2)..(256): Homolog of NCBI NO: 34909946 NR Description: putative transcription initiation factor
  misc_feature (1)..(261): Homolog of NCBI NO: 15222264 NR Description: transcription initiation factor, putative
MEDIHNLDIEKSDRSIWLMKCPVVVDKAWHKIAASSSSSFASSDSPPDMAKIVREVDPLRDDSPPEFKMYMVGAEYGNMPKCYALNMFTDFVPMGGFSDVNQGCAAAEGKVDHKFDMKPYGETIEEYARLCRERTSKAMVKNRQIQVIDNDRGVHMRPMPGMLGLVSSNSKEKRKPPPVKQTEVKRTRRDRGELEAIMFKLFEGQPNWTLKQLVQETDQPAQFLKEILNELCVYNKRGSNQGTYELKPEYKKSAEDDTGGQ

SEQ ID NO: 35608 - protein, 243 aa, Arabidopsis thaliana
  peptide (1)..(243): Ceres Seq. ID no. 12370508
  misc_feature (1)..(242): Pfam Name: Transcription initiation factor IIF, beta subunit Pfam Description: Transcription initiation factor IIF, beta
  misc_feature (90)..(239): Homolog of NCBI NO: 31199641 NR Description: ENSANGP00000015059 [Anopheles gambiae]
  misc_feature (87)..(234): Homolog of NCBI NO: 19073998 NR Description: TRANSCRIPTION INITIATION FACTOR TFIIF BETA
  misc_feature (1)..(239): Homolog of NCBI NO: 38174399 NR Description: Unknown (protein for MGC:75790) [Silurana
  misc_feature (1)..(233): Homolog of NCBI NO: 24645751 NR Description: Transcription factor TFIIFbeta CG6538-PA
  misc_feature (1)..(233): Homolog of NCBI NO: 19111874 NR Description: transcription initiation factor iif, beta subunit
  misc_feature (48)..(81): Homolog of NCBI NO: 11285686 NR Description: hypothetical protein T25B15.40 - Arabidopsis
  misc_feature (85)..(238): Homolog of NCBI NO: 11285686 NR Description: hypothetical protein T25B15.40 - Arabidopsis
  misc_feature (48)..(238): Homolog of NCBI NO: 15231173 NR Description: transcription initiation factor IIF, beta
  misc_feature (1)..(238): Homolog of NCBI NO: 34909946 NR Description: putative transcription initiation factor
  misc_feature (1)..(243): Homolog of NCBI NO: 15222264 NR Description: transcription initiation factor, putative
MKCPVVVDKAWHKIAASSSSSFASSDSPPDMAKIVREVDPLRDDSPPEFKMYMVGAEYGNMPKCYALNMFTDFVPMGGFSDVNQGCAAAEGKVDHKFDMKPYGETIEEYARLCRERTSKAMVKNRQIQVIDNDRGVHMRPMPGMLGLVSSNSKEKRKPPPVKQTEVKRTRRDRGELEAIMFKLFEGQPNWTLKQLVQETDQPAQFLKEILNELCVYNKRGSNQGTYELKPEYKKSAEDDTGGQ

SEQ ID NO: 35609 - DNA, 1122 bp, Arabidopsis thaliana
  misc_feature (1)..(1122): Ceres Seq. ID no. 12394435
  misc_feature: MA Experiment ID: 108435 Result: Down-regulated in Transcription
  misc_feature: MA Experiment 108435 PARAMETER Experiment Name: At_stm_Mutants_cDNA_P Parameter: Plant Line Value: wt Landsburg vs stm
  misc_feature: MA Experiment 108435 PARAMETER Experiment Name: At_stm_Mutants_cDNA_P Parameter: Tissue Value: Shoot Apical Meristem Region
  misc_feature: MA Experiment ID: 108461 Result: Up-regulated in Transcription
  misc_feature: MA Experiment 108461 PARAMETER Experiment Name: At_Germinating_Seeds_cDNA_P Parameter: Age (day) Value: 1 vs. 0
  misc_feature: MA Experiment 108461 PARAMETER Experiment Name: At_Germinating_Seeds_cDNA_P Parameter: Tissue Value: Germinating Seeds
  misc_feature: MA Experiment ID: 108462 Result: Up-regulated in Transcription
  misc_feature: MA Experiment 108462 PARAMETER Experiment Name: At_Germinating_Seeds_cDNA_P Parameter: Age (day) Value: 2 vs. 0
  misc_feature: MA Experiment 108462 PARAMETER Experiment Name: At_Germinating_Seeds_cDNA_P Parameter: Tissue Value: Germinating Seeds
  misc_feature: MA Experiment ID: 108463 Result: Up-regulated in Transcription
  misc_feature: MA Experiment 108463 PARAMETER Experiment Name: At_Germinating_Seeds_cDNA_P Parameter: Age (day) Value: 3 vs. 0
  misc_feature: MA Experiment 108463 PARAMETER Experiment Name: At_Germinating_Seeds_cDNA_P Parameter: Tissue Value: Germinating Seeds
  misc_feature: MA Experiment ID: 108464 Result: Up-regulated in Transcription
  misc_feature: MA Experiment 108464 PARAMETER Experiment Name: At_Germinating_Seeds_cDNA_P Parameter: Age (day) Value: 4 vs. 0
  misc_feature: MA Experiment 108464 PARAMETER Experiment Name: At_Germinating_Seeds_cDNA_P Parameter: Tissue Value: Germinating Seeds
  misc_feature: MA Experiment ID: 108576 Result: Down-regulated in Transcription
  misc_feature: MA Experiment 108576 PARAMETER Experiment Name: At_42deg_Heat_cDNA_P Parameter: Temperature (deg C) Value: 42 vs. 22
  misc_feature: MA Experiment 108576 PARAMETER Experiment Name: At_42deg_Heat_cDNA_P Parameter: Timepoint (hr) Value: 1
  misc_feature: MA Experiment 108576 PARAMETER Experiment Name: At_42deg_Heat_cDNA_P Parameter: Tissue Value: Aerial
  misc_feature: MA Experiment ID: 108585 Result: Down-regulated in Transcription
  misc_feature: MA Experiment 108585 PARAMETER Experiment Name: At_5mM_NaNP_cDNA_P Parameter: Timepoint (hr) Value: 6
  misc_feature: MA Experiment 108585 PARAMETER Experiment Name: At_5mM_NaNP_cDNA_P Parameter: Tissue Value: Aerial
  misc_feature: MA Experiment 108585 PARAMETER Experiment Name: At_5mM_NaNP_cDNA_P Parameter: Treatment Value: null
  misc_feature: MA Experiment ID: 108595 Result: Down-regulated in Transcription
  misc_feature: MA Experiment 108595 PARAMETER Experiment Name: At_Ler-pi_Ovule_cDNA_P Parameter: Plant Line Value: null
  misc_feature: MA Experiment ID: 20000111 Result: Down-regulated in Transcription
  misc_feature: MA Experiment 20000111 PARAMETER Experiment Name: At_42deg_Heat_cDNA_P Parameter: Temperature (deg C) Value: 42 vs. 22
  misc_feature: MA Experiment 20000111 PARAMETER Experiment Name: At_42deg_Heat_cDNA_P Parameter: Timepoint (hr) Value: 6
  misc_feature: MA Experiment 20000111 PARAMETER Experiment Name: At_42deg_Heat_cDNA_P Parameter: Tissue Value: Aerial
  misc_feature: MA Experiment ID: 20000112 Result: Down-regulated in Transcription
  misc_feature: MA Experiment 20000112 PARAMETER Experiment Name: At_42deg_Heat_cDNA_P Parameter: Temperature (deg C) Value: 42 vs. 22
  misc_feature: MA Experiment 20000112 PARAMETER Experiment Name: At_42deg_Heat_cDNA_P Parameter: Timepoint (hr) Value: 2
  misc_feature: MA Experiment 20000112 PARAMETER Experiment Name: At_42deg_Heat_cDNA_P Parameter: Tissue Value: Aerial
  misc_feature: MA Experiment ID: 20000113 Result: Down-regulated in Transcription
  misc_feature: MA Experiment 20000113 PARAMETER Experiment Name: At_42deg_Heat_cDNA_P Parameter: Temperature (deg C) Value: 42 vs. 22
  misc_feature: MA Experiment 20000113 PARAMETER Experiment Name: At_42deg_Heat_cDNA_P Parameter: Timepoint (hr) Value: 8
  misc_feature: MA Experiment 20000113 PARAMETER Experiment Name: At_42deg_Heat_cDNA_P Parameter: Tissue Value: Aerial
  misc_feature: MA Experiment ID: 20000144 Result: Down-regulated in Transcription
  misc_feature: MA Experiment 20000144 PARAMETER Experiment Name: At_42deg_Heat_cDNA_P Parameter: Temperature (deg C) Value: 42 vs. 22
  misc_feature: MA Experiment 20000144 PARAMETER Experiment Name: At_42deg_Heat_cDNA_P Parameter: Timepoint (hr) Value: 1
  misc_feature: MA Experiment 20000144 PARAMETER Experiment Name: At_42deg_Heat_cDNA_P Parameter: Tissue Value: Aerial
  misc_feature: MA Experiment ID: 20000171 Result: Down-regulated in Transcription
  misc_feature: MA Experiment 20000171 PARAMETER Experiment Name: At_42deg_Heat_P Parameter: Age (day) Value: 14
  misc_feature: MA Experiment 20000171 PARAMETER Experiment Name: At_42deg_Heat_P Parameter: Organism Value: A. thaliana
  misc_feature: MA Experiment 20000171 PARAMETER Experiment Name: At_42deg_Heat_P Parameter: Plant Line Value: WS
  misc_feature: MA Experiment 20000171 PARAMETER Experiment Name: At_42deg_Heat_P Parameter: Temperature (deg C) Value: 42 vs. 22
  misc_feature: MA Experiment 20000171 PARAMETER Experiment Name: At_42deg_Heat_P Parameter: Timepoint (hr) Value: 1
  misc_feature: MA Experiment 20000171 PARAMETER Experiment Name: At_42deg_Heat_P Parameter: Tissue Value: Aerial
  misc_feature: MA Experiment ID: 20000173 Result: Down-regulated in Transcription
  misc_feature: MA Experiment 20000173 PARAMETER Experiment Name: At_42deg_Heat_P Parameter: Age (day) Value: 14
  misc_feature: MA Experiment 20000173 PARAMETER Experiment Name: At_42deg_Heat_P Parameter: Organism Value: A. thaliana
  misc_feature: MA Experiment 20000173 PARAMETER Experiment Name: At_42deg_Heat_P Parameter: Plant Line Value: WS
  misc_feature: MA Experiment 20000173 PARAMETER Experiment Name: At_42deg_Heat_P Parameter: Temperature (deg C) Value: 42 vs. 22
  misc_feature: MA Experiment 20000173 PARAMETER Experiment Name: At_42deg_Heat_P Parameter: Timepoint (hr) Value: 6
  misc_feature: MA Experiment 20000173 PARAMETER Experiment Name: At_42deg_Heat_P Parameter: Tissue Value: Aerial
  misc_feature: MA Experiment ID: 20000180 Result: Up-regulated in Transcription
  misc_feature: MA Experiment 20000180 PARAMETER Experiment Name: At_Germinating_Seeds_P Parameter: Age (hr) Value: 24 vs. 0
  misc_feature: MA Experiment 20000180 PARAMETER Experiment Name: At_Germinating_Seeds_P Parameter: Tissue Value: Germinating Seeds
  misc_feature: MA Experiment ID: 20000438 Result: Up-regulated in Transcription
  misc_feature: MA Experiment 20000438 PARAMETER Experiment Name: At_Shoots__P Parameter: Age (day) Value: 14
  misc_feature: MA Experiment 20000438 PARAMETER Experiment Name: At_Shoots__P Parameter: Tissue Value: Shoots vs. Whole Plant
  misc_feature: MA Experiment ID: 20001248 Result: Down-regulated in Transcription
  misc_feature: MA Experiment 20001248 PARAMETER Experiment Name: At_Far-red-induction_P Parameter: Age (day) Value: 7
  misc_feature: MA Experiment 20001248 PARAMETER Experiment Name: At_Far-red-induction_P Parameter: Light Value: Far-red vs. White
  misc_feature: MA Experiment 20001248 PARAMETER Experiment Name: At_Far-red-induction_P Parameter: Organism Value: A. thaliana
  misc_feature: MA Experiment 20001248 PARAMETER Experiment Name: At_Far-red-induction_P Parameter: Plant Line Value: Columbia
  misc_feature: MA Experiment 20001248 PARAMETER Experiment Name: At_Far-red-induction_P Parameter: Timepoint (hr) Value: 4
  misc_feature: MA Experiment 20001248 PARAMETER Experiment Name: At_Far-red-induction_P Parameter: Tissue Value: Whole Plant
  misc_feature: MA Experiment ID: 20001451 Result: Down-regulated in Transcription
  misc_feature: MA Experiment 20001451 PARAMETER Experiment Name: At_Far-red-induction_P Parameter: Age (day) Value: 7
  misc_feature: MA Experiment 20001451 PARAMETER Experiment Name: At_Far-red-induction_P Parameter: Light Value: Far-red vs. White
  misc_feature: MA Experiment 20001451 PARAMETER Experiment Name: At_Far-red-induction_P Parameter: Organism Value: A. thaliana
  misc_feature: MA Experiment 20001451 PARAMETER Experiment Name: At_Far-red-induction_P Parameter: Plant Line Value: Columbia
  misc_feature: MA Experiment 20001451 PARAMETER Experiment Name: At_Far-red-induction_P Parameter: Timepoint (hr) Value: 24
  misc_feature: MA Experiment 20001451 PARAMETER Experiment Name: At_Far-red-induction_P Parameter: Tissue Value: Whole Plant
caagattgagataagcaaagagttccataaactgaccgctgacattatagcaactactgcgtttggaagtagttatgccgaaggaatcgaattgtgtaggtcacaaacagagcttgagaagtattatattagttctctcactaacgttttcatccccggaactcaataccttcctacgcctaccaaccttaaactatgggagctccataagaaagtgaagaactcgatcaaaagaatcatagattcaaggctaaaatcaaaatgtaagacctatggctatggggacgatcttctaggggtcatgttgactgctgcgaaatctaacgagtatgagagaaagatgagaatggatgagatcatagaggaatgcaagaatttctactatgcagggcaaggaactacttcgattctattgacatggactacgatgttactaagcttgcaccaaggttggcaagagaaactcagagaagaggtttttaatgaatgtggtaaagataaaatcccagatacagacaccttctctaaactcaaattgatgaacatggtgttgatggagtcgcttcgtctgtacggacccgtgattaaaatttcccgagaggcaacacaagatatgaaggtaggacacttggagatcccaaagggcacaagcattatcataccgttactgaagatgcacagagacaaggccatatggggcgaagacgccgaacaattcaatcccttgagattcgaaaacggcatttctcaagccaccattcacccaaacgctctcctcccgttctcaatcggaccaagagcttgcattgccaaaaactttgccatggtcgaagccaagaccgttctcactatgatccttcaacagttccagcttagcctctcccccgagtataagcacacgccagttgatcacttcgatctcttcccgcaatacggcctacccgtaatgcttcaccctctcggatagtagttctgaatggtgaggaagagaaaaccaagaatctcaacggatatttggtcacgttatgttctatatttggccttggtcacaaataaagttcagatgatataattcaatagtggataagtcaaattcaaagtgaagtaaggaataaaaatctg

SEQ ID NO: 35610 - protein, 321 aa, Arabidopsis thaliana
  peptide (1)..(321): Ceres Seq. ID no. 12394436
  misc_feature (1)..(320): Homolog of NCBI NO: 34913350 NR Description: putative cytochrome P450 [Oryza sativa (japonica
  misc_feature (1)..(320): Homolog of NCBI NO: 22324446 NR Description: putative cytochrome P450 [Oryza sativa (japonica
  misc_feature (1)..(320): Homolog of NCBI NO: 38112707 NR Description: cytochrome P450 [Triticum aestivum]
  misc_feature (1)..(320): Homolog of NCBI NO: 34913354 NR Description: putative cytochrome P450 [Oryza sativa (japonica
  misc_feature (1)..(320): Homolog of NCBI NO: 34913346 NR Description: putative cytochrome P450 [Oryza sativa (japonica
  misc_feature (1)..(320): Homolog of NCBI NO: 7484896 NR Description: cytochrome P450 homolog F14M4.21 - Arabidopsis
  misc_feature (1)..(320): Homolog of NCBI NO: 30690559 NR Description: cytochrome P450 family [Arabidopsis thaliana]
  misc_feature (1)..(320): Homolog of NCBI NO: 18407219 NR Description: cytochrome P450, putative
  misc_feature (4)..(320): Homolog of NCBI NO: 15226472 NR Description: cytochrome p450, putative; protein id:
  misc_feature (1)..(321): Homolog of NCBI NO: 15234248 NR Description: cytochrome P450 - like protein; protein id:
KIEISKEFHKLTADIIATTAFGSSYAEGIELCRSQTELEKYYISSLTNVFIPGTQYLPTPTNLKLWELHKKVKNSIKRIIDSRLKSKCKTYGYGDDLLGVMLTAAKSNEYERKMRMDEIIEECKNFYYAGQGTTSILLTWTTMLLSLHQGWQEKLREEVFNECGKDKIPDTDTFSKLKLMNMVLMESLRLYGPVIKISREATQDMKVGHLEIPKGTSIIIPLLKMHRDKAIWGEDAEQFNPLRFENGISQATIHPNALLPFSIGPRACIAKNFAMVEAKTVLTMILQQFQLSLSPEYKHTPVDHFDLFPQYGLPVMLHPLG

SEQ ID NO: 35611 - protein, 221 aa, Arabidopsis thaliana
  peptide (1)..(221): Ceres Seq. ID no. 12394437
  misc_feature (1)..(220): Homolog of NCBI NO: 34913350 NR Description: putative cytochrome P450 [Oryza sativa (japonica
  misc_feature (1)..(220): Homolog of NCBI NO: 22324446 NR Description: putative cytochrome P450 [Oryza sativa (japonica
  misc_feature (1)..(220): Homolog of NCBI NO: 38112707 NR Description: cytochrome P450 [Triticum aestivum]
  misc_feature (1)..(220): Homolog of NCBI NO: 34913354 NR Description: putative cytochrome P450 [Oryza sativa (japonica
  misc_feature (1)..(220): Homolog of NCBI NO: 34913346 NR Description: putative cytochrome P450 [Oryza sativa (japonica
  misc_feature (1)..(220): Homolog of NCBI NO: 7484896 NR Description: cytochrome P450 homolog F14M4.21 - Arabidopsis
  misc_feature (1)..(220): Homolog of NCBI NO: 30690559 NR Description: cytochrome P450 family [Arabidopsis thaliana]
  misc_feature (1)..(220): Homolog of NCBI NO: 18407219 NR Description: cytochrome P450, putative
  misc_feature (1)..(220): Homolog of NCBI NO: 15226472 NR Description: cytochrome p450, putative; protein id:
  misc_feature (1)..(221): Homolog of NCBI NO: 15234248 NR Description: cytochrome P450 - like protein; protein id:
MLTAAKSNEYERKMRMDEIIEECKNFYYAGQGTTSILLTWTTMLLSLHQGWQEKLREEVFNECGKDKIPDTDTFSKLKLMNMVLMESLRLYGPVIKISREATQDMKVGHLEIPKGTSIIIPLLKMHRDKAIWGEDAEQFNPLRFENGISQATIHPNALLPFSIGPRACIAKNFAMVEAKTVLTMILQQFQLSLSPEYKHTPVDHFDLFPQYGLPVMLHPLG

SEQ ID NO: 35612 - protein, 208 aa, Arabidopsis thaliana
  peptide (1)..(208): Ceres Seq. ID no. 12394438
  misc_feature (1)..(207): Homolog of NCBI NO: 34913350 NR Description: putative cytochrome P450 [Oryza sativa (japonica
  misc_feature (1)..(207): Homolog of NCBI NO: 22324446 NR Description: putative cytochrome P450 [Oryza sativa (japonica
  misc_feature (1)..(207): Homolog of NCBI NO: 38112707 NR Description: cytochrome P450 [Triticum aestivum]
  misc_feature (1)..(207): Homolog of NCBI NO: 34913354 NR Description: putative cytochrome P450 [Oryza sativa (japonica
  misc_feature (1)..(207): Homolog of NCBI NO: 34913346 NR Description: putative cytochrome P450 [Oryza sativa (japonica
  misc_feature (1)..(207): Homolog of NCBI NO: 7484896 NR Description: cytochrome P450 homolog F14M4.21 - Arabidopsis
  misc_feature (1)..(207): Homolog of NCBI NO: 30690559 NR Description: cytochrome P450 family [Arabidopsis thaliana]
  misc_feature (1)..(207): Homolog of NCBI NO: 18407219 NR Description: cytochrome P450, putative
  misc_feature (1)..(207): Homolog of NCBI NO: 15226472 NR Description: cytochrome p450, putative; protein id:
  misc_feature (1)..(208): Homolog of NCBI NO: 15234248 NR Description: cytochrome P450 - like protein; protein id:
MRMDEIIEECKNFYYAGQGTTSILLTWTTMLLSLHQGWQEKLREEVFNECGKDKIPDTDTFSKLKLMNMVLMESLRLYGPVIKISREATQDMKVGHLEIPKGTSIIIPLLKMHRDKAIWGEDAEQFNPLRFENGISQATIHPNALLPFSIGPRACIAKNFAMVEAKTVLTMILQQFQLSLSPEYKHTPVDHFDLFPQYGLPVMLHPLG

SEQ ID NO: 35613 - DNA, 1045 bp, Arabidopsis thaliana
  misc_feature (1)..(1045): Ceres Seq. ID no. 13488473
  misc_feature: MA Experiment ID: 108434 Result: Up-regulated in Transcription
  misc_feature: MA Experiment 108434 PARAMETER Experiment Name: At_Root_Tips_cDNA_P Parameter: Tissue Value: Root Tips
  misc_feature: MA Experiment ID: 108462 Result: Down-regulated in Transcription
  misc_feature: MA Experiment 108462 PARAMETER Experiment Name: At_Germinating_Seeds_cDNA_P Parameter: Age (day) Value: 2 vs. 0
  misc_feature: MA Experiment 108462 PARAMETER Experiment Name: At_Germinating_Seeds_cDNA_P Parameter: Tissue Value: Germinating Seeds
  misc_feature: MA Experiment ID: 108463 Result: Down-regulated in Transcription
  misc_feature: MA Experiment 108463 PARAMETER Experiment Name: At_Germinating_Seeds_cDNA_P Parameter: Age (day) Value: 3 vs. 0
  misc_feature: MA Experiment 108463 PARAMETER Experiment Name: At_Germinating_Seeds_cDNA_P Parameter: Tissue Value: Germinating Seeds
  misc_feature: MA Experiment ID: 108464 Result: Down-regulated in Transcription
  misc_feature: MA Experiment 108464 PARAMETER Experiment Name: At_Germinating_Seeds_cDNA_P Parameter: Age (day) Value: 4 vs. 0
  misc_feature: MA Experiment 108464 PARAMETER Experiment Name: At_Germinating_Seeds_cDNA_P Parameter: Tissue Value: Germinating Seeds
  misc_feature: MA Experiment ID: 108585 Result: Up-regulated in Transcription
  misc_feature: MA Experiment 108585 PARAMETER Experiment Name: At_5mM_NaNP_cDNA_P Parameter: Timepoint (hr) Value: 6
  misc_feature: MA Experiment 108585 PARAMETER Experiment Name: At_5mM_NaNP_cDNA_P Parameter: Tissue Value: Aerial
  misc_feature: MA Experiment 108585 PARAMETER Experiment Name: At_5mM_NaNP_cDNA_P Parameter: Treatment Value: null
  misc_feature: MA Experiment ID: 20000068 Result: Down-regulated in Transcription
  misc_feature: MA Experiment ID: 20000180 Result: Down-regulated in Transcription
  misc_feature: MA Experiment 20000180 PARAMETER Experiment Name: At_Germinating_Seeds_P Parameter: Age (hr) Value: 24 vs. 0
  misc_feature: MA Experiment 20000180 PARAMETER Experiment Name: At_Germinating_Seeds_P Parameter: Tissue Value: Germinating Seeds
  misc_feature: MA Experiment ID: 20000224 Result: Down-regulated in Transcription
  misc_feature: MA Experiment ID: 20001560 Result: Up-regulated in Transcription
  misc_feature: MA Experiment 20001560 PARAMETER Experiment Name: At_Drought_Soil_Dry_P Parameter: Age (day) Value: 28
  misc_feature: MA Experiment 20001560 PARAMETER Experiment Name: At_Drought_Soil_Dry_P Parameter: Organism Value: A. thaliana
  misc_feature: MA Experiment 20001560 PARAMETER Experiment Name: At_Drought_Soil_Dry_P Parameter: Plant Line Value: WS
  misc_feature: MA Experiment 20001560 PARAMETER Experiment Name: At_Drought_Soil_Dry_P Parameter: Post Timepoint (hr) Value: None
  misc_feature: MA Experiment 20001560 PARAMETER Experiment Name: At_Drought_Soil_Dry_P Parameter: Post-Treatment Value: None
  misc_feature: MA Experiment 20001560 PARAMETER Experiment Name: At_Drought_Soil_Dry_P Parameter: Timepoint (day) Value: 14
  misc_feature: MA Experiment 20001560 PARAMETER Experiment Name: At_Drought_Soil_Dry_P Parameter: Treatment Value: Drought vs. No Drought
aaaaagcttttgaagaacagaggaacaagaagaagaaagatgttcaggaaccagtacgacacagatgtgacaacatggagtcccacaggtcgactattccaagtcgaatacgccatggaagctgtgaaacaaggctccgcagcaataggactcagatctcgctctcatgtcgtcctcgcttgtgtcaacaaagcacaatcagagctctcttctcatcaaaggaagatctttaaagtcgatgatcatattggtgttgctattgctggtctcactgctgatggtcgtgttctctctcgatatatgagatctgagtctattaatcactcttttacttatgagtctcctcttcctgttggtcgtcttgttgttcatcttgctgataaagctcaggtatgtacccaacgatcatggaaacggccttatggtgtgggtttgctggtaggtggattggacgagtcaggagctcacctctactacaactgccctagcggaaactactttgaatatcaagcattcgctatcgggtctcgttcacaagctgcgaaaacctatctggagcgcaaattcgagagcttccaagaatcatcaaaagaagatctgataaaagatgctattatggccataagggaaactttgcaaggggaaacactgaagagctcgctctgcactgtttctgttctaggagtcgatgaaccattccatttcttggaccaggaaagcattcaaaaggtgattgatacgtttgagaaggttcctgaggaagaggaagatgctggtgagggtgaggccgaacccgaagctgctcctggtgctgctggaactggtgaacaaggtggttcaggtgatcaagatgttgcaccaatggaaatttgagcaagagggaatgagttcaaagttggattttctaaccaactttcttgtgtttagctctttgatgtgttccaacttccaagtattgttgttttaactcagctttgtttattttaacagcttgcaacaatgagttattgagtgccactagcttatatttagtcatacttaagtt

SEQ ID NO: 35614 - protein, 290 aa, Arabidopsis thaliana
  peptide (1)..(290): Ceres Seq. ID no. 13488474
  misc_feature (42)..(227): Pfam Name: Proteasome A-type and B-type Pfam Description: Proteasome A-type and B-type
  misc_feature (19)..(205): Homolog of NCBI NO: 29247195 NR Description: GLP_47_22543_21776 [Giardia lamblia ATCC 50803]
  misc_feature (14)..(249): Homolog of NCBI NO: 12229911 NR Description: Proteasome subunit alpha type 1 (Proteasome
  misc_feature (19)..(175): Homolog of NCBI NO: 14594923 NR Description: putative alpha6 proteasome subunit [Nicotiana
  misc_feature (14)..(263): Homolog of NCBI NO: 1709758 NR Description: Proteasome subunit alpha type 1 (20S proteasome subunit F) (20S proteasome subunit alpha-6) (Proteasome component
  misc_feature (14)..(290): Homolog of NCBI NO: 22947842 NR Description: 20S proteasome alpha 6 subunit [Nicotiana
  misc_feature (14)..(290): Homolog of NCBI NO: 15239061 NR Description: 20S proteasome alpha subunit F1 (PAF1)
  misc_feature (14)..(290): Homolog of NCBI NO: 21537234 NR Description: 20S proteasome subunit PAF1 [Arabidopsis thaliana]
  misc_feature (14)..(290): Homolog of NCBI NO: 25290066 NR Description: C 3.4.25.1 proteasome endopeptidase complex ()
  misc_feature (24)..(290): Homolog of NCBI NO: 2511586 NR Description: multicatalytic endopeptidase [Arabidopsis
  misc_feature (14)..(290): Homolog of NCBI NO: 15220151 NR Description: 20S proteasome alpha subunit F2 (PAF2)
KKLLKNRGTRRRKMFRNQYDTDVTTWSPTGRLFQVEYAMEAVKQGSAAIGLRSRSHVVLACVNKAQSELSSHQRKIFKVDDHIGVAIAGLTADGRVLSRYMRSESINHSFTYESPLPVGRLVVHLADKAQVCTQRSWKRPYGVGLLVGGLDESGAHLYYNCPSGNYFEYQAFAIGSRSQAAKTYLERKFESFQESSKEDLIKDAIMAIRETLQGETLKSSLCTVSVLGVDEPFHFLDQESIQKVIDTFEKVPEEEEDAGEGEAEPEAAPGAAGTGEQGGSGDQDVAPMEI

SEQ ID NO: 35615 - protein, 277 aa, Arabidopsis thaliana
  peptide (1)..(277): Ceres Seq. ID no. 13488475
  misc_feature (29)..(214): Pfam Name: Proteasome A-type and B-type Pfam Description: Proteasome A-type and B-type
  misc_feature (6)..(192): Homolog of NCBI NO: 29247195 NR Description: GLP_47_22543_21776 [Giardia lamblia ATCC 50803]
  misc_feature (1)..(236): Homolog of NCBI NO: 12229911 NR Description: Proteasome subunit alpha type 1 (Proteasome
  misc_feature (6)..(162): Homolog of NCBI NO: 14594923 NR Description: putative alpha6 proteasome subunit [Nicotiana
  misc_feature (1)..(250): Homolog of NCBI NO: 1709758 NR Description: Proteasome subunit alpha type 1 (20S proteasome subunit F) (20S proteasome subunit alpha-6) (Proteasome component
  misc_feature (1)..(277): Homolog of NCBI NO: 22947842 NR Description: 20S proteasome alpha 6 subunit [Nicotiana
  misc_feature (1)..(277): Homolog of NCBI NO: 15239061 NR Description: 20S proteasome alpha subunit F1 (PAF1)
  misc_feature (1)..(277): Homolog of NCBI NO: 21537234 NR Description: 20S proteasome subunit PAF1 [Arabidopsis thaliana]
  misc_feature (1)..(277): Homolog of NCBI NO: 25290066 NR Description: C 3.4.25.1 proteasome endopeptidase complex ()
  misc_feature (11)..(277): Homolog of NCBI NO: 2511586 NR Description: multicatalytic endopeptidase [Arabidopsis
  misc_feature (1)..(277): Homolog of NCBI NO: 15220151 NR Description: 20S proteasome alpha subunit F2 (PAF2)
MFRNQYDTDVTTWSPTGRLFQVEYAMEAVKQGSAAIGLRSRSHVVLACVNKAQSELSSHQRKIFKVDDHIGVAIAGLTADGRVLSRYMRSESINHSFTYESPLPVGRLVVHLADKAQVCTQRSWKRPYGVGLLVGGLDESGAHLYYNCPSGNYFEYQAFAIGSRSQAAKTYLERKFESFQESSKEDLIKDAIMAIRETLQGETLKSSLCTVSVLGVDEPFHFLDQESIQKVIDTFEKVPEEEEDAGEGEAEPEAAPGAAGTGEQGGSGDQDVAPMEI

SEQ ID NO: 35616 - protein, 252 aa, Arabidopsis thaliana
  peptide (1)..(252): Ceres Seq. ID no. 13488476
  misc_feature (4)..(189): Pfam Name: Proteasome A-type and B-type Pfam Description: Proteasome A-type and B-type
  misc_feature (1)..(167): Homolog of NCBI NO: 29247195 NR Description: GLP_47_22543_21776 [Giardia lamblia ATCC 50803]
  misc_feature (1)..(211): Homolog of NCBI NO: 12229911 NR Description: Proteasome subunit alpha type 1 (Proteasome
  misc_feature (1)..(137): Homolog of NCBI NO: 14594923 NR Description: putative alpha6 proteasome subunit [Nicotiana
  misc_feature (1)..(225): Homolog of NCBI NO: 1709758 NR Description: Proteasome subunit alpha type 1 (20S proteasome subunit F) (20S proteasome subunit alpha-6) (Proteasome component
  misc_feature (1)..(252): Homolog of NCBI NO: 22947842 NR Description: 20S proteasome alpha 6 subunit [Nicotiana
  misc_feature (1)..(252): Homolog of NCBI NO: 15239061 NR Description: 20S proteasome alpha subunit F1 (PAF1)
  misc_feature (1)..(252): Homolog of NCBI NO: 21537234 NR Description: 20S proteasome subunit PAF1 [Arabidopsis thaliana]
  misc_feature (1)..(252): Homolog of NCBI NO: 25290066 NR Description: C 3.4.25.1 proteasome endopeptidase complex ()
  misc_feature (1)..(252): Homolog of NCBI NO: 2511586 NR Description: multicatalytic endopeptidase [Arabidopsis
  misc_feature (1)..(252): Homolog of NCBI NO: 15220151 NR Description: 20S proteasome alpha subunit F2 (PAF2)
MEAVKQGSAAIGLRSRSHVVLACVNKAQSELSSHQRKIFKVDDHIGVAIAGLTADGRVLSRYMRSESINHSFTYESPLPVGRLVVHLADKAQVCTQRSWKRPYGVGLLVGGLDESGAHLYYNCPSGNYFEYQAFAIGSRSQAAKTYLERKFESFQESSKEDLIKDAIMAIRETLQGETLKSSLCTVSVLGVDEPFHFLDQESIQKVIDTFEKVPEEEEDAGEGEAEPEAAPGAAGTGEQGGSGDQDVAPMEI

SEQ ID NO: 35617 - DNA, 1354 bp, Arabidopsis thaliana
  misc_feature (1)..(1354): Ceres Seq. ID no. 13486811
  misc_feature: MA Experiment ID: 108461 Result: Up-regulated in Transcription
  misc_feature: MA Experiment 108461 PARAMETER Experiment Name: At_Germinating_Seeds_cDNA_P Parameter: Age (day) Value: 1 vs. 0
  misc_feature: MA Experiment 108461 PARAMETER Experiment Name: At_Germinating_Seeds_cDNA_P Parameter: Tissue Value: Germinating Seeds
  misc_feature: MA Experiment ID: 108462 Result: Up-regulated in Transcription
  misc_feature: MA Experiment 108462 PARAMETER Experiment Name: At_Germinating_Seeds_cDNA_P Parameter: Age (day) Value: 2 vs. 0
  misc_feature: MA Experiment 108462 PARAMETER Experiment Name: At_Germinating_Seeds_cDNA_P Parameter: Tissue Value: Germinating Seeds
  misc_feature: MA Experiment ID: 108464 Result: Up-regulated in Transcription
  misc_feature: MA Experiment 108464 PARAMETER Experiment Name: At_Germinating_Seeds_cDNA_P Parameter: Age (day) Value: 4 vs. 0
  misc_feature: MA Experiment 108464 PARAMETER Experiment Name: At_Germinating_Seeds_cDNA_P Parameter: Tissue Value: Germinating Seeds
  misc_feature: MA Experiment ID: 108488 Result: Down-regulated in Transcription
  misc_feature: MA Experiment ID: 108579 Result: Up-regulated in Transcription
  misc_feature: MA Experiment 108579 PARAMETER Experiment Name: At_4deg_Cold_cDNA_P Parameter: Temperature (deg C) Value: 4 vs. 22
  misc_feature: MA Experiment 108579 PARAMETER Experiment Name: At_4deg_Cold_cDNA_P Parameter: Timepoint (hr) Value: 6
  misc_feature: MA Experiment 108579 PARAMETER Experiment Name: At_4deg_Cold_cDNA_P Parameter: Tissue Value: Aerial
  misc_feature: MA Experiment ID: 108594 Result: Down-regulated in Transcription
  misc_feature: MA Experiment 108594 PARAMETER Experiment Name: At_Ler-rhl_Root_cDNA_P Parameter: Plant Line Value: null
  misc_feature: MA Experiment ID: 108668 Result: Up-regulated in Transcription
  misc_feature: MA Experiment 108668 PARAMETER Experiment Name: At_2mM_SA_cDNA_P Parameter: Plant Line Value: WS
  misc_feature: MA Experiment 108668 PARAMETER Experiment Name: At_2mM_SA_cDNA_P Parameter: Timepoint (hr) Value: 6
  misc_feature: MA Experiment 108668 PARAMETER Experiment Name: At_2mM_SA_cDNA_P Parameter: Treatment Value: 2mM SA vs. No Treatment
  misc_feature: MA Experiment ID: 20000111 Result: Down-regulated in Transcription
  misc_feature: MA Experiment 20000111 PARAMETER Experiment Name: At_42deg_Heat_cDNA_P Parameter: Temperature (deg C) Value: 42 vs. 22
  misc_feature: MA Experiment 20000111 PARAMETER Experiment Name: At_42deg_Heat_cDNA_P Parameter: Timepoint (hr) Value: 6
  misc_feature: MA Experiment 20000111 PARAMETER Experiment Name: At_42deg_Heat_cDNA_P Parameter: Tissue Value: Aerial
  misc_feature: MA Experiment ID: 20000112 Result: Down-regulated in Transcription
  misc_feature: MA Experiment 20000112 PARAMETER Experiment Name: At_42deg_Heat_cDNA_P Parameter: Temperature (deg C) Value: 42 vs. 22
  misc_feature: MA Experiment 20000112 PARAMETER Experiment Name: At_42deg_Heat_cDNA_P Parameter: Timepoint (hr) Value: 2
  misc_feature: MA Experiment 20000112 PARAMETER Experiment Name: At_42deg_Heat_cDNA_P Parameter: Tissue Value: Aerial
  misc_feature: MA Experiment ID: 20000113 Result: Down-regulated in Transcription
  misc_feature: MA Experiment 20000113 PARAMETER Experiment Name: At_42deg_Heat_cDNA_P Parameter: Temperature (deg C) Value: 42 vs. 22
  misc_feature: MA Experiment 20000113 PARAMETER Experiment Name: At_42deg_Heat_cDNA_P Parameter: Timepoint (hr) Value: 8
  misc_feature: MA Experiment 20000113 PARAMETER Experiment Name: At_42deg_Heat_cDNA_P Parameter: Tissue Value: Aerial
  misc_feature: MA Experiment ID: 20000180 Result: Up-regulated in Transcription
  misc_feature: MA Experiment 20000180 PARAMETER Experiment Name: At_Germinating_Seeds_P Parameter: Age (hr) Value: 24 vs. 0
  misc_feature: MA Experiment 20000180 PARAMETER Experiment Name: At_Germinating_Seeds_P Parameter: Tissue Value: Germinating Seeds
  misc_feature: MA Experiment ID: 20000185 Result: Up-regulated in Transcription
  misc_feature: MA Experiment 20000185 PARAMETER Experiment Name: At_Roots__P Parameter: Age (day) Value: 7 vs. 21
  misc_feature: MA Experiment 20000185 PARAMETER Experiment Name: At_Roots__P Parameter: Organism Value: A. thaliana
  misc_feature: MA Experiment 20000185 PARAMETER Experiment Name: At_Roots__P Parameter: Tissue Value: Roots vs. Whole Plant
  misc_feature: MA Experiment ID: 20000527 Result: Down-regulated in Transcription
  misc_feature: MA Experiment 20000527 PARAMETER Experiment Name: At_10percent_PEG_P Parameter: Age (day) Value: 20
  misc_feature: MA Experiment 20000527 PARAMETER Experiment Name: At_10percent_PEG_P Parameter: Organism Value: A. thaliana
  misc_feature: MA Experiment 20000527 PARAMETER Experiment Name: At_10percent_PEG_P Parameter: Plant Line Value: WS
  misc_feature: MA Experiment 20000527 PARAMETER Experiment Name: At_10percent_PEG_P Parameter: Timepoint (day) Value: 20
  misc_feature: MA Experiment 20000527 PARAMETER Experiment Name: At_10percent_PEG_P Parameter: Tissue Value: Whole Plant
  misc_feature: MA Experiment 20000527 PARAMETER Experiment Name: At_10percent_PEG_P Parameter: Treatment Value: 10percent PEG vs. No Treatment
tgggacaagaactgatagagtgggataagagacaaataaggagaatcaaacaagcaatccgatcgatctaccagatcgccatgattcttacaagatgcttacccttgatatggctatctctacttactgtgtgtgctgctgggaggacattgcaccctctccctgttaaaggacccaaaactgtcaagcttcaacttcagacttcacgtccttataacatcgcacacagaggttccaatggagagatcccagaagaaactacagctgcatacttgaaagcaattgaagaaggcacagacttcatagaaacagatatcttatcatccaaagatggtgtgctcatatgtttccatgattgtattctcgacgaaacaaccaatgttgcgagccacaaggagtttgcagatcgtaaaaggacatatgatgtccaaggattcaacattactggctttttcacttttgattttacacttaaagaactaaagcaactacgtataaagcagcgatatgcttttcgggatcagcaatacaacggaatgtaccctatcattacatttgaggaatttcttaccattgctcgggatgctccaagagttgttggaatatatcctgagattaaaaatccagttttaatgaaccagcatgtcaaatggcctggtggtaagaaatttgaggataaagttgtggagacacttaagaagtatgggtatggaggctcgtatttgtccaagaagtggttgaaaaaaccactatttattcagtcatttgccccaacttcactcgtgtacatatcaaacttgacagactcgccgaaagtccttctaatagacgatgttaccatgccaacgcaagacactaaccagacatatgcagagatcacatcagatgcgtatttcgaatacatcaagcaatatgttgtgggtatcggaccatggaaggatacaattgttccggtaaacaacaactatgtgctagcccccacagatttggtcaaaagagctcacgcacacaatctgcaggtgcatccctatacgtacaggaatgaacacgaattcttacactataactttagccaagacccgtataaggagtacgactactggatcaatgagattggagttgatggactcttcactgatttcacaggcagcctccataactttcaagaatggacatctccattacctgatacctccaagtctccacgacagcttcttagtcaaattgcctcattggtcctcccttatgcaaaggcttgaagttccacataaacacctatcagtaatcctattgtttgcaattaattgtattgaataaagttacaatgattattctgaagaagaacacagttgtc

SEQ ID NO: 35618 - protein, 418 aa, Arabidopsis thaliana
  peptide (1)..(418): Ceres Seq. ID no. 13486812
  misc_feature (41)..(379): Homolog of NCBI NO: 23105793 NR Description: hypothetical protein [Azotobacter vinelandii]
  misc_feature (70)..(379): Homolog of NCBI NO: 32997080 NR Description: glycerophosphoryl diester phosphodiesterase
  misc_feature (56)..(379): Homolog of NCBI NO: 15595544 NR Description: glycerophosphoryl diester phosphodiesterase,
  misc_feature (70)..(379): Homolog of NCBI NO: 32141147 NR Description: putative glycerophosphoryl diester
  misc_feature (66)..(380): Homolog of NCBI NO: 16127502 NR Description: glycerophosphoryl diester phosphodiesterase
  misc_feature (61)..(380): Homolog of NCBI NO: 23126501 NR Description: hypothetical protein [Nostoc punctiforme]
  misc_feature (60)..(392): Homolog of NCBI NO: 34394918 NR Description: putative glycerophosphoryl diester
  misc_feature (38)..(415): Homolog of NCBI NO: 34909788 NR Description: putative glycerophosphoryl diester
  misc_feature (33)..(395): Homolog of NCBI NO: 15241502 NR Description: glycerophosphodiester phosphodiesterase - like
  misc_feature (27)..(418): Homolog of NCBI NO: 15221164 NR Description: glycerophosphodiester phosphodiesterase -related
GQELIEWDKRQIRRIKQAIRSIYQIAMILTRCLPLIWLSLLTVCAAGRTLHPLPVKGPKTVKLQLQTSRPYNIAHRGSNGEIPEETTAAYLKAIEEGTDFIETDILSSKDGVLICFHDCILDETTNVASHKEFADRKRTYDVQGFNITGFFTFDFTLKELKQLRIKQRYAFRDQQYNGMYPIITFEEFLTIARDAPRVVGIYPEIKNPVLMNQHVKWPGGKKFEDKVVETLKKYGYGGSYLSKKWLKKPLFIQSFAPTSLVYISNLTDSPKVLLIDDVTMPTQDTNQTYAEITSDAYFEYIKQYVVGIGPWKDTIVPVNNNYVLAPTDLVKRAHAHNLQVHPYTYRNEHEFLHYNFSQDPYKEYDYWINEIGVDGLFTDFTGSLHNFQEWTSPLPDTSKSPRQLLSQIASLVLPYAKA

SEQ ID NO: 35619 - protein, 392 aa, Arabidopsis thaliana
  peptide (1)..(392): Ceres Seq. ID no. 13486813
  misc_feature (15)..(353): Homolog of NCBI NO: 23105793 NR Description: hypothetical protein [Azotobacter vinelandii]
  misc_feature (44)..(353): Homolog of NCBI NO: 32997080 NR Description: glycerophosphoryl diester phosphodiesterase
  misc_feature (30)..(353): Homolog of NCBI NO: 15595544 NR Description: glycerophosphoryl diester phosphodiesterase,
  misc_feature (44)..(353): Homolog of NCBI NO: 32141147 NR Description: putative glycerophosphoryl diester
  misc_feature (40)..(354): Homolog of NCBI NO: 16127502 NR Description: glycerophosphoryl diester phosphodiesterase
  misc_feature (35)..(354): Homolog of NCBI NO: 23126501 NR Description: hypothetical protein [Nostoc punctiforme]
  misc_feature (34)..(366): Homolog of NCBI NO: 34394918 NR Description: putative glycerophosphoryl diester
  misc_feature (12)..(389): Homolog of NCBI NO: 34909788 NR Description: putative glycerophosphoryl diester
  misc_feature (7)..(369): Homolog of NCBI NO: 15241502 NR Description: glycerophosphodiester phosphodiesterase - like
  misc_feature (1)..(392): Homolog of NCBI NO: 15221164 NR Description: glycerophosphodiester phosphodiesterase -related
MILTRCLPLIWLSLLTVCAAGRTLHPLPVKGPKTVKLQLQTSRPYNIAHRGSNGEIPEETTAAYLKAIEEGTDFIETDILSSKDGVLICFHDCILDETTNVASHKEFADRKRTYDVQGFNITGFFTFDFTLKELKQLRIKQRYAFRDQQYNGMYPIITFEEFLTIARDAPRVVGIYPEIKNPVLMNQHVKWPGGKKFEDKVVETLKKYGYGGSYLSKKWLKKPLFIQSFAPTSLVYISNLTDSPKVLLIDDVTMPTQDTNQTYAEITSDAYFEYIKQYVVGIGPWKDTIVPVNNNYVLAPTDLVKRAHAHNLQVHPYTYRNEHEFLHYNFSQDPYKEYDYWINEIGVDGLFTDFTGSLHNFQEWTSPLPDTSKSPRQLLSQIASLVLPYAKA

SEQ ID NO: 35620 - protein, 240 aa, Arabidopsis thaliana
  peptide (1)..(240): Ceres Seq. ID no. 13486814
  misc_feature (1)..(201): Homolog of NCBI NO: 23105793 NR Description: hypothetical protein [Azotobacter vinelandii]
  misc_feature (1)..(201): Homolog of NCBI NO: 32997080 NR Description: glycerophosphoryl diester phosphodiesterase
  misc_feature (1)..(201): Homolog of NCBI NO: 15595544 NR Description: glycerophosphoryl diester phosphodiesterase,
  misc_feature (1)..(201): Homolog of NCBI NO: 32141147 NR Description: putative glycerophosphoryl diester
  misc_feature (1)..(202): Homolog of NCBI NO: 16127502 NR Description: glycerophosphoryl diester phosphodiesterase
  misc_feature (1)..(202): Homolog of NCBI NO: 23126501 NR Description: hypothetical protein [Nostoc punctiforme]
  misc_feature (1)..(214): Homolog of NCBI NO: 34394918 NR Description: putative glycerophosphoryl diester
  misc_feature (1)..(237): Homolog of NCBI NO: 34909788 NR Description: putative glycerophosphoryl diester
  misc_feature (1)..(217): Homolog of NCBI NO: 15241502 NR Description: glycerophosphodiester phosphodiesterase - like
  misc_feature (1)..(240): Homolog of NCBI NO: 15221164 NR Description: glycerophosphodiester phosphodiesterase -related
MYPIITFEEFLTIARDAPRVVGIYPEIKNPVLMNQHVKWPGGKKFEDKVVETLKKYGYGGSYLSKKWLKKPLFIQSFAPTSLVYISNLTDSPKVLLIDDVTMPTQDTNQTYAEITSDAYFEYIKQYVVGIGPWKDTIVPVNNNYVLAPTDLVKRAHAHNLQVHPYTYRNEHEFLHYNFSQDPYKEYDYWINEIGVDGLFTDFTGSLHNFQEWTSPLPDTSKSPRQLLSQIASLVLPYAKA

SEQ ID NO: 35621 - DNA, 1045 bp, Arabidopsis thaliana; identical to SEQ ID NO: 25661
  misc_feature (1)..(1045): Ceres Seq. ID no. 13487337
  misc_feature: MA Experiment ID: 108434 Result: Up-regulated in Transcription
  misc_feature: MA Experiment 108434 PARAMETER Experiment Name: At_Root_Tips_cDNA_P Parameter: Tissue Value: Root Tips
  misc_feature: MA Experiment ID: 108461 Result: Down-regulated in Transcription
  misc_feature: MA Experiment 108461 PARAMETER Experiment Name: At_Germinating_Seeds_cDNA_P Parameter: Age (day) Value: 1 vs. 0
  misc_feature: MA Experiment 108461 PARAMETER Experiment Name: At_Germinating_Seeds_cDNA_P Parameter: Tissue Value: Germinating Seeds
  misc_feature: MA Experiment ID: 108462 Result: Down-regulated in Transcription
  misc_feature: MA Experiment 108462 PARAMETER Experiment Name: At_Germinating_Seeds_cDNA_P Parameter: Age (day) Value: 2 vs. 0
  misc_feature: MA Experiment 108462 PARAMETER Experiment Name: At_Germinating_Seeds_cDNA_P Parameter: Tissue Value: Germinating Seeds
  misc_feature: MA Experiment ID: 108463 Result: Down-regulated in Transcription
  misc_feature: MA Experiment 108463 PARAMETER Experiment Name: At_Germinating_Seeds_cDNA_P Parameter: Age (day) Value: 3 vs. 0
  misc_feature: MA Experiment 108463 PARAMETER Experiment Name: At_Germinating_Seeds_cDNA_P Parameter: Tissue Value: Germinating Seeds
  misc_feature: MA Experiment ID: 108464 Result: Down-regulated in Transcription
  misc_feature: MA Experiment 108464 PARAMETER Experiment Name: At_Germinating_Seeds_cDNA_P Parameter: Age (day) Value: 4 vs. 0
  misc_feature: MA Experiment 108464 PARAMETER Experiment Name: At_Germinating_Seeds_cDNA_P Parameter: Tissue Value: Germinating Seeds
  misc_feature: MA Experiment ID: 108573 Result: Up-regulated in Transcription
  misc_feature: MA Experiment 108573 PARAMETER Experiment Name: At_Drought_cDNA_P Parameter: Timepoint (hr) Value: 6
  misc_feature: MA Experiment 108573 PARAMETER Experiment Name: At_Drought_cDNA_P Parameter: Tissue Value: Aerial
  misc_feature: MA Experiment 108573 PARAMETER Experiment Name: At_Drought_cDNA_P Parameter: Treatment Value: Drought vs. No Drought
  misc_feature: MA Experiment ID: 108585 Result: Up-regulated in Transcription
  misc_feature: MA Experiment 108585 PARAMETER Experiment Name: At_5mM_NaNP_cDNA_P Parameter: Timepoint (hr) Value: 6
  misc_feature: MA Experiment 108585 PARAMETER Experiment Name: At_5mM_NaNP_cDNA_P Parameter: Tissue Value: Aerial
  misc_feature: MA Experiment 108585 PARAMETER Experiment Name: At_5mM_NaNP_cDNA_P Parameter: Treatment Value: null

SEQ ID NO: 35622 - protein, 233 aa, Arabidopsis thaliana; identical to SEQ ID NO: 25662
  peptide (1)..(233): Ceres Seq. ID no. 13487338
  misc_feature (9)..(191): Pfam Name: Proteasome A-type and B-type Pfam Description: Proteasome A-type and B-type
  misc_feature (9)..(191): Pfam Name: Proteasome A-type and B-type Pfam Description: Proteasome A-type and B-type
  misc_feature (10)..(206): Homolog of NCBI NO: 26347247 NR Description: unnamed protein product [Mus musculus]
  misc_feature (10)..(206): Homolog of NCBI NO: 17380261 NR Description: Proteasome subunit beta type 6 precursor delta chain) (Macropain delta chain) (Multicatalytic
  misc_feature (1)..(209): Homolog of NCBI NO: 5823090 NR Description: proteasome delta [Oncorhynchus mykiss]
  misc_feature (11)..(204): Homolog of NCBI NO: 19113087 NR Description: proteasome component precursor
  misc_feature (5)..(209): Homolog of NCBI NO: 7435894 NR Description: proteasome subunit 1 - slime mold (Dictyostelium
  misc_feature (10)..(206): Homolog of NCBI NO: 26347247 NR Description: unnamed protein product [Mus musculus]
  misc_feature (1)..(209): Homolog of NCBI NO: 5823090 NR Description: proteasome delta [Oncorhynchus mykiss]
  misc_feature (5)..(209): Homolog of NCBI NO: 7435894 NR Description: proteasome subunit 1 - slime mold (Dictyostelium
  misc_feature (1)..(233): Homolog of NCBI NO: 15235889 NR Description: 20S proteasome beta subunit A (PBA1) [Arabidopsis
  misc_feature (11)..(233): Homolog of NCBI NO: 21592365 NR Description: multicatalytic endopeptidase complex, proteasome
  misc_feature (4)..(231): Homolog of NCBI NO: 3024440 NR Description: Proteasome subunit beta type 6 precursor
  misc_feature (1)..(231): Homolog of NCBI NO: 8671502 NR Description: beta 1 subunit of 20S proteasome
  misc_feature (2)..(209): Homolog of NCBI NO: 32400975 NR Description: proteasome subunit [Griffithsia japonica]
  misc_feature (11)..(204): Homolog of NCBI NO: 19113087 NR Description: proteasome component precursor
  misc_feature (10)..(206): Homolog of NCBI NO: 17380261 NR Description: Proteasome subunit beta type 6 precursor delta chain) (Macropain delta chain) (Multicatalytic
  misc_feature (2)..(209): Homolog of NCBI NO: 32400975 NR Description: proteasome subunit [Griffithsia japonica]
  misc_feature (1)..(231): Homolog of NCBI NO: 8671502 NR Description: beta 1 subunit of 20S proteasome
  misc_feature (4)..(231): Homolog of NCBI NO: 3024440 NR Description: Proteasome subunit beta type 6 precursor
  misc_feature (11)..(233): Homolog of NCBI NO: 21592365 NR Description: multicatalytic endopeptidase complex, proteasome
  misc_feature (1)..(233): Homolog of NCBI NO: 15235889 NR Description: 20S proteasome beta subunit A (PBA1) [Arabidopsis

SEQ ID NO: 35623 - protein, 223 aa, Arabidopsis thaliana; identical to SEQ ID NO: 25663
  peptide (1)..(223): Ceres Seq. ID no. 13487339
  misc_feature (1)..(181): Pfam Name: Proteasome A-type and B-type Pfam Description: Proteasome A-type and B-type
  misc_feature (1)..(181): Pfam Name: Proteasome A-type and B-type Pfam Description: Proteasome A-type and B-type
  misc_feature (1)..(196): Homolog of NCBI NO: 26347247 NR Description: unnamed protein product [Mus musculus]
  misc_feature (1)..(196): Homolog of NCBI NO: 17380261 NR Description: Proteasome subunit beta type 6 precursor delta chain) (Macropain delta chain) (Multicatalytic
  misc_feature (1)..(199): Homolog of NCBI NO: 5823090 NR Description: proteasome delta [Oncorhynchus mykiss]
  misc_feature (1)..(194): Homolog of NCBI NO: 19113087 NR Description: proteasome component precursor
  misc_feature (1)..(199): Homolog of NCBI NO: 7435894 NR Description: proteasome subunit 1 - slime mold (Dictyostelium
  misc_feature (1)..(196): Homolog of NCBI NO: 26347247 NR Description: unnamed protein product [Mus musculus]
  misc_feature (1)..(199): Homolog of NCBI NO: 5823090 NR Description: proteasome delta [Oncorhynchus mykiss]
  misc_feature (1)..(199): Homolog of NCBI NO: 7435894 NR Description: proteasome subunit 1 - slime mold (Dictyostelium
  misc_feature (1)..(223): Homolog of NCBI NO: 15235889 NR Description: 20S proteasome beta subunit A (PBA1) [Arabidopsis
  misc_feature (1)..(223): Homolog of NCBI NO: 21592365 NR Description: multicatalytic endopeptidase complex, proteasome
  misc_feature (1)..(221): Homolog of NCBI NO: 3024440 NR Description: Proteasome subunit beta type 6 precursor
  misc_feature (1)..(221): Homolog of NCBI NO: 8671502 NR Description: beta 1 subunit of 20S proteasome
  misc_feature (1)..(199): Homolog of NCBI NO: 32400975 NR Description: proteasome subunit [Griffithsia japonica]
  misc_feature (1)..(194): Homolog of NCBI NO: 19113087 NR Description: proteasome component precursor
  misc_feature (1)..(196): Homolog of NCBI NO: 17380261 NR Description: Proteasome subunit beta type 6 precursor delta chain) (Macropain delta chain) (Multicatalytic
  misc_feature (1)..(199): Homolog of NCBI NO: 32400975 NR Description: proteasome subunit [Griffithsia japonica]
  misc_feature (1)..(221): Homolog of NCBI NO: 8671502 NR Description: beta 1 subunit of 20S proteasome
  misc_feature (1)..(221): Homolog of NCBI NO: 3024440 NR Description: Proteasome subunit beta type 6 precursor
  misc_feature (1)..(223): Homolog of NCBI NO: 21592365 NR Description: multicatalytic endopeptidase complex, proteasome
  misc_feature (1)..(223): Homolog of NCBI NO: 15235889 NR Description: 20S proteasome beta subunit A (PBA1) [Arabidopsis

SEQ ID NO: 35624 - protein, 198 aa, Arabidopsis thaliana; identical to SEQ ID NO: 25664
  peptide (1)..(198): Ceres Seq. ID no. 13487340
  misc_feature (1)..(156): Pfam Name: Proteasome A-type and B-type Pfam Description: Proteasome A-type and B-type
  misc_feature (1)..(156): Pfam Name: Proteasome A-type and B-type Pfam Description: Proteasome A-type and B-type
  misc_feature (1)..(171): Homolog of NCBI NO: 26347247 NR Description: unnamed protein product [Mus musculus]
  misc_feature (1)..(171): Homolog of NCBI NO: 17380261 NR Description: Proteasome subunit beta type 6 precursor delta chain) (Macropain delta chain) (Multicatalytic
  misc_feature (1)..(174): Homolog of NCBI NO: 5823090 NR Description: proteasome delta [Oncorhynchus mykiss]
  misc_feature (1)..(169): Homolog of NCBI NO: 19113087 NR Description: proteasome component precursor
  misc_feature (1)..(174): Homolog of NCBI NO: 7435894 NR Description: proteasome subunit 1 - slime mold (Dictyostelium
  misc_feature (1)..(171): Homolog of NCBI NO: 26347247 NR Description: unnamed protein product [Mus musculus]
  misc_feature (1)..(174): Homolog of NCBI NO: 5823090 NR Description: proteasome delta [Oncorhynchus mykiss]
  misc_feature (1)..(174): Homolog of NCBI NO: 7435894 NR Description: proteasome subunit 1 - slime mold (Dictyostelium
  misc_feature (1)..(198): Homolog of NCBI NO: 15235889 NR Description: 20S proteasome beta subunit A (PBA1) [Arabidopsis
  misc_feature (1)..(198): Homolog of NCBI NO: 21592365 NR Description: multicatalytic endopeptidase complex, proteasome
  misc_feature (1)..(196): Homolog of NCBI NO: 3024440 NR Description: Proteasome subunit beta type 6 precursor
  misc_feature (1)..(196): Homolog of NCBI NO: 8671502 NR Description: beta 1 subunit of 20S proteasome
  misc_feature (1)..(174): Homolog of NCBI NO: 32400975 NR Description: proteasome subunit [Griffithsia japonica]
  misc_feature (1)..(169): Homolog of NCBI NO: 19113087 NR Description: proteasome component precursor
  misc_feature (1)..(171): Homolog of NCBI NO: 17380261 NR Description: Proteasome subunit beta type 6 precursor delta chain) (Macropain delta chain) (Multicatalytic
  misc_feature (1)..(174): Homolog of NCBI NO: 32400975 NR Description: proteasome subunit [Griffithsia japonica]
  misc_feature (1)..(196): Homolog of NCBI NO: 8671502 NR Description: beta 1 subunit of 20S proteasome
  misc_feature (1)..(196): Homolog of NCBI NO: 3024440 NR Description: Proteasome subunit beta type 6 precursor
  misc_feature (1)..(198): Homolog of NCBI NO: 21592365 NR Description: multicatalytic endopeptidase complex, proteasome
  misc_feature (1)..(198): Homolog of NCBI NO: 15235889 NR Description: 20S proteasome beta subunit A (PBA1) [Arabidopsis

SEQ ID NO: 35625 - DNA, 803 bp, Arabidopsis thaliana
  misc_feature (1)..(803): Ceres Seq. ID no. 12324009
  misc_feature: MA Experiment ID: 108434 Result: Down-regulated in Transcription
  misc_feature: MA Experiment 108434 PARAMETER Experiment Name: At_Root_Tips_cDNA_P Parameter: Tissue Value: Root Tips
  misc_feature: MA Experiment ID: 108435 Result: Down-regulated in Transcription
  misc_feature: MA Experiment 108435 PARAMETER Experiment Name: At_stm_Mutants_cDNA_P Parameter: Plant Line Value: wt Landsburg vs stm
  misc_feature: MA Experiment 108435 PARAMETER Experiment Name: At_stm_Mutants_cDNA_P Parameter: Tissue Value: Shoot Apical Meristem Region
  misc_feature: MA Experiment ID: 108461 Result: Up-regulated in Transcription
  misc_feature: MA Experiment 108461 PARAMETER Experiment Name: At_Germinating_Seeds_cDNA_P Parameter: Age (day) Value: 1 vs. 0
  misc_feature: MA Experiment 108461 PARAMETER Experiment Name: At_Germinating_Seeds_cDNA_P Parameter: Tissue Value: Germinating Seeds
  misc_feature: MA Experiment ID: 108462 Result: Up-regulated in Transcription
  misc_feature: MA Experiment 108462 PARAMETER Experiment Name: At_Germinating_Seeds_cDNA_P Parameter: Age (day) Value: 2 vs. 0
  misc_feature: MA Experiment 108462 PARAMETER Experiment Name: At_Germinating_Seeds_cDNA_P Parameter: Tissue Value: Germinating Seeds
  misc_feature: MA Experiment ID: 108463 Result: Up-regulated in Transcription
  misc_feature: MA Experiment 108463 PARAMETER Experiment Name: At_Germinating_Seeds_cDNA_P Parameter: Age (day) Value: 3 vs. 0
  misc_feature: MA Experiment 108463 PARAMETER Experiment Name: At_Germinating_Seeds_cDNA_P Parameter: Tissue Value: Germinating Seeds
  misc_feature: MA Experiment ID: 108464 Result: Up-regulated in Transcription
  misc_feature: MA Experiment 108464 PARAMETER Experiment Name: At_Germinating_Seeds_cDNA_P Parameter: Age (day) Value: 4 vs. 0
  misc_feature: MA Experiment 108464 PARAMETER Experiment Name: At_Germinating_Seeds_cDNA_P Parameter: Tissue Value: Germinating Seeds
  misc_feature: MA Experiment ID: 108488 Result: Up-regulated in Transcription
  misc_feature: MA Experiment ID: 108573 Result: Down-regulated in Transcription
  misc_feature: MA Experiment 108573 PARAMETER Experiment Name: At_Drought_cDNA_P Parameter: Timepoint (hr) Value: 6
  misc_feature: MA Experiment 108573 PARAMETER Experiment Name: At_Drought_cDNA_P Parameter: Tissue Value: Aerial
  misc_feature: MA Experiment 108573 PARAMETER Experiment Name: At_Drought_cDNA_P Parameter: Treatment Value: Drought vs. No Drought
  misc_feature: MA Experiment ID: 108595 Result: Down-regulated in Transcription
  misc_feature: MA Experiment 108595 PARAMETER Experiment Name: At_Ler-pi_Ovule_cDNA_P Parameter: Plant Line Value: null
  misc_feature: MA Experiment ID: 20000070 Result: Down-regulated in Transcription
  misc_feature: MA Experiment 20000070 PARAMETER Experiment Name: At_100uM_ABA_Mutants_cDNA_P Parameter: Plant Line Value: CS24
  misc_feature: MA Experiment 20000070 PARAMETER Experiment Name: At_100uM_ABA_Mutants_cDNA_P Parameter: Timepoint (hr) Value: 6
  misc_feature: MA Experiment 20000070 PARAMETER Experiment Name: At_100uM_ABA_Mutants_cDNA_P Parameter: Tissue Value: Aerial
  misc_feature: MA Experiment 20000070 PARAMETER Experiment Name: At_100uM_ABA_Mutants_cDNA_P Parameter: Treatment Value: 100uM ABA vs. No Treatment
  misc_feature: MA Experiment ID: 20000071 Result: Down-regulated in Transcription
  misc_feature: MA Experiment 20000071 PARAMETER Experiment Name: At_100uM_ABA_Mutants_cDNA_P Parameter: Plant Line Value: CS8104
  misc_feature: MA Experiment 20000071 PARAMETER Experiment Name: At_100uM_ABA_Mutants_cDNA_P Parameter: Timepoint (hr) Value: 6
  misc_feature: MA Experiment 20000071 PARAMETER Experiment Name: At_100uM_ABA_Mutants_cDNA_P Parameter: Tissue Value: Aerial
  misc_feature: MA Experiment 20000071 PARAMETER Experiment Name: At_100uM_ABA_Mutants_cDNA_P Parameter: Treatment Value: 100uM ABA vs. No Treatment
  misc_feature: MA Experiment ID: 20000072 Result: Down-regulated in Transcription
  misc_feature: MA Experiment 20000072 PARAMETER Experiment Name: At_100uM_ABA_Mutants_cDNA_P Parameter: Plant Line Value: CS8105
  misc_feature: MA Experiment 20000072 PARAMETER Experiment Name: At_100uM_ABA_Mutants_cDNA_P Parameter: Timepoint (hr) Value: 6
  misc_feature: MA Experiment 20000072 PARAMETER Experiment Name: At_100uM_ABA_Mutants_cDNA_P Parameter: Tissue Value: Aerial
  misc_feature: MA Experiment 20000072 PARAMETER Experiment Name: At_100uM_ABA_Mutants_cDNA_P Parameter: Treatment Value: 100uM ABA vs. No Treatment
  misc_feature: MA Experiment ID: 20000087 Result: Down-regulated in Transcription
  misc_feature: MA Experiment 20000087 PARAMETER Experiment Name: At_100uM_ABA_Mutants_cDNA_P Parameter: Plant Line Value: WS
  misc_feature: MA Experiment 20000087 PARAMETER Experiment Name: At_100uM_ABA_Mutants_cDNA_P Parameter: Timepoint (hr) Value: 6
  misc_feature: MA Experiment 20000087 PARAMETER Experiment Name: At_100uM_ABA_Mutants_cDNA_P Parameter: Tissue Value: Aerial
  misc_feature: MA Experiment 20000087 PARAMETER Experiment Name: At_100uM_ABA_Mutants_cDNA_P Parameter: Treatment Value: 100uM ABA vs. No Treatment
  misc_feature: MA Experiment ID: 20000088 Result: Down-regulated in Transcription
  misc_feature: MA Experiment 20000088 PARAMETER Experiment Name: At_100uM_ABA_Mutants_cDNA_P Parameter: Plant Line Value: Landsberg
  misc_feature: MA Experiment 20000088 PARAMETER Experiment Name: At_100uM_ABA_Mutants_cDNA_P Parameter: Timepoint (hr) Value: 6
  misc_feature: MA Experiment 20000088 PARAMETER Experiment Name: At_100uM_ABA_Mutants_cDNA_P Parameter: Tissue Value: Aerial
  misc_feature: MA Experiment 20000088 PARAMETER Experiment Name: At_100uM_ABA_Mutants_cDNA_P Parameter: Treatment Value: 100uM ABA vs. No Treatment
  misc_feature: MA Experiment ID: 20000180 Result: Up-regulated in Transcription
  misc_feature: MA Experiment 20000180 PARAMETER Experiment Name: At_Germinating_Seeds_P Parameter: Age (hr) Value: 24 vs. 0
  misc_feature: MA Experiment 20000180 PARAMETER Experiment Name: At_Germinating_Seeds_P Parameter: Tissue Value: Germinating Seeds
  misc_feature: MA Experiment ID: 20000185 Result: Down-regulated in Transcription
  misc_feature: MA Experiment 20000185 PARAMETER Experiment Name: At_Roots__P Parameter: Age (day) Value: 7 vs. 21
  misc_feature: MA Experiment 20000185 PARAMETER Experiment Name: At_Roots__P Parameter: Organism Value: A. thaliana
  misc_feature: MA Experiment 20000185 PARAMETER Experiment Name: At_Roots__P Parameter: Tissue Value: Roots vs. Whole Plant
  misc_feature: MA Experiment ID: 20000224 Result: Up-regulated in Transcription
  misc_feature: MA Experiment ID: 20000235 Result: Up-regulated in Transcription
  misc_feature: MA Experiment 20000235 PARAMETER Experiment Name: At_Siliques_P Parameter: Age (day) Value: 21
  misc_feature: MA Experiment 20000235 PARAMETER Experiment Name: At_Siliques_P Parameter: Organism Value: A. thaliana
  misc_feature: MA Experiment 20000235 PARAMETER Experiment Name: At_Siliques_P Parameter: Plant Line Value: WS
  misc_feature: MA Experiment 20000235 PARAMETER Experiment Name: At_Siliques_P Parameter: Tissue Value: 5-10mm Siliques vs. Whole Plant
  misc_feature: MA Experiment ID: 20000439 Result: Down-regulated in Transcription
  misc_feature: MA Experiment 20000439 PARAMETER Experiment Name: At_Roots__P Parameter: Age (day) Value: 14 vs. 21
  misc_feature: MA Experiment 20000439 PARAMETER Experiment Name: At_Roots__P Parameter: Organism Value: A. thaliana
  misc_feature: MA Experiment 20000439 PARAMETER Experiment Name: At_Roots__P Parameter: Tissue Value: Roots vs. Whole Plant
  misc_feature: MA Experiment ID: 20000794 Result: Down-regulated in Transcription
  misc_feature: MA Experiment 20000794 PARAMETER Experiment Name: At_Petals_P Parameter: Age (day) Value: 23-25 days
  misc_feature: MA Experiment 20000794 PARAMETER Experiment Name: At_Petals_P Parameter: Plant Line Value: WS
  misc_feature: MA Experiment 20000794 PARAMETER Experiment Name: At_Petals_P Parameter: Tissue Value: Petals vs. Whole plant
  misc_feature: MA Experiment ID: 20001248 Result: Down-regulated in Transcription
  misc_feature: MA Experiment 20001248 PARAMETER Experiment Name: At_Far-red-induction_P Parameter: Age (day) Value: 7
  misc_feature: MA Experiment 20001248 PARAMETER Experiment Name: At_Far-red-induction_P Parameter: Light Value: Far-red vs. White
  misc_feature: MA Experiment 20001248 PARAMETER Experiment Name: At_Far-red-induction_P Parameter: Organism Value: A. thaliana
  misc_feature: MA Experiment 20001248 PARAMETER Experiment Name: At_Far-red-induction_P Parameter: Plant Line Value: Columbia
  misc_feature: MA Experiment 20001248 PARAMETER Experiment Name: At_Far-red-induction_P Parameter: Timepoint (hr) Value: 4
  misc_feature: MA Experiment 20001248 PARAMETER Experiment Name: At_Far-red-induction_P Parameter: Tissue Value: Whole Plant
  misc_feature: MA Experiment ID: 20001450 Result: Down-regulated in Transcription
  misc_feature: MA Experiment 20001450 PARAMETER Experiment Name: At_Far-red-induction_P Parameter: Age (day) Value: 7
  misc_feature: MA Experiment 20001450 PARAMETER Experiment Name: At_Far-red-induction_P Parameter: Light Value: Far-red vs. White
  misc_feature: MA Experiment 20001450 PARAMETER Experiment Name: At_Far-red-induction_P Parameter: Organism Value: A. thaliana
  misc_feature: MA Experiment 20001450 PARAMETER Experiment Name: At_Far-red-induction_P Parameter: Plant Line Value: Columbia
  misc_feature: MA Experiment 20001450 PARAMETER Experiment Name: At_Far-red-induction_P Parameter: Timepoint (hr) Value: 8
  misc_feature: MA Experiment 20001450 PARAMETER Experiment Name: At_Far-red-induction_P Parameter: Tissue Value: Whole Plant
  misc_feature: MA Experiment ID: 20001906 Result: Down-regulated in Transcription
  misc_feature: MA Experiment 20001906 PARAMETER Experiment Name: At_Drought_Reproduction_P Parameter: Age (day) Value: 35
  misc_feature: MA Experiment 20001906 PARAMETER Experiment Name: At_Drought_Reproduction_P Parameter: Organism Value: A. thaliana
  misc_feature: MA Experiment 20001906 PARAMETER Experiment Name: At_Drought_Reproduction_P Parameter: Plant Line Value: WS
  misc_feature: MA Experiment 20001906 PARAMETER Experiment Name: At_Drought_Reproduction_P Parameter: Timepoint (day) Value: 5
  misc_feature: MA Experiment 20001906 PARAMETER Experiment Name: At_Drought_Reproduction_P Parameter: Tissue Value: Siliques
  misc_feature: MA Experiment 20001906 PARAMETER Experiment Name: At_Drought_Reproduction_P Parameter: Treatment Value: Drought vs. No Drought
  misc_feature: MA Experiment ID: 20001908 Result: Down-regulated in Transcription
  misc_feature: MA Experiment 20001908 PARAMETER Experiment Name: At_Drought_Reproduction_P Parameter: Age (day) Value: 40
  misc_feature: MA Experiment 20001908 PARAMETER Experiment Name: At_Drought_Reproduction_P Parameter: Organism Value: A. thaliana
  misc_feature: MA Experiment 20001908 PARAMETER Experiment Name: At_Drought_Reproduction_P Parameter: Plant Line Value: WS
  misc_feature: MA Experiment 20001908 PARAMETER Experiment Name: At_Drought_Reproduction_P Parameter: Timepoint (day) Value: 10
  misc_feature: MA Experiment 20001908 PARAMETER Experiment Name: At_Drought_Reproduction_P Parameter: Tissue Value: Siliques
  misc_feature: MA Experiment 20001908 PARAMETER Experiment Name: At_Drought_Reproduction_P Parameter: Treatment Value: Drought vs. No Drought
aatttctgccttacatatcaaaagatagaacacacacacaaataaagcaaagaaacagaatatctttgagatctcctctttatttggagaagacaaaacacagaacaagaattagaaagaagggagagaaagcaaaaatggcactaagaatgtgggcttcttctacagcaaacgctctcaagctttcttcttctgtttccaagtctcatctctctcctttctccttctctagatgcttctccacagttttggagggtttgaagtatgcaaattcacatgagtgggttaaacatgaaggctctgttgccaccattggcatcactgcccatgctcaggaccatttaggtgaagtggtgtttgttgaactgccagaggacaatacttcagtgagcaaagagaaaagctttggagcagtggagagtgtgaaggcaacaagtgagatcttatcaccaatctcaggtgaaatcattgaggttaacaagaagctcacagaatcacctggcttgatcaactcaagcccctatgaagatggttggatgatcaaagtgaaaccaagtagccccgcggagttggaatctttgatgggtccaaaggaatacaccaagttctgcgaggaggaagatgctgctcactaggagggtttctctctgtcttttatgttccaagttctatcaattctcatgcttgttttctaaatttgcatacactctatgaccaacttcacaaaataagagttcaagaagatgaaacagagacctaacaaacacattaagattttttctttcatatatcttgttatcccc

SEQ ID NO: 35626 - protein, 210 aa, Arabidopsis thaliana
  peptide (1)..(210): Ceres Seq. ID no. 12324010
  misc_feature (86)..(206): Pfam Name: Glycine cleavage H-protein Pfam Description: Glycine cleavage H-protein
  misc_feature (46)..(209): Homolog of NCBI NO: 1362140 NR Description: H-protein precursor - Flaveria trinervia
  misc_feature (47)..(210): Homolog of NCBI NO: 2119600 NR Description: glycine cleavage system protein H precursor
  misc_feature (46)..(210): Homolog of NCBI NO: 3688309 NR Description: H-Protein precursor [Flaveria pringlei]
  misc_feature (46)..(210): Homolog of NCBI NO: 1346118 NR Description: Glycine cleavage system H protein, mitochondrial
  misc_feature (46)..(210): Homolog of NCBI NO: 2887286 NR Description: H protein [Flaveria anomala]
  misc_feature (46)..(210): Homolog of NCBI NO: 2499417 NR Description: Glycine cleavage system H protein, mitochondrial
  misc_feature (46)..(210): Homolog of NCBI NO: 2147453 NR Description: glycine cleavage system protein H precursor
  misc_feature (46)..(210): Homolog of NCBI NO: 121080 NR Description: Glycine cleavage system H protein, mitochondrial
  misc_feature (46)..(210): Homolog of NCBI NO: 15223217 NR Description: glycine cleavage system H protein precursor,
  misc_feature (46)..(210): Homolog of NCBI NO: 15226973 NR Description: glycine decarboxylase complex H-protein
FLPYISKDRTHTQIKQRNRISLRSPLYLEKTKHRTRIRKKGEKAKMALRMWASSTANALKLSSSVSKSHLSPFSFSRCFSTVLEGLKYANSHEWVKHEGSVATIGITAHAQDHLGEVVFVELPEDNTSVSKEKSFGAVESVKATSEILSPISGEIIEVNKKLTESPGLINSSPYEDGWMIKVKPSSPAELESLMGPKEYTKFCEEEDAAH

SEQ ID NO: 35627 - protein, 165 aa, Arabidopsis thaliana
  peptide (1)..(165): Ceres Seq. ID no. 12324011
  misc_feature (41)..(161): Pfam Name: Glycine cleavage H-protein Pfam Description: Glycine cleavage H-protein
  misc_feature (1)..(164): Homolog of NCBI NO: 1362140 NR Description: H-protein precursor - Flaveria trinervia
  misc_feature (2)..(165): Homolog of NCBI NO: 2119600 NR Description: glycine cleavage system protein H precursor
  misc_feature (1)..(165): Homolog of NCBI NO: 3688309 NR Description: H-Protein precursor [Flaveria pringlei]
  misc_feature (1)..(165): Homolog of NCBI NO: 1346118 NR Description: Glycine cleavage system H protein, mitochondrial
  misc_feature (1)..(165): Homolog of NCBI NO: 2887286 NR Description: H protein [Flaveria anomala]
  misc_feature (1)..(165): Homolog of NCBI NO: 2499417 NR Description: Glycine cleavage system H protein, mitochondrial
  misc_feature (1)..(165): Homolog of NCBI NO: 2147453 NR Description: glycine cleavage system protein H precursor
  misc_feature (1)..(165): Homolog of NCBI NO: 121080 NR Description: Glycine cleavage system H protein, mitochondrial
  misc_feature (1)..(165): Homolog of NCBI NO: 15223217 NR Description: glycine cleavage system H protein precursor,
  misc_feature (1)..(165): Homolog of NCBI NO: 15226973 NR Description: glycine decarboxylase complex H-protein
MALRMWASSTANALKLSSSVSKSHLSPFSFSRCFSTVLEGLKYANSHEWVKHEGSVATIGITAHAQDHLGEVVFVELPEDNTSVSKEKSFGAVESVKATSEILSPISGEIIEVNKKLTESPGLINSSPYEDGWMIKVKPSSPAELESLMGPKEYTKFCEEEDAAH

SEQ ID NO: 35628 - protein, 161 aa, Arabidopsis thaliana
  peptide (1)..(161): Ceres Seq. ID no. 12324012
  misc_feature (37)..(157): Pfam Name: Glycine cleavage H-protein Pfam Description: Glycine cleavage H-protein
  misc_feature (1)..(160): Homolog of NCBI NO: 1362140 NR Description: H-protein precursor - Flaveria trinervia
  misc_feature (1)..(161): Homolog of NCBI NO: 2119600 NR Description: glycine cleavage system protein H precursor
  misc_feature (1)..(161): Homolog of NCBI NO: 3688309 NR Description: H-Protein precursor [Flaveria pringlei]
  misc_feature (1)..(161): Homolog of NCBI NO: 1346118 NR Description: Glycine cleavage system H protein, mitochondrial
  misc_feature (1)..(161): Homolog of NCBI NO: 2887286 NR Description: H protein [Flaveria anomala]
  misc_feature (1)..(161): Homolog of NCBI NO: 2499417 NR Description: Glycine cleavage system H protein, mitochondrial
  misc_feature (1)..(161): Homolog of NCBI NO: 2147453 NR Description: glycine cleavage system protein H precursor
  misc_feature (1)..(161): Homolog of NCBI NO: 121080 NR Description: Glycine cleavage system H protein, mitochondrial
  misc_feature (1)..(161): Homolog of NCBI NO: 15223217 NR Description: glycine cleavage system H protein precursor,
  misc_feature (1)..(161): Homolog of NCBI NO: 15226973 NR Description: glycine decarboxylase complex H-protein
MWASSTANALKLSSSVSKSHLSPFSFSRCFSTVLEGLKYANSHEWVKHEGSVATIGITAHAQDHLGEVVFVELPEDNTSVSKEKSFGAVESVKATSEILSPISGEIIEVNKKLTESPGLINSSPYEDGWMIKVKPSSPAELESLMGPKEYTKFCEEEDAAH

SEQ ID NO: 35629 - DNA, 600 bp, Arabidopsis thaliana
  misc_feature (1)..(600): Ceres Seq. ID no. 12396869
  misc_feature: MA Experiment ID: 108434 Result: Up-regulated in Transcription
  misc_feature: MA Experiment 108434 PARAMETER Experiment Name: At_Root_Tips_cDNA_P Parameter: Tissue Value: Root Tips
  misc_feature: MA Experiment ID: 20000224 Result: Down-regulated in Transcription
acttgacaaatctgagcatttcctttttgcttacagcggaaatatctgaaccaacgcgatgccgtcgacgcagtccttgaccgtcgcagcgaagacgctacgaaatcggatcttctctaggtctggatctacatccgccggtccgagtcggtgggcgacgccaggtcacgaggagcgacctaagggttactttatgaaccgtactcctccggcaccaggacagtcgcgaaaatgggaagattgggagcttccttgttacatcaccagcttccttacaattgttatcctcggcgttggactcaatgccaaacctgatctttcaatcgagacttgggctcatcagaaagctttagagcgtcttgagatggagaagctcgcgaccgctggagattcatctgattaagcatcaccgttggatctccggttgcttgatttggtatgtccttattctccgggagttgaggagtttttttaccgtttaatgatgatgataacgaagactggagagttagggtttcgtttggcccttgaactttgtttcaattctcctttgttttgtcgataatgatgatgttcatgaaataagtgttcttttaactg

SEQ ID NO: 35630 - protein, 114 aa, Arabidopsis thaliana
  peptide (1)..(114): Ceres Seq. ID no. 12396870
  misc_feature (24)..(96): Homolog of NCBI NO: 29150398 NR Description: hypothetical protein [Oryza sativa (japonica
  misc_feature (1)..(104): Homolog of NCBI NO: 9858777 NR Description: BAC19.9 [Lycopersicon esculentum]
  misc_feature (1)..(113): Homolog of NCBI NO: 18410807 NR Description: Expressed protein
  misc_feature (1)..(113): Homolog of NCBI NO: 7485503 NR Description: hypothetical protein F15B8.20 - Arabidopsis
  misc_feature (1)..(114): Homolog of NCBI NO: 15227917 NR Description: unknown protein
MPSTQSLTVAAKTLRNRIFSRSGSTSAGPSRWATPGHEERPKGYFMNRTPPAPGQSRKWEDWELPCYITSFLTIVILGVGLNAKPDLSIETWAHQKALERLEMEKLATAGDSSD

SEQ ID NO: 35631 - protein, 69 aa, Arabidopsis thaliana
  peptide (1)..(69): Ceres Seq. ID no. 12396871
  misc_feature (1)..(51): Homolog of NCBI NO: 29150398 NR Description: hypothetical protein [Oryza sativa (japonica
  misc_feature (1)..(59): Homolog of NCBI NO: 9858777 NR Description: BAC19.9 [Lycopersicon esculentum]
  misc_feature (1)..(68): Homolog of NCBI NO: 18410807 NR Description: Expressed protein
  misc_feature (1)..(68): Homolog of NCBI NO: 7485503 NR Description: hypothetical protein F15B8.20 - Arabidopsis
  misc_feature (1)..(69): Homolog of NCBI NO: 15227917 NR Description: unknown protein
MNRTPPAPGQSRKWEDWELPCYITSFLTIVILGVGLNAKPDLSIETWAHQKALERLEMEKLATAGDSSD

SEQ ID NO: 35632 - DNA, 1399 bp, Arabidopsis thaliana
  misc_feature (1)..(1399): Ceres Seq. ID no. 13647068
  misc_feature: MA Experiment ID: 20000185 Result: Down-regulated in Transcription
  misc_feature: MA Experiment 20000185 PARAMETER Experiment Name: At_Roots__P Parameter: Age (day) Value: 7 vs. 21
  misc_feature: MA Experiment 20000185 PARAMETER Experiment Name: At_Roots__P Parameter: Organism Value: A. thaliana
  misc_feature: MA Experiment 20000185 PARAMETER Experiment Name: At_Roots__P Parameter: Tissue Value: Roots vs. Whole Plant
  misc_feature: MA Experiment ID: 20000439 Result: Down-regulated in Transcription
  misc_feature: MA Experiment 20000439 PARAMETER Experiment Name: At_Roots__P Parameter: Age (day) Value: 14 vs. 21
  misc_feature: MA Experiment 20000439 PARAMETER Experiment Name: At_Roots__P Parameter: Organism Value: A. thaliana
  misc_feature: MA Experiment 20000439 PARAMETER Experiment Name: At_Roots__P Parameter: Tissue Value: Roots vs. Whole Plant
  misc_feature: MA Experiment ID: 20000794 Result: Up-regulated in Transcription
  misc_feature: MA Experiment 20000794 PARAMETER Experiment Name: At_Petals_P Parameter: Age (day) Value: 23-25 days
  misc_feature: MA Experiment 20000794 PARAMETER Experiment Name: At_Petals_P Parameter: Plant Line Value: WS
  misc_feature: MA Experiment 20000794 PARAMETER Experiment Name: At_Petals_P Parameter: Tissue Value: Petals vs. Whole plant
  misc_feature: MA Experiment ID: 20001450 Result: Down-regulated in Transcription
  misc_feature: MA Experiment 20001450 PARAMETER Experiment Name: At_Far-red-induction_P Parameter: Age (day) Value: 7
  misc_feature: MA Experiment 20001450 PARAMETER Experiment Name: At_Far-red-induction_P Parameter: Light Value: Far-red vs. White
  misc_feature: MA Experiment 20001450 PARAMETER Experiment Name: At_Far-red-induction_P Parameter: Organism Value: A. thaliana
  misc_feature: MA Experiment 20001450 PARAMETER Experiment Name: At_Far-red-induction_P Parameter: Plant Line Value: Columbia
  misc_feature: MA Experiment 20001450 PARAMETER Experiment Name: At_Far-red-induction_P Parameter: Timepoint (hr) Value: 8
  misc_feature: MA Experiment 20001450 PARAMETER Experiment Name: At_Far-red-induction_P Parameter: Tissue Value: Whole Plant
aactattcatcatcttcgtttggatttggtttctttctgtttctgacaaaaaccaccggcaaaataaagcgactacgattccattttcaccggcgcttccgtgagacaacatctctccatcttggaactttttctaatggcattattactcctttctcactgctctatcttatcttttcaacctccattatcgtcttcttcttcatttcattcttcacatatccaatctctgagcaaaccagttttcgcttctccttccccaattcgaaattcaatttcttcgtccgtctcttcatcttcttcctccgttagtagctccaattcgattcctcaggtcgtcgtaacacgagaacgaggcaagaacaatcaaatcatcaaagctttggagaaaaatggcatatcatctttagagcttccgttgattcaacatgcgcgaggacctgatttcgatcggcttgcttctgtattaaatgataagagctttgactggatcatcataacatctccagaagcaggttctgtttttctcgaggcgtggaagacagctagctccccagaagtgcaaataggtgtagtaggagctggaacagccagggtatttgaagaggcaatgaaatcggcagatggattgcttcatgttgcctttacaccatcaaaagcaactggtaaagtcttggcttcggagcttccagagaaagttggcaaaaggtcctctgtcttatacccggcttctctaaaagcaggcaatgatattgtggaagggttgtccaaacgtgggtttgaagttgtcaggctgaatacatacacaacagttccggtgcagagtgttgatacggtgctcctgcaacaggcactatctgctcctgttctttctgtagcttctccttctgcagttcgcgcctggctgcatctgattcaaaatgaggagcaatggagcaattacgttgcctgcattggagagacaactgcatcagctgctagaagactaggattgaaaaacgtctactacccagagaaaccaggacttgaagggtgggtcgagagcataatggaagctctaggtgctcacgcagattcaagtaaccctagcagcaggaattgaattatacttgtgccatcctctcatagattttacttatggaggactttgagtttggtcagtgcctgtaatttagaggacagggaaaaagaaagcaaatgatgcttttgagaaaatactgaagcccttgtaagatatctcagatagcttttgtcgtacagtatatactcattaattattatgtgaatgctaagatcataaatgatcaaaaaacatgaacaaaaagcaatgttatgtagatgcaactaatccaaacttattatgtttgtttaataatttaataatataatgataagtcat

SEQ ID NO: 35633 - protein, 321 aa, Arabidopsis thaliana
  peptide (1)..(321): Ceres Seq. ID no. 13647069
  misc_feature (74)..(303): Pfam Name: Uroporphyrinogen-III synthase HemD Pfam Description: Uroporphyrinogen-III synthase HemD
  misc_feature (63)..(306): Homolog of NCBI NO: 15606833 NR Description: putative protein [Aquifex aeolicus]
  misc_feature (58)..(308): Homolog of NCBI NO: 15805812 NR Description: uroporphyrinogen-III synthase, putative
  misc_feature (159)..(231): Homolog of NCBI NO: 7487883 NR Description: hypothetical protein At2g26540 [imported] -
  misc_feature (226)..(321): Homolog of NCBI NO: 7487883 NR Description: hypothetical protein At2g26540 [imported] -
  misc_feature (130)..(321): Homolog of NCBI NO: 22045244 NR Description: unknown protein [Arabidopsis thaliana]
  misc_feature (1)..(321): Homolog of NCBI NO: 21592861 NR Description: uroporphyrinogen III synthase [Arabidopsis
  misc_feature (1)..(321): Homolog of NCBI NO: 18694346 NR Description: uroporphyrinogen III synthase [Arabidopsis
  misc_feature (1)..(321): Homolog of NCBI NO: 18401160 NR Description: expressed protein [Arabidopsis thaliana]
MALLLLSHCSILSFQPPLSSSSSFHSSHIQSLSKPVFASPSPIRNSISSSVSSSSSSVSSSNSIPQVVVTRERGKNNQIIKALEKNGISSLELPLIQHARGPDFDRLASVLNDKSFDWIIITSPEAGSVFLEAWKTASSPEVQIGVVGAGTARVFEEAMKSADGLLHVAFTPSKATGKVLASELPEKVGKRSSVLYPASLKAGNDIVEGLSKRGFEVVRLNTYTTVPVQSVDTVLLQQALSAPVLSVASPSAVRAWLHLIQNEEQWSNYVACIGETTASAARRLGLKNVYYPEKPGLEGWVESIMEALGAHADSSNPSSRN

SEQ ID NO: 35634 - protein, 163 aa, Arabidopsis thaliana
  peptide (1)..(163): Ceres Seq. ID no. 13647070
  misc_feature (1)..(145): Pfam Name: Uroporphyrinogen-III synthase HemD Pfam Description: Uroporphyrinogen-III synthase HemD
  misc_feature (1)..(148): Homolog of NCBI NO: 15606833 NR Description: putative protein [Aquifex aeolicus]
  misc_feature (1)..(150): Homolog of NCBI NO: 15805812 NR Description: uroporphyrinogen-III synthase, putative
  misc_feature (1)..(73): Homolog of NCBI NO: 7487883 NR Description: hypothetical protein At2g26540 [imported] -
  misc_feature (68)..(163): Homolog of NCBI NO: 7487883 NR Description: hypothetical protein At2g26540 [imported] -
  misc_feature (1)..(163): Homolog of NCBI NO: 22045244 NR Description: unknown protein [Arabidopsis thaliana]
  misc_feature (1)..(163): Homolog of NCBI NO: 21592861 NR Description: uroporphyrinogen III synthase [Arabidopsis
  misc_feature (1)..(163): Homolog of NCBI NO: 18694346 NR Description: uroporphyrinogen III synthase [Arabidopsis
  misc_feature (1)..(163): Homolog of NCBI NO: 18401160 NR Description: expressed protein [Arabidopsis thaliana]
MKSADGLLHVAFTPSKATGKVLASELPEKVGKRSSVLYPASLKAGNDIVEGLSKRGFEVVRLNTYTTVPVQSVDTVLLQQALSAPVLSVASPSAVRAWLHLIQNEEQWSNYVACIGETTASAARRLGLKNVYYPEKPGLEGWVESIMEALGAHADSSNPSSRN

SEQ ID NO: 35635 - DNA, 928 bp, Arabidopsis thaliana
  misc_feature (1)..(928): Ceres Seq. ID no. 13646019
  misc_feature: MA Experiment ID: 108434 Result: Down-regulated in Transcription
  misc_feature: MA Experiment 108434 PARAMETER Experiment Name: At_Root_Tips_cDNA_P Parameter: Tissue Value: Root Tips
  misc_feature: MA Experiment ID: 108461 Result: Down-regulated in Transcription
  misc_feature: MA Experiment 108461 PARAMETER Experiment Name: At_Germinating_Seeds_cDNA_P Parameter: Age (day) Value: 1 vs. 0
  misc_feature: MA Experiment 108461 PARAMETER Experiment Name: At_Germinating_Seeds_cDNA_P Parameter: Tissue Value: Germinating Seeds
  misc_feature: MA Experiment ID: 108488 Result: Down-regulated in Transcription
  misc_feature: MA Experiment ID: 108576 Result: Down-regulated in Transcription
  misc_feature: MA Experiment 108576 PARAMETER Experiment Name: At_42deg_Heat_cDNA_P Parameter: Temperature (deg C) Value: 42 vs. 22
  misc_feature: MA Experiment 108576 PARAMETER Experiment Name: At_42deg_Heat_cDNA_P Parameter: Timepoint (hr) Value: 1
  misc_feature: MA Experiment 108576 PARAMETER Experiment Name: At_42deg_Heat_cDNA_P Parameter: Tissue Value: Aerial
  misc_feature: MA Experiment ID: 108577 Result: Down-regulated in Transcription
  misc_feature: MA Experiment 108577 PARAMETER Experiment Name: At_42deg_Heat_cDNA_P Parameter: Temperature (deg C) Value: 42 vs. 22
  misc_feature: MA Experiment 108577 PARAMETER Experiment Name: At_42deg_Heat_cDNA_P Parameter: Timepoint (hr) Value: 6
  misc_feature: MA Experiment 108577 PARAMETER Experiment Name: At_42deg_Heat_cDNA_P Parameter: Tissue Value: Aerial
  misc_feature: MA Experiment ID: 108585 Result: Up-regulated in Transcription
  misc_feature: MA Experiment 108585 PARAMETER Experiment Name: At_5mM_NaNP_cDNA_P Parameter: Timepoint (hr) Value: 6
  misc_feature: MA Experiment 108585 PARAMETER Experiment Name: At_5mM_NaNP_cDNA_P Parameter: Tissue Value: Aerial
  misc_feature: MA Experiment 108585 PARAMETER Experiment Name: At_5mM_NaNP_cDNA_P Parameter: Treatment Value: null
  misc_feature: MA Experiment ID: 20000179 Result: Down-regulated in Transcription
  misc_feature: MA Experiment 20000179 PARAMETER Experiment Name: At_Germinating_Seeds_P Parameter: Age (hr) Value: 6 vs. 0
  misc_feature: MA Experiment 20000179 PARAMETER Experiment Name: At_Germinating_Seeds_P Parameter: Tissue Value: Germinating Seeds
  misc_feature: MA Experiment ID: 20000227 Result: Down-regulated in Transcription
  misc_feature: MA Experiment 20000227 PARAMETER Experiment Name: At_Root-Tips-vs-Tops_P Parameter: Tissue Value: Root Tips vs. Root Tops
  misc_feature: MA Experiment ID: 20000234 Result: Down-regulated in Transcription
  misc_feature: MA Experiment 20000234 PARAMETER Experiment Name: At_Siliques_P Parameter: Age (day) Value: 21
  misc_feature: MA Experiment 20000234 PARAMETER Experiment Name: At_Siliques_P Parameter: Organism Value: A. thaliana
  misc_feature: MA Experiment 20000234 PARAMETER Experiment Name: At_Siliques_P Parameter: Plant Line Value: WS
  misc_feature: MA Experiment 20000234 PARAMETER Experiment Name: At_Siliques_P Parameter: Tissue Value: Less Than 5mm Siliques vs. Whole Plant
  misc_feature: MA Experiment ID: 20000264 Result: Down-regulated in Transcription
  misc_feature: MA Experiment 20000264 PARAMETER Experiment Name: At_Open_Flower_P Parameter: Age (day) Value: 21
  misc_feature: MA Experiment 20000264 PARAMETER Experiment Name: At_Open_Flower_P Parameter: Plant Line Value: WS
  misc_feature: MA Experiment 20000264 PARAMETER Experiment Name: At_Open_Flower_P Parameter: Tissue Value: Open Flower vs. Whole Plant
  misc_feature: MA Experiment ID: 20000265 Result: Down-regulated in Transcription
  misc_feature: MA Experiment 20000265 PARAMETER Experiment Name: At_Open_Flower_P Parameter: Age (day) Value: 21
  misc_feature: MA Experiment 20000265 PARAMETER Experiment Name: At_Open_Flower_P Parameter: Plant Line Value: WS
  misc_feature: MA Experiment 20000265 PARAMETER Experiment Name: At_Open_Flower_P Parameter: Tissue Value: Closed Flower vs. Whole Plant
  misc_feature: MA Experiment ID: 20000286 Result: Down-regulated in Transcription
  misc_feature: MA Experiment 20000286 PARAMETER Experiment Name: At_Open_Flower_P Parameter: Age (day) Value: 21
  misc_feature: MA Experiment 20000286 PARAMETER Experiment Name: At_Open_Flower_P Parameter: Plant Line Value: WS
  misc_feature: MA Experiment 20000286 PARAMETER Experiment Name: At_Open_Flower_P Parameter: Tissue Value: Half Open vs. Whole Plant
  misc_feature: MA Experiment ID: 20000437 Result: Down-regulated in Transcription
  misc_feature: MA Experiment 20000437 PARAMETER Experiment Name: At_Drought_P Parameter: Age (day) Value: 8
  misc_feature: MA Experiment 20000437 PARAMETER Experiment Name: At_Drought_P Parameter: Organism Value: A. thaliana
  misc_feature: MA Experiment 20000437 PARAMETER Experiment Name: At_Drought_P Parameter: Plant Line Value: WS
  misc_feature: MA Experiment 20000437 PARAMETER Experiment Name: At_Drought_P Parameter: Timepoint (hr) Value: 24
  misc_feature: MA Experiment 20000437 PARAMETER Experiment Name: At_Drought_P Parameter: Tissue Value: Whole Plant
  misc_feature: MA Experiment 20000437 PARAMETER Experiment Name: At_Drought_P Parameter: Treatment Value: Drought vs. No Drought
  misc_feature: MA Experiment ID: 20000439 Result: Down-regulated in Transcription
  misc_feature: MA Experiment 20000439 PARAMETER Experiment Name: At_Roots__P Parameter: Age (day) Value: 14 vs. 21
  misc_feature: MA Experiment 20000439 PARAMETER Experiment Name: At_Roots__P Parameter: Organism Value: A. thaliana
  misc_feature: MA Experiment 20000439 PARAMETER Experiment Name: At_Roots__P Parameter: Tissue Value: Roots vs. Whole Plant
  misc_feature: MA Experiment ID: 20001247 Result: Up-regulated in Transcription
  misc_feature: MA Experiment 20001247 PARAMETER Experiment Name: At_Far-red-induction_P Parameter: Age (day) Value: 7
  misc_feature: MA Experiment 20001247 PARAMETER Experiment Name: At_Far-red-induction_P Parameter: Light Value: Far-red vs. White
  misc_feature: MA Experiment 20001247 PARAMETER Experiment Name: At_Far-red-induction_P Parameter: Organism Value: A. thaliana
  misc_feature: MA Experiment 20001247 PARAMETER Experiment Name: At_Far-red-induction_P Parameter: Plant Line Value: Columbia
  misc_feature: MA Experiment 20001247 PARAMETER Experiment Name: At_Far-red-induction_P Parameter: Timepoint (hr) Value: 1
  misc_feature: MA Experiment 20001247 PARAMETER Experiment Name: At_Far-red-induction_P Parameter: Tissue Value: Whole Plant
  misc_feature: MA Experiment ID: 20001248 Result: Up-regulated in Transcription
  misc_feature: MA Experiment 20001248 PARAMETER Experiment Name: At_Far-red-induction_P Parameter: Age (day) Value: 7
  misc_feature: MA Experiment 20001248 PARAMETER Experiment Name: At_Far-red-induction_P Parameter: Light Value: Far-red vs. White
  misc_feature: MA Experiment 20001248 PARAMETER Experiment Name: At_Far-red-induction_P Parameter: Organism Value: A. thaliana
  misc_feature: MA Experiment 20001248 PARAMETER Experiment Name: At_Far-red-induction_P Parameter: Plant Line Value: Columbia
  misc_feature: MA Experiment 20001248 PARAMETER Experiment Name: At_Far-red-induction_P Parameter: Timepoint (hr) Value: 4
  misc_feature: MA Experiment 20001248 PARAMETER Experiment Name: At_Far-red-induction_P Parameter: Tissue Value: Whole Plant
  misc_feature: MA Experiment ID: 20001450 Result: Up-regulated in Transcription
  misc_feature: MA Experiment 20001450 PARAMETER Experiment Name: At_Far-red-induction_P Parameter: Age (day) Value: 7
  misc_feature: MA Experiment 20001450 PARAMETER Experiment Name: At_Far-red-induction_P Parameter: Light Value: Far-red vs. White
  misc_feature: MA Experiment 20001450 PARAMETER Experiment Name: At_Far-red-induction_P Parameter: Organism Value: A. thaliana
  misc_feature: MA Experiment 20001450 PARAMETER Experiment Name: At_Far-red-induction_P Parameter: Plant Line Value: Columbia
  misc_feature: MA Experiment 20001450 PARAMETER Experiment Name: At_Far-red-induction_P Parameter: Timepoint (hr) Value: 8
  misc_feature: MA Experiment 20001450 PARAMETER Experiment Name: At_Far-red-induction_P Parameter: Tissue Value: Whole Plant
  misc_feature: MA Experiment ID: 20001451 Result: Up-regulated in Transcription
  misc_feature: MA Experiment 20001451 PARAMETER Experiment Name: At_Far-red-induction_P Parameter: Age (day) Value: 7
  misc_feature: MA Experiment 20001451 PARAMETER Experiment Name: At_Far-red-induction_P Parameter: Light Value: Far-red vs. White
  misc_feature: MA Experiment 20001451 PARAMETER Experiment Name: At_Far-red-induction_P Parameter: Organism Value: A. thaliana
  misc_feature: MA Experiment 20001451 PARAMETER Experiment Name: At_Far-red-induction_P Parameter: Plant Line Value: Columbia
  misc_feature: MA Experiment 20001451 PARAMETER Experiment Name: At_Far-red-induction_P Parameter: Timepoint (hr) Value: 24
  misc_feature: MA Experiment 20001451 PARAMETER Experiment Name: At_Far-red-induction_P Parameter: Tissue Value: Whole Plant
  misc_feature: MA Experiment ID: 20001555 Result: Down-regulated in Transcription
  misc_feature: MA Experiment 20001555 PARAMETER Experiment Name: At_Drought_Soil_Dry_P Parameter: Age (day) Value: 24
  misc_feature: MA Experiment 20001555 PARAMETER Experiment Name: At_Drought_Soil_Dry_P Parameter: Organism Value: A. thaliana
  misc_feature: MA Experiment 20001555 PARAMETER Experiment Name: At_Drought_Soil_Dry_P Parameter: Plant Line Value: WS
  misc_feature: MA Experiment 20001555 PARAMETER Experiment Name: At_Drought_Soil_Dry_P Parameter: Post Timepoint (hr) Value: None
  misc_feature: MA Experiment 20001555 PARAMETER Experiment Name: At_Drought_Soil_Dry_P Parameter: Post-Treatment Value: None
  misc_feature: MA Experiment 20001555 PARAMETER Experiment Name: At_Drought_Soil_Dry_P Parameter: Timepoint (day) Value: 10
  misc_feature: MA Experiment 20001555 PARAMETER Experiment Name: At_Drought_Soil_Dry_P Parameter: Treatment Value: Drought vs. No Drought
  misc_feature: MA Experiment ID: 20001556 Result: Down-regulated in Transcription
  misc_feature: MA Experiment 20001556 PARAMETER Experiment Name: At_Drought_Soil_Dry_P Parameter: Age (day) Value: 26
  misc_feature: MA Experiment 20001556 PARAMETER Experiment Name: At_Drought_Soil_Dry_P Parameter: Organism Value: A. thaliana
  misc_feature: MA Experiment 20001556 PARAMETER Experiment Name: At_Drought_Soil_Dry_P Parameter: Plant Line Value: WS
  misc_feature: MA Experiment 20001556 PARAMETER Experiment Name: At_Drought_Soil_Dry_P Parameter: Post Timepoint (hr) Value: None
  misc_feature: MA Experiment 20001556 PARAMETER Experiment Name: At_Drought_Soil_Dry_P Parameter: Post-Treatment Value: None
  misc_feature: MA Experiment 20001556 PARAMETER Experiment Name: At_Drought_Soil_Dry_P Parameter: Timepoint (day) Value: 12
  misc_feature: MA Experiment 20001556 PARAMETER Experiment Name: At_Drought_Soil_Dry_P Parameter: Treatment Value: Drought vs. No Drought
  misc_feature: MA Experiment ID: 20001905 Result: Down-regulated in Transcription
  misc_feature: MA Experiment 20001905 PARAMETER Experiment Name: At_Drought_Reproduction_P Parameter: Age (day) Value: 40
  misc_feature: MA Experiment 20001905 PARAMETER Experiment Name: At_Drought_Reproduction_P Parameter: Organism Value: A. thaliana
  misc_feature: MA Experiment 20001905 PARAMETER Experiment Name: At_Drought_Reproduction_P Parameter: Plant Line Value: WS
  misc_feature: MA Experiment 20001905 PARAMETER Experiment Name: At_Drought_Reproduction_P Parameter: Timepoint (day) Value: 10
  misc_feature: MA Experiment 20001905 PARAMETER Experiment Name: At_Drought_Reproduction_P Parameter: Tissue Value: Rosettes
  misc_feature: MA Experiment 20001905 PARAMETER Experiment Name: At_Drought_Reproduction_P Parameter: Treatment Value: Drought vs. No Drought
tggttttctgttctgtcctaatttctctctggcgaaagctaagaggtttcggttacggtctccatctccgatcaaatcacgaagtttctatcggaaattttcagtgatacataccgtcagagattttctttacgagagaattgtcgccgacatactaaagcagagttttgggtgggaattagtaagatttcgactttagaattgggagatctttccattatgggttctgagcaaaacgacagcacaagcttctctccttcagagccaaagctctgcgtcaaaggatgtggcttcttcggatctccatcgaacatgaacctctgctctaaatgctacagagacatccgagccacggaggaacaaaccgcttccgctaaagccgccgtcgagaaatctctaaaccctaataaacccaaaactcaaccacaacagagccaagaaatcactcaaggcgtcctcggatctggatcgtcttcctcatcaacgagagggggtgattcggctgctgctccgttggatccaccgaaatcgacggctacgagatgcttgagctgtaacaagaaagttggcgtgacgggtttcaagtgtaggtgtggaagcactttctgtggaactcatagatatccagagagtcacgagtgccaattcgatttcaaaggagttgcgagagaagctattgctaaagctaatcctgtggtgaaggctgataaggttgataggatatgaattggtgaagaaactgttgtgttctcttttgtttttttattttcaagtctcgtgatgttggtggtttggctctctgttttctgctcttattatggttttatttgcttttagggtttcttaggaaaggccttagattctgctattatgtggtttcatgttttgcaacattggatttgttgttctgtaataaagtgttggttat

SEQ ID NO: 35636 - protein, 168 aa, Arabidopsis thaliana
  peptide (1)..(168): Ceres Seq. ID no. 13646020
  misc_feature (109)..(149): Pfam Name: AN1-like Zinc finger Pfam Description: AN1-like Zinc finger
  misc_feature (12)..(168): Homolog of NCBI NO: 18404102 NR Description: expressed protein [Arabidopsis thaliana]
  misc_feature (6)..(168): Homolog of NCBI NO: 25082726 NR Description: expressed protein [Arabidopsis thaliana]
  misc_feature (5)..(168): Homolog of NCBI NO: 30908921 NR Description: putative zinc finger transcription factor ZFP33
  misc_feature (6)..(168): Homolog of NCBI NO: 18403408 NR Description: expressed protein [Arabidopsis thaliana]
  misc_feature (4)..(168): Homolog of NCBI NO: 28269431 NR Description: putative zinc finger protein
  misc_feature (15)..(168): Homolog of NCBI NO: 15225894 NR Description: zinc finger protein -related [Arabidopsis
  misc_feature (1)..(167): Homolog of NCBI NO: 15235819 NR Description: zinc finger -related protein [Arabidopsis
  misc_feature (1)..(168): Homolog of NCBI NO: 15234402 NR Description: expressed protein [Arabidopsis thaliana]
  misc_feature (1)..(168): Homolog of NCBI NO: 15221329 NR Description: expressed protein [Arabidopsis thaliana]
  misc_feature (1)..(168): Homolog of NCBI NO: 8778645 NR Description: F5O11.17 [Arabidopsis thaliana]
MGSEQNDSTSFSPSEPKLCVKGCGFFGSPSNMNLCSKCYRDIRATEEQTASAKAAVEKSLNPNKPKTQPQQSQEITQGVLGSGSSSSSTRGGDSAAAPLDPPKSTATRCLSCNKKVGVTGFKCRCGSTFCGTHRYPESHECQFDFKGVAREAIAKANPVVKADKVDRI

SEQ ID NO: 35637 - protein, 137 aa, Arabidopsis thaliana
  peptide (1)..(137): Ceres Seq. ID no. 13646021
  misc_feature (78)..(118): Pfam Name: AN1-like Zinc finger Pfam Description: AN1-like Zinc finger
  misc_feature (1)..(137): Homolog of NCBI NO: 18404102 NR Description: expressed protein [Arabidopsis thaliana]
  misc_feature (1)..(137): Homolog of NCBI NO: 25082726 NR Description: expressed protein [Arabidopsis thaliana]
  misc_feature (1)..(137): Homolog of NCBI NO: 30908921 NR Description: putative zinc finger transcription factor ZFP33
  misc_feature (1)..(137): Homolog of NCBI NO: 18403408 NR Description: expressed protein [Arabidopsis thaliana]
  misc_feature (1)..(137): Homolog of NCBI NO: 28269431 NR Description: putative zinc finger protein
  misc_feature (1)..(137): Homolog of NCBI NO: 15225894 NR Description: zinc finger protein -related [Arabidopsis
  misc_feature (1)..(136): Homolog of NCBI NO: 15235819 NR Description: zinc finger -related protein [Arabidopsis
  misc_feature (1)..(137): Homolog of NCBI NO: 15234402 NR Description: expressed protein [Arabidopsis thaliana]
  misc_feature (1)..(137): Homolog of NCBI NO: 15221329 NR Description: expressed protein [Arabidopsis thaliana]
  misc_feature (1)..(137): Homolog of NCBI NO: 8778645 NR Description: F5O11.17 [Arabidopsis thaliana]
MNLCSKCYRDIRATEEQTASAKAAVEKSLNPNKPKTQPQQSQEITQGVLGSGSSSSSTRGGDSAAAPLDPPKSTATRCLSCNKKVGVTGFKCRCGSTFCGTHRYPESHECQFDFKGVAREAIAKANPVVKADKVDRI

SEQ ID NO: 35638 - DNA, 974 bp, Arabidopsis thaliana
  misc_feature (1)..(974): Ceres Seq. ID no. 12333496
  misc_feature: MA Experiment ID: 108434 Result: Down-regulated in Transcription
  misc_feature: MA Experiment 108434 PARAMETER Experiment Name: At_Root_Tips_cDNA_P Parameter: Tissue Value: Root Tips
  misc_feature: MA Experiment ID: 108461 Result: Down-regulated in Transcription
  misc_feature: MA Experiment 108461 PARAMETER Experiment Name: At_Germinating_Seeds_cDNA_P Parameter: Age (day) Value: 1 vs. 0
  misc_feature: MA Experiment 108461 PARAMETER Experiment Name: At_Germinating_Seeds_cDNA_P Parameter: Tissue Value: Germinating Seeds
  misc_feature: MA Experiment ID: 108462 Result: Down-regulated in Transcription
  misc_feature: MA Experiment 108462 PARAMETER Experiment Name: At_Germinating_Seeds_cDNA_P Parameter: Age (day) Value: 2 vs. 0
  misc_feature: MA Experiment 108462 PARAMETER Experiment Name: At_Germinating_Seeds_cDNA_P Parameter: Tissue Value: Germinating Seeds
  misc_feature: MA Experiment ID: 108573 Result: Up-regulated in Transcription
  misc_feature: MA Experiment 108573 PARAMETER Experiment Name: At_Drought_cDNA_P Parameter: Timepoint (hr) Value: 6
  misc_feature: MA Experiment 108573 PARAMETER Experiment Name: At_Drought_cDNA_P Parameter: Tissue Value: Aerial
  misc_feature: MA Experiment 108573 PARAMETER Experiment Name: At_Drought_cDNA_P Parameter: Treatment Value: Drought vs. No Drought
  misc_feature: MA Experiment ID: 20000111 Result: Down-regulated in Transcription
  misc_feature: MA Experiment 20000111 PARAMETER Experiment Name: At_42deg_Heat_cDNA_P Parameter: Temperature (deg C) Value: 42 vs. 22
  misc_feature: MA Experiment 20000111 PARAMETER Experiment Name: At_42deg_Heat_cDNA_P Parameter: Timepoint (hr) Value: 6
  misc_feature: MA Experiment 20000111 PARAMETER Experiment Name: At_42deg_Heat_cDNA_P Parameter: Tissue Value: Aerial
  misc_feature: MA Experiment ID: 20000112 Result: Down-regulated in Transcription
  misc_feature: MA Experiment 20000112 PARAMETER Experiment Name: At_42deg_Heat_cDNA_P Parameter: Temperature (deg C) Value: 42 vs. 22
  misc_feature: MA Experiment 20000112 PARAMETER Experiment Name: At_42deg_Heat_cDNA_P Parameter: Timepoint (hr) Value: 2
  misc_feature: MA Experiment 20000112 PARAMETER Experiment Name: At_42deg_Heat_cDNA_P Parameter: Tissue Value: Aerial
  misc_feature: MA Experiment ID: 20000113 Result: Down-regulated in Transcription
  misc_feature: MA Experiment 20000113 PARAMETER Experiment Name: At_42deg_Heat_cDNA_P Parameter: Temperature (deg C) Value: 42 vs. 22
  misc_feature: MA Experiment 20000113 PARAMETER Experiment Name: At_42deg_Heat_cDNA_P Parameter: Timepoint (hr) Value: 8
  misc_feature: MA Experiment 20000113 PARAMETER Experiment Name: At_42deg_Heat_cDNA_P Parameter: Tissue Value: Aerial
  misc_feature: MA Experiment ID: 20000171 Result: Down-regulated in Transcription
  misc_feature: MA Experiment 20000171 PARAMETER Experiment Name: At_42deg_Heat_P Parameter: Age (day) Value: 14
  misc_feature: MA Experiment 20000171 PARAMETER Experiment Name: At_42deg_Heat_P Parameter: Organism Value: A. thaliana
  misc_feature: MA Experiment 20000171 PARAMETER Experiment Name: At_42deg_Heat_P Parameter: Plant Line Value: WS
  misc_feature: MA Experiment 20000171 PARAMETER Experiment Name: At_42deg_Heat_P Parameter: Temperature (deg C) Value: 42 vs. 22
  misc_feature: MA Experiment 20000171 PARAMETER Experiment Name: At_42deg_Heat_P Parameter: Timepoint (hr) Value: 1
  misc_feature: MA Experiment 20000171 PARAMETER Experiment Name: At_42deg_Heat_P Parameter: Tissue Value: Aerial
  misc_feature: MA Experiment ID: 20000224 Result: Down-regulated in Transcription
  misc_feature: MA Experiment ID: 20000227 Result: Down-regulated in Transcription
  misc_feature: MA Experiment 20000227 PARAMETER Experiment Name: At_Root-Tips-vs-Tops_P Parameter: Tissue Value: Root Tips vs. Root Tops
  misc_feature: MA Experiment ID: 20000234 Result: Down-regulated in Transcription
  misc_feature: MA Experiment 20000234 PARAMETER Experiment Name: At_Siliques_P Parameter: Age (day) Value: 21
  misc_feature: MA Experiment 20000234 PARAMETER Experiment Name: At_Siliques_P Parameter: Organism Value: A. thaliana
  misc_feature: MA Experiment 20000234 PARAMETER Experiment Name: At_Siliques_P Parameter: Plant Line Value: WS
  misc_feature: MA Experiment 20000234 PARAMETER Experiment Name: At_Siliques_P Parameter: Tissue Value: Less Than 5mm Siliques vs. Whole Plant
  misc_feature: MA Experiment ID: 20000235 Result: Down-regulated in Transcription
  misc_feature: MA Experiment 20000235 PARAMETER Experiment Name: At_Siliques_P Parameter: Age (day) Value: 21
  misc_feature: MA Experiment 20000235 PARAMETER Experiment Name: At_Siliques_P Parameter: Organism Value: A. thaliana
  misc_feature: MA Experiment 20000235 PARAMETER Experiment Name: At_Siliques_P Parameter: Plant Line Value: WS
  misc_feature: MA Experiment 20000235 PARAMETER Experiment Name: At_Siliques_P Parameter: Tissue Value: 5-10mm Siliques vs. Whole Plant
  misc_feature: MA Experiment ID: 20000265 Result: Down-regulated in Transcription
  misc_feature: MA Experiment 20000265 PARAMETER Experiment Name: At_Open_Flower_P Parameter: Age (day) Value: 21
  misc_feature: MA Experiment 20000265 PARAMETER Experiment Name: At_Open_Flower_P Parameter: Plant Line Value: WS
  misc_feature: MA Experiment 20000265 PARAMETER Experiment Name: At_Open_Flower_P Parameter: Tissue Value: Closed Flower vs. Whole Plant
  misc_feature: MA Experiment ID: 20000438 Result: Down-regulated in Transcription
  misc_feature: MA Experiment 20000438 PARAMETER Experiment Name: At_Shoots__P Parameter: Age (day) Value: 14
  misc_feature: MA Experiment 20000438 PARAMETER Experiment Name: At_Shoots__P Parameter: Tissue Value: Shoots vs. Whole Plant
  misc_feature: MA Experiment ID: 20000455 Result: Down-regulated in Transcription
  misc_feature: MA Experiment 20000455 PARAMETER Experiment Name: At_100uM_ABA_P Parameter: Age (day) Value: 16
  misc_feature: MA Experiment 20000455 PARAMETER Experiment Name: At_100uM_ABA_P Parameter: Organism Value: A. thaliana
  misc_feature: MA Experiment 20000455 PARAMETER Experiment Name: At_100uM_ABA_P Parameter: Plant Line Value: WS
  misc_feature: MA Experiment 20000455 PARAMETER Experiment Name: At_100uM_ABA_P Parameter: Timepoint (hr) Value: 48
  misc_feature: MA Experiment 20000455 PARAMETER Experiment Name: At_100uM_ABA_P Parameter: Tissue Value: Aerial
  misc_feature: MA Experiment 20000455 PARAMETER Experiment Name: At_100uM_ABA_P Parameter: Treatment Value: 100uM ABA vs. No Treatment
  misc_feature: MA Experiment ID: 20001248 Result: Up-regulated in Transcription
  misc_feature: MA Experiment 20001248 PARAMETER Experiment Name: At_Far-red-induction_P Parameter: Age (day) Value: 7
  misc_feature: MA Experiment 20001248 PARAMETER Experiment Name: At_Far-red-induction_P Parameter: Light Value: Far-red vs. White
  misc_feature: MA Experiment 20001248 PARAMETER Experiment Name: At_Far-red-induction_P Parameter: Organism Value: A. thaliana
  misc_feature: MA Experiment 20001248 PARAMETER Experiment Name: At_Far-red-induction_P Parameter: Plant Line Value: Columbia
  misc_feature: MA Experiment 20001248 PARAMETER Experiment Name: At_Far-red-induction_P Parameter: Timepoint (hr) Value: 4
  misc_feature: MA Experiment 20001248 PARAMETER Experiment Name: At_Far-red-induction_P Parameter: Tissue Value: Whole Plant
  misc_feature: MA Experiment ID: 20001450 Result: Up-regulated in Transcription
  misc_feature: MA Experiment 20001450 PARAMETER Experiment Name: At_Far-red-induction_P Parameter: Age (day) Value: 7
  misc_feature: MA Experiment 20001450 PARAMETER Experiment Name: At_Far-red-induction_P Parameter: Light Value: Far-red vs. White
  misc_feature: MA Experiment 20001450 PARAMETER Experiment Name: At_Far-red-induction_P Parameter: Organism Value: A. thaliana
  misc_feature: MA Experiment 20001450 PARAMETER Experiment Name: At_Far-red-induction_P Parameter: Plant Line Value: Columbia
  misc_feature: MA Experiment 20001450 PARAMETER Experiment Name: At_Far-red-induction_P Parameter: Timepoint (hr) Value: 8
  misc_feature: MA Experiment 20001450 PARAMETER Experiment Name: At_Far-red-induction_P Parameter: Tissue Value: Whole Plant
  misc_feature: MA Experiment ID: 20001451 Result: Up-regulated in Transcription
  misc_feature: MA Experiment 20001451 PARAMETER Experiment Name: At_Far-red-induction_P Parameter: Age (day) Value: 7
  misc_feature: MA Experiment 20001451 PARAMETER Experiment Name: At_Far-red-induction_P Parameter: Light Value: Far-red vs. White
  misc_feature: MA Experiment 20001451 PARAMETER Experiment Name: At_Far-red-induction_P Parameter: Organism Value: A. thaliana
  misc_feature: MA Experiment 20001451 PARAMETER Experiment Name: At_Far-red-induction_P Parameter: Plant Line Value: Columbia
  misc_feature: MA Experiment 20001451 PARAMETER Experiment Name: At_Far-red-induction_P Parameter: Timepoint (hr) Value: 24
  misc_feature: MA Experiment 20001451 PARAMETER Experiment Name: At_Far-red-induction_P Parameter: Tissue Value: Whole Plant
  misc_feature: MA Experiment ID: 20001555 Result: Down-regulated in Transcription
  misc_feature: MA Experiment 20001555 PARAMETER Experiment Name: At_Drought_Soil_Dry_P Parameter: Age (day) Value: 24
  misc_feature: MA Experiment 20001555 PARAMETER Experiment Name: At_Drought_Soil_Dry_P Parameter: Organism Value: A. thaliana
  misc_feature: MA Experiment 20001555 PARAMETER Experiment Name: At_Drought_Soil_Dry_P Parameter: Plant Line Value: WS
  misc_feature: MA Experiment 20001555 PARAMETER Experiment Name: At_Drought_Soil_Dry_P Parameter: Post Timepoint (hr) Value: None
  misc_feature: MA Experiment 20001555 PARAMETER Experiment Name: At_Drought_Soil_Dry_P Parameter: Post-Treatment Value: None
  misc_feature: MA Experiment 20001555 PARAMETER Experiment Name: At_Drought_Soil_Dry_P Parameter: Timepoint (day) Value: 10
  misc_feature: MA Experiment 20001555 PARAMETER Experiment Name: At_Drought_Soil_Dry_P Parameter: Treatment Value: Drought vs. No Drought
  misc_feature: MA Experiment ID: 20001556 Result: Down-regulated in Transcription
  misc_feature: MA Experiment 20001556 PARAMETER Experiment Name: At_Drought_Soil_Dry_P Parameter: Age (day) Value: 26
  misc_feature: MA Experiment 20001556 PARAMETER Experiment Name: At_Drought_Soil_Dry_P Parameter: Organism Value: A. thaliana
  misc_feature: MA Experiment 20001556 PARAMETER Experiment Name: At_Drought_Soil_Dry_P Parameter: Plant Line Value: WS
  misc_feature: MA Experiment 20001556 PARAMETER Experiment Name: At_Drought_Soil_Dry_P Parameter: Post Timepoint (hr) Value: None
  misc_feature: MA Experiment 20001556 PARAMETER Experiment Name: At_Drought_Soil_Dry_P Parameter: Post-Treatment Value: None
  misc_feature: MA Experiment 20001556 PARAMETER Experiment Name: At_Drought_Soil_Dry_P Parameter: Timepoint (day) Value: 12
  misc_feature: MA Experiment 20001556 PARAMETER Experiment Name: At_Drought_Soil_Dry_P Parameter: Treatment Value: Drought vs. No Drought
  misc_feature: MA Experiment ID: 20001559 Result: Down-regulated in Transcription
  misc_feature: MA Experiment 20001559 PARAMETER Experiment Name: At_Drought_Soil_Dry_P Parameter: Age (day) Value: 28
  misc_feature: MA Experiment 20001559 PARAMETER Experiment Name: At_Drought_Soil_Dry_P Parameter: Organism Value: A. thaliana
  misc_feature: MA Experiment 20001559 PARAMETER Experiment Name: At_Drought_Soil_Dry_P Parameter: Plant Line Value: WS
  misc_feature: MA Experiment 20001559 PARAMETER Experiment Name: At_Drought_Soil_Dry_P Parameter: Post Timepoint (hr) Value: 29
  misc_feature: MA Experiment 20001559 PARAMETER Experiment Name: At_Drought_Soil_Dry_P Parameter: Post-Treatment Value: Re-Water vs. No Drought
  misc_feature: MA Experiment 20001559 PARAMETER Experiment Name: At_Drought_Soil_Dry_P Parameter: Timepoint (day) Value: 14
  misc_feature: MA Experiment 20001559 PARAMETER Experiment Name: At_Drought_Soil_Dry_P Parameter: Treatment Value: Drought vs. No Drought
aaacacatctctctctctctctctctctttctctctttttatatttttgtgtcccaatctcttcttcatttctgtttggttgccgagaaaacgcaggaaacttttctgcaaaaaaactcggtgaccatatttaaaactttcccacgttaattctctcttctttgttttgtttcagattcattacttttctccaaaaaactttcttcaagatctgctcttttaaataattatggcggaagaacatcgatgcgagacgcctgaaggtcaccgtctctgcgttaacaactgcggtttcttcggaagctcagcgacaatgaatctatgttcaaactgttacggcgatctctgtctcaaacaacaacaacaagcttccatgaaatcaaccgtcgaatcatctctctctccggtgatcgcacctgttctcgaaaactacgcggcggagttagagatcccgacgacgaagaagacagaggagaaaaaaccgattcaaattccgacggagcaaccgtctccgccgcaacggccgaatcgatgcaccgtatgtaggaaacgggtcgggttaaccgggtttatgtgtcggtgcgggacgactttttgtgggagtcataggtatccggaggttcatggttgtacgtttgatttcaaatcggcgggacgtgaagagatcgcgaaagctaatccgttggttattgcggcgaagcttcagaaaatatgaatcggagccgttgaccgatttctatctttaccctgagaaaatttcgattgtctcggtggatctcagccgttcattatgttattgtattacggacacgtgtcgcaagattaaggttgagatggtttcgtaactttttaattattttctttgtttatttccgaagaaattaaagtttttatgattgtgtggcttttgcttgtaaaaaaaaaaagggtttctctttgggaaaaagaaaagaaaatatatgaaattgtgtccc

SEQ ID NO: 35639 - protein, 161 aa, Arabidopsis thaliana
  peptide (1)..(161): Ceres Seq. ID no. 12333497
  misc_feature (102)..(142): Pfam Name: AN1-like Zinc finger Pfam Description: AN1-like Zinc finger
  misc_feature (14)..(160): Homolog of NCBI NO: 15235819 NR Description: similar to zinc finger - like protein
  misc_feature (4)..(161): Homolog of NCBI NO: 30908921 NR Description: putative zinc finger transcription factor ZFP33
  misc_feature (10)..(161): Homolog of NCBI NO: 15234402 NR Description: putative protein
  misc_feature (7)..(161): Homolog of NCBI NO: 25082726 NR Description: expressed protein [Arabidopsis thaliana]
  misc_feature (7)..(161): Homolog of NCBI NO: 18403408 NR Description: expressed protein
  misc_feature (4)..(161): Homolog of NCBI NO: 35187687 NR Description: zinc-finger protein [Oryza sativa (indica
  misc_feature (1)..(161): Homolog of NCBI NO: 15225894 NR Description: putative zinc finger protein
  misc_feature (1)..(161): Homolog of NCBI NO: 14596167 NR Description: zinc finger-like protein [Arabidopsis thaliana]
  misc_feature (1)..(161): Homolog of NCBI NO: 15231686 NR Description: zinc finger - like protein
  misc_feature (1)..(161): Homolog of NCBI NO: 18404102 NR Description: expressed protein
MAEEHRCETPEGHRLCVNNCGFFGSSATMNLCSNCYGDLCLKQQQQASMKSTVESSLSPVIAPVLENYAAELEIPTTKKTEEKKPIQIPTEQPSPPQRPNRCTVCRKRVGLTGFMCRCGTTFCGSHRYPEVHGCTFDFKSAGREEIAKANPLVIAAKLQKI

SEQ ID NO: 35640 - protein, 133 aa, Arabidopsis thaliana
  peptide (1)..(133): Ceres Seq. ID no. 12333498
  misc_feature (74)..(114): Pfam Name: AN1-like Zinc finger Pfam Description: AN1-like Zinc finger
  misc_feature (1)..(132): Homolog of NCBI NO: 15235819 NR Description: similar to zinc finger - like protein
  misc_feature (1)..(133): Homolog of NCBI NO: 30908921 NR Description: putative zinc finger transcription factor ZFP33
  misc_feature (1)..(133): Homolog of NCBI NO: 15234402 NR Description: putative protein
  misc_feature (1)..(133): Homolog of NCBI NO: 25082726 NR Description: expressed protein [Arabidopsis thaliana]
  misc_feature (1)..(133): Homolog of NCBI NO: 18403408 NR Description: expressed protein
  misc_feature (1)..(133): Homolog of NCBI NO: 35187687 NR Description: zinc-finger protein [Oryza sativa (indica
  misc_feature (1)..(133): Homolog of NCBI NO: 15225894 NR Description: putative zinc finger protein
  misc_feature (1)..(133): Homolog of NCBI NO: 14596167 NR Description: zinc finger-like protein [Arabidopsis thaliana]
  misc_feature (1)..(133): Homolog of NCBI NO: 15231686 NR Description: zinc finger - like protein
  misc_feature (1)..(133): Homolog of NCBI NO: 18404102 NR Description: expressed protein
MNLCSNCYGDLCLKQQQQASMKSTVESSLSPVIAPVLENYAAELEIPTTKKTEEKKPIQIPTEQPSPPQRPNRCTVCRKRVGLTGFMCRCGTTFCGSHRYPEVHGCTFDFKSAGREEIAKANPLVIAAKLQKI

SEQ ID NO: 35641 - protein, 113 aa, Arabidopsis thaliana
  peptide (1)..(113): Ceres Seq. ID no. 12333499
  misc_feature (54)..(94): Pfam Name: AN1-like Zinc finger Pfam Description: AN1-like Zinc finger
  misc_feature (1)..(112): Homolog of NCBI NO: 15235819 NR Description: similar to zinc finger - like protein
  misc_feature (1)..(113): Homolog of NCBI NO: 30908921 NR Description: putative zinc finger transcription factor ZFP33
  misc_feature (1)..(113): Homolog of NCBI NO: 15234402 NR Description: putative protein
  misc_feature (1)..(113): Homolog of NCBI NO: 25082726 NR Description: expressed protein [Arabidopsis thaliana]
  misc_feature (1)..(113): Homolog of NCBI NO: 18403408 NR Description: expressed protein
  misc_feature (1)..(113): Homolog of NCBI NO: 35187687 NR Description: zinc-finger protein [Oryza sativa (indica
  misc_feature (1)..(113): Homolog of NCBI NO: 15225894 NR Description: putative zinc finger protein
  misc_feature (1)..(113): Homolog of NCBI NO: 14596167 NR Description: zinc finger-like protein [Arabidopsis thaliana]
  misc_feature (1)..(113): Homolog of NCBI NO: 15231686 NR Description: zinc finger - like protein
  misc_feature (1)..(113): Homolog of NCBI NO: 18404102 NR Description: expressed protein
MKSTVESSLSPVIAPVLENYAAELEIPTTKKTEEKKPIQIPTEQPSPPQRPNRCTVCRKRVGLTGFMCRCGTTFCGSHRYPEVHGCTFDFKSAGREEIAKANPLVIAAKLQKI

SEQ ID NO: 35642 - DNA, 881 bp, Arabidopsis thaliana
  misc_feature (1)..(881): Ceres Seq. ID no. 12332332
  misc_feature: MA Experiment ID: 108434 Result: Up-regulated in Transcription
  misc_feature: MA Experiment 108434 PARAMETER Experiment Name: At_Root_Tips_cDNA_P Parameter: Tissue Value: Root Tips
  misc_feature: MA Experiment ID: 108461 Result: Down-regulated in Transcription
  misc_feature: MA Experiment 108461 PARAMETER Experiment Name: At_Germinating_Seeds_cDNA_P Parameter: Age (day) Value: 1 vs. 0
  misc_feature: MA Experiment 108461 PARAMETER Experiment Name: At_Germinating_Seeds_cDNA_P Parameter: Tissue Value: Germinating Seeds
  misc_feature: MA Experiment ID: 108462 Result: Down-regulated in Transcription
  misc_feature: MA Experiment 108462 PARAMETER Experiment Name: At_Germinating_Seeds_cDNA_P Parameter: Age (day) Value: 2 vs. 0
  misc_feature: MA Experiment 108462 PARAMETER Experiment Name: At_Germinating_Seeds_cDNA_P Parameter: Tissue Value: Germinating Seeds
  misc_feature: MA Experiment ID: 108463 Result: Down-regulated in Transcription
  misc_feature: MA Experiment 108463 PARAMETER Experiment Name: At_Germinating_Seeds_cDNA_P Parameter: Age (day) Value: 3 vs. 0
  misc_feature: MA Experiment 108463 PARAMETER Experiment Name: At_Germinating_Seeds_cDNA_P Parameter: Tissue Value: Germinating Seeds
  misc_feature: MA Experiment ID: 108464 Result: Down-regulated in Transcription
  misc_feature: MA Experiment 108464 PARAMETER Experiment Name: At_Germinating_Seeds_cDNA_P Parameter: Age (day) Value: 4 vs. 0
  misc_feature: MA Experiment 108464 PARAMETER Experiment Name: At_Germinating_Seeds_cDNA_P Parameter: Tissue Value: Germinating Seeds
  misc_feature: MA Experiment ID: 108585 Result: Up-regulated in Transcription
  misc_feature: MA Experiment 108585 PARAMETER Experiment Name: At_5mM_NaNP_cDNA_P Parameter: Timepoint (hr) Value: 6
  misc_feature: MA Experiment 108585 PARAMETER Experiment Name: At_5mM_NaNP_cDNA_P Parameter: Tissue Value: Aerial
  misc_feature: MA Experiment 108585 PARAMETER Experiment Name: At_5mM_NaNP_cDNA_P Parameter: Treatment Value: null
  misc_feature: MA Experiment ID: 108595 Result: Down-regulated in Transcription
  misc_feature: MA Experiment 108595 PARAMETER Experiment Name: At_Ler-pi_Ovule_cDNA_P Parameter: Plant Line Value: null
  misc_feature: MA Experiment ID: 20000179 Result: Down-regulated in Transcription
  misc_feature: MA Experiment 20000179 PARAMETER Experiment Name: At_Germinating_Seeds_P Parameter: Age (hr) Value: 6 vs. 0
  misc_feature: MA Experiment 20000179 PARAMETER Experiment Name: At_Germinating_Seeds_P Parameter: Tissue Value: Germinating Seeds
aagtcgctttgatctaaaaagctcttaaactattcttccagcgaccggaagaaacgaataatcggaatcgaaaaattcgaaaaaggaactgagaagaaacagatctgaagatggagtgtgtatttggtctagttgggaatggattcgctatcgtggcggcggatacatcagcagttcacagtattcttcttcacaagaacaaagaggacaagatcatgactcttgactctcacaagctcgtcgccgctagtggtgagcctggtgaccgggttcagtttacggagtatgttcagaagaatgtgtcactgtatcagtttcgtaatgggattcctttgagtactgctgctgctgctaacttcactcgtggagaacttgccactgctttgagaaagaatccatattcggtgaacatcctgatggctggctatgacaaagaagccggcgcatctctatactacattgactacattgcaaccctccacaaggttgataagggagcatttggatacggctcatacttctctctctctacaatggacagacactaccgcagcgacatgtctgttgaagaagccattgaattggtggacaaatgcatactcgagatcaggtcaaggctggtcattgcaccaccaaactttgttatcaagattgttgacaaggacggagcccgtgagtacggatggcgtatcagcactgctgatgcctaagttgttttcattgtgtttattagtccatttatgttactcggctcacatttatattctctgttgaacttcaagctccctggatattaaagttcctagataatgatgatgatatgcatgtgttgaactttttctttccttattgcgtatatgaagcaaaagatagtgcaatgt

SEQ ID NO: 35643 - protein, 199 aa, Arabidopsis thaliana
  peptide (1)..(199): Ceres Seq. ID no. 12332333
  misc_feature (1)..(182): Pfam Name: Proteasome A-type and B-type Pfam Description: Proteasome A-type and B-type
  misc_feature (14)..(199): Homolog of NCBI NO: 19113087 NR Description: proteasome component precursor
  misc_feature (1)..(189): Homolog of NCBI NO: 30585195 NR Description: Homo sapiens proteasome (prosome, macropain)
  misc_feature (1)..(189): Homolog of NCBI NO: 4506195 NR Description: proteasome beta 2 subunit
  misc_feature (1)..(186): Homolog of NCBI NO: 8394079 NR Description: proteasome (prosome, macropain) subunit, beta
  misc_feature (1)..(189): Homolog of NCBI NO: 29841035 NR Description: similar to NM_017284 proteasome (prosome,
  misc_feature (1)..(134): Homolog of NCBI NO: 14594929 NR Description: putative beta4 proteasome subunit [Nicotiana
  misc_feature (1)..(196): Homolog of NCBI NO: 17380213 NR Description: Proteasome subunit beta type 2 (20S proteasome
  misc_feature (1)..(196): Homolog of NCBI NO: 27552546 NR Description: 20S proteasome beta 4 subunit
  misc_feature (1)..(198): Homolog of NCBI NO: 15228805 NR Description: 20S proteasome beta subunit D (PBD1)
  misc_feature (1)..(199): Homolog of NCBI NO: 15233580 NR Description: 20S proteasome beta subunit D2 (PBD2)
MECVFGLVGNGFAIVAADTSAVHSILLHKNKEDKIMTLDSHKLVAASGEPGDRVQFTEYVQKNVSLYQFRNGIPLSTAAAANFTRGELATALRKNPYSVNILMAGYDKEAGASLYYIDYIATLHKVDKGAFGYGSYFSLSTMDRHYRSDMSVEEAIELVDKCILEIRSRLVIAPPNFVIKIVDKDGAREYGWRISTADA

SEQ ID NO: 35644 - protein, 164 aa, Arabidopsis thaliana
  peptide (1)..(164): Ceres Seq. ID no. 12332334
  misc_feature (1)..(147): Pfam Name: Proteasome A-type and B-type Pfam Description: Proteasome A-type and B-type
  misc_feature (1)..(164): Homolog of NCBI NO: 19113087 NR Description: proteasome component precursor
  misc_feature (1)..(154): Homolog of NCBI NO: 30585195 NR Description: Homo sapiens proteasome (prosome, macropain)
  misc_feature (1)..(154): Homolog of NCBI NO: 4506195 NR Description: proteasome beta 2 subunit
  misc_feature (1)..(151): Homolog of NCBI NO: 8394079 NR Description: proteasome (prosome, macropain) subunit, beta
  misc_feature (1)..(154): Homolog of NCBI NO: 29841035 NR Description: similar to NM_017284 proteasome (prosome,
  misc_feature (1)..(99): Homolog of NCBI NO: 14594929 NR Description: putative beta4 proteasome subunit [Nicotiana
  misc_feature (1)..(161): Homolog of NCBI NO: 17380213 NR Description: Proteasome subunit beta type 2 (20S proteasome
  misc_feature (1)..(161): Homolog of NCBI NO: 27552546 NR Description: 20S proteasome beta 4 subunit
  misc_feature (1)..(163): Homolog of NCBI NO: 15228805 NR Description: 20S proteasome beta subunit D (PBD1)
  misc_feature (1)..(164): Homolog of NCBI NO: 15233580 NR Description: 20S proteasome beta subunit D2 (PBD2)
MTLDSHKLVAASGEPGDRVQFTEYVQKNVSLYQFRNGIPLSTAAAANFTRGELATALRKNPYSVNILMAGYDKEAGASLYYIDYIATLHKVDKGAFGYGSYFSLSTMDRHYRSDMSVEEAIELVDKCILEIRSRLVIAPPNFVIKIVDKDGAREYGWRISTADA

SEQ ID NO: 35645 - protein, 115 aa, Arabidopsis thaliana
  peptide (1)..(115): Ceres Seq. ID no. 12332335
MTKKPAHLYTTLTTLQPSTRLIREHLDTAHTSLSLQWTDTTAATCLLKKPLNWWTNAYSRSGQGWSLHHQTLLSRLLTRTEPVSTDGVSALLMPKLFSLCLLVHLCYSAHIYILC

SEQ ID NO: 35646 - DNA, 1020 bp, Arabidopsis thaliana
  misc_feature (1)..(1020): Ceres Seq. ID no. 12332327
  misc_feature: MA Experiment ID: 108434 Result: Up-regulated in Transcription
  misc_feature: MA Experiment 108434 PARAMETER Experiment Name: At_Root_Tips_cDNA_P Parameter: Tissue Value: Root Tips
  misc_feature: MA Experiment ID: 108462 Result: Down-regulated in Transcription
  misc_feature: MA Experiment 108462 PARAMETER Experiment Name: At_Germinating_Seeds_cDNA_P Parameter: Age (day) Value: 2 vs. 0
  misc_feature: MA Experiment 108462 PARAMETER Experiment Name: At_Germinating_Seeds_cDNA_P Parameter: Tissue Value: Germinating Seeds
  misc_feature: MA Experiment ID: 108463 Result: Down-regulated in Transcription
  misc_feature: MA Experiment 108463 PARAMETER Experiment Name: At_Germinating_Seeds_cDNA_P Parameter: Age (day) Value: 3 vs. 0
  misc_feature: MA Experiment 108463 PARAMETER Experiment Name: At_Germinating_Seeds_cDNA_P Parameter: Tissue Value: Germinating Seeds
  misc_feature: MA Experiment ID: 108464 Result: Down-regulated in Transcription
  misc_feature: MA Experiment 108464 PARAMETER Experiment Name: At_Germinating_Seeds_cDNA_P Parameter: Age (day) Value: 4 vs. 0
  misc_feature: MA Experiment 108464 PARAMETER Experiment Name: At_Germinating_Seeds_cDNA_P Parameter: Tissue Value: Germinating Seeds
  misc_feature: MA Experiment ID: 108573 Result: Down-regulated in Transcription
  misc_feature: MA Experiment 108573 PARAMETER Experiment Name: At_Drought_cDNA_P Parameter: Timepoint (hr) Value: 6
  misc_feature: MA Experiment 108573 PARAMETER Experiment Name: At_Drought_cDNA_P Parameter: Tissue Value: Aerial
  misc_feature: MA Experiment 108573 PARAMETER Experiment Name: At_Drought_cDNA_P Parameter: Treatment Value: Drought vs. No Drought
  misc_feature: MA Experiment ID: 108595 Result: Down-regulated in Transcription
  misc_feature: MA Experiment 108595 PARAMETER Experiment Name: At_Ler-pi_Ovule_cDNA_P Parameter: Plant Line Value: null
  misc_feature: MA Experiment ID: 20000227 Result: Up-regulated in Transcription
  misc_feature: MA Experiment 20000227 PARAMETER Experiment Name: At_Root-Tips-vs-Tops_P Parameter: Tissue Value: Root Tips vs. Root Tops
  misc_feature: MA Experiment ID: 20000437 Result: Down-regulated in Transcription
  misc_feature: MA Experiment 20000437 PARAMETER Experiment Name: At_Drought_P Parameter: Age (day) Value: 8
  misc_feature: MA Experiment 20000437 PARAMETER Experiment Name: At_Drought_P Parameter: Organism Value: A. thaliana
  misc_feature: MA Experiment 20000437 PARAMETER Experiment Name: At_Drought_P Parameter: Plant Line Value: WS
  misc_feature: MA Experiment 20000437 PARAMETER Experiment Name: At_Drought_P Parameter: Timepoint (hr) Value: 24
  misc_feature: MA Experiment 20000437 PARAMETER Experiment Name: At_Drought_P Parameter: Tissue Value: Whole Plant
  misc_feature: MA Experiment 20000437 PARAMETER Experiment Name: At_Drought_P Parameter: Treatment Value: Drought vs. No Drought
  misc_feature: MA Experiment ID: 20000794 Result: Down-regulated in Transcription
  misc_feature: MA Experiment 20000794 PARAMETER Experiment Name: At_Petals_P Parameter: Age (day) Value: 23-25 days
  misc_feature: MA Experiment 20000794 PARAMETER Experiment Name: At_Petals_P Parameter: Plant Line Value: WS
  misc_feature: MA Experiment 20000794 PARAMETER Experiment Name: At_Petals_P Parameter: Tissue Value: Petals vs. Whole plant
  misc_feature: MA Experiment ID: 20001556 Result: Up-regulated in Transcription
  misc_feature: MA Experiment 20001556 PARAMETER Experiment Name: At_Drought_Soil_Dry_P Parameter: Age (day) Value: 26
  misc_feature: MA Experiment 20001556 PARAMETER Experiment Name: At_Drought_Soil_Dry_P Parameter: Organism Value: A. thaliana
  misc_feature: MA Experiment 20001556 PARAMETER Experiment Name: At_Drought_Soil_Dry_P Parameter: Plant Line Value: WS
  misc_feature: MA Experiment 20001556 PARAMETER Experiment Name: At_Drought_Soil_Dry_P Parameter: Post Timepoint (hr) Value: None
  misc_feature: MA Experiment 20001556 PARAMETER Experiment Name: At_Drought_Soil_Dry_P Parameter: Post-Treatment Value: None
  misc_feature: MA Experiment 20001556 PARAMETER Experiment Name: At_Drought_Soil_Dry_P Parameter: Timepoint (day) Value: 12
  misc_feature: MA Experiment 20001556 PARAMETER Experiment Name: At_Drought_Soil_Dry_P Parameter: Treatment Value: Drought vs. No Drought
  misc_feature: MA Experiment ID: 20001557 Result: Up-regulated in Transcription
  misc_feature: MA Experiment 20001557 PARAMETER Experiment Name: At_Drought_Soil_Dry_P Parameter: Age (day) Value: 27
  misc_feature: MA Experiment 20001557 PARAMETER Experiment Name: At_Drought_Soil_Dry_P Parameter: Organism Value: A. thaliana
  misc_feature: MA Experiment 20001557 PARAMETER Experiment Name: At_Drought_Soil_Dry_P Parameter: Plant Line Value: WS
  misc_feature: MA Experiment 20001557 PARAMETER Experiment Name: At_Drought_Soil_Dry_P Parameter: Post Timepoint (hr) Value: 3
  misc_feature: MA Experiment 20001557 PARAMETER Experiment Name: At_Drought_Soil_Dry_P Parameter: Post-Treatment Value: Re-Water vs. No Drought
  misc_feature: MA Experiment 20001557 PARAMETER Experiment Name: At_Drought_Soil_Dry_P Parameter: Timepoint (day) Value: 13
  misc_feature: MA Experiment 20001557 PARAMETER Experiment Name: At_Drought_Soil_Dry_P Parameter: Treatment Value: Drought vs. No Drought
  misc_feature: MA Experiment ID: 20001558 Result: Up-regulated in Transcription
  misc_feature: MA Experiment 20001558 PARAMETER Experiment Name: At_Drought_Soil_Dry_P Parameter: Age (day) Value: 27
  misc_feature: MA Experiment 20001558 PARAMETER Experiment Name: At_Drought_Soil_Dry_P Parameter: Organism Value: A. thaliana
  misc_feature: MA Experiment 20001558 PARAMETER Experiment Name: At_Drought_Soil_Dry_P Parameter: Plant Line Value: WS
  misc_feature: MA Experiment 20001558 PARAMETER Experiment Name: At_Drought_Soil_Dry_P Parameter: Post Timepoint (hr) Value: 6
  misc_feature: MA Experiment 20001558 PARAMETER Experiment Name: At_Drought_Soil_Dry_P Parameter: Post-Treatment Value: Re-Water vs. No Drought
  misc_feature: MA Experiment 20001558 PARAMETER Experiment Name: At_Drought_Soil_Dry_P Parameter: Timepoint (day) Value: 13
  misc_feature: MA Experiment 20001558 PARAMETER Experiment Name: At_Drought_Soil_Dry_P Parameter: Treatment Value: Drought vs. No Drought
  misc_feature: MA Experiment ID: 20001757 Result: Up-regulated in Transcription
  misc_feature: MA Experiment 20001757 PARAMETER Experiment Name: At_50mM_NH4NO3_L-to-H_P Parameter: Timepoint (hr) Value: 6
  misc_feature: MA Experiment 20001757 PARAMETER Experiment Name: At_50mM_NH4NO3_L-to-H_P Parameter: Tissue Value: Leaf
  misc_feature: MA Experiment 20001757 PARAMETER Experiment Name: At_50mM_NH4NO3_L-to-H_P Parameter: Treatment Value: 50mM NH4NO3 vs 100mM Mannitol
ataaatagtgaaaacacaaaaccctaagagtcgctcttgctctcagccgtctgtcttacctccagaagtcgacgacaacaatggcaccgaagaagggagttaaagtggcttcaaagaagaagccggagaaagttaccaacccattgtttgagagacgcccaaagcaattcggtattggtggcgctttgcctcctaagaaggatctttctcgttacatcaaatggcctaagtcaatccgtcttcaaaggcagaagcgtatccttaagcagaggttgaaggttcctccagctcttaaccagttcaccaagacccttgataagaatctcgccaccagcctcttcaagattcttctgaagtataggccagaggacaaagccgcaaagaaggaacgccttttgaacaaggctcaagctgaggcagaaggaaagcctgctgaatccaagaagcccattgttgttaagtatggtctcaaccatgtgacttacctcatcgagcagaacaaggcacagcttgtggtcattgcacacgatgttgaccctatcgagttggtggtctggttacctgcactctgcaggaaaatggaagtcccttactgcattgttaagggaaaatctcgtcttggagcggtcgttcaccagaagactgctgctgccttgtgcttgaccactgtcaagaacgaggacaagcttgagttcagcaaaatcctcgaggccatcaaggctaacttcaacgacaagtacgaggagtacaggaagaagtggggaggtggcataatgggatccaagtctcaagccaagaccaaagctaaggagagggttattgctaaggaggctgcccagagaatgaactaggcatcataccttatgttctctgctatgaaacatatgataatggttttgttgtttagcgatattttgaaaccttgttttattttaatttctatgctctttcggatgttaccaccctcttcagaattttatgcagttttgttatcaatttcacatataaacttttatttgc

SEQ ID NO: 35647 - protein, 256 aa, Arabidopsis thaliana [sequence omitted]

SEQ ID NO: 35648 - DNA, 642 bp, Arabidopsis thaliana
  misc_feature (1)..(642): Ceres Seq. ID no. 12393562
  misc_feature: MA Experiment ID: 108461 Result: Up-regulated in Transcription
  misc_feature: MA Experiment 108461 PARAMETER Experiment Name: At_Germinating_Seeds_cDNA_P Parameter: Age (day) Value: 1 vs. 0
  misc_feature: MA Experiment 108461 PARAMETER Experiment Name: At_Germinating_Seeds_cDNA_P Parameter: Tissue Value: Germinating Seeds
  misc_feature: MA Experiment ID: 108462 Result: Up-regulated in Transcription
  misc_feature: MA Experiment 108462 PARAMETER Experiment Name: At_Germinating_Seeds_cDNA_P Parameter: Age (day) Value: 2 vs. 0
  misc_feature: MA Experiment 108462 PARAMETER Experiment Name: At_Germinating_Seeds_cDNA_P Parameter: Tissue Value: Germinating Seeds
  misc_feature: MA Experiment ID: 108463 Result: Up-regulated in Transcription
  misc_feature: MA Experiment 108463 PARAMETER Experiment Name: At_Germinating_Seeds_cDNA_P Parameter: Age (day) Value: 3 vs. 0
  misc_feature: MA Experiment 108463 PARAMETER Experiment Name: At_Germinating_Seeds_cDNA_P Parameter: Tissue Value: Germinating Seeds
  misc_feature: MA Experiment ID: 20000069 Result: Down-regulated in Transcription
  misc_feature: MA Experiment 20000069 PARAMETER Experiment Name: At_100uM_ABA_Mutants_cDNA_P Parameter: Plant Line Value: CS23
  misc_feature: MA Experiment 20000069 PARAMETER Experiment Name: At_100uM_ABA_Mutants_cDNA_P Parameter: Timepoint (hr) Value: 6
  misc_feature: MA Experiment 20000069 PARAMETER Experiment Name: At_100uM_ABA_Mutants_cDNA_P Parameter: Tissue Value: Aerial
  misc_feature: MA Experiment 20000069 PARAMETER Experiment Name: At_100uM_ABA_Mutants_cDNA_P Parameter: Treatment Value: 100uM ABA vs. No Treatment
  misc_feature: MA Experiment ID: 20000071 Result: Down-regulated in Transcription
  misc_feature: MA Experiment 20000071 PARAMETER Experiment Name: At_100uM_ABA_Mutants_cDNA_P Parameter: Plant Line Value: CS8104
  misc_feature: MA Experiment 20000071 PARAMETER Experiment Name: At_100uM_ABA_Mutants_cDNA_P Parameter: Timepoint (hr) Value: 6
  misc_feature: MA Experiment 20000071 PARAMETER Experiment Name: At_100uM_ABA_Mutants_cDNA_P Parameter: Tissue Value: Aerial
  misc_feature: MA Experiment 20000071 PARAMETER Experiment Name: At_100uM_ABA_Mutants_cDNA_P Parameter: Treatment Value: 100uM ABA vs. No Treatment
  misc_feature: MA Experiment ID: 20000111 Result: Down-regulated in Transcription
  misc_feature: MA Experiment 20000111 PARAMETER Experiment Name: At_42deg_Heat_cDNA_P Parameter: Temperature (deg C) Value: 42 vs. 22
  misc_feature: MA Experiment 20000111 PARAMETER Experiment Name: At_42deg_Heat_cDNA_P Parameter: Timepoint (hr) Value: 6
  misc_feature: MA Experiment 20000111 PARAMETER Experiment Name: At_42deg_Heat_cDNA_P Parameter: Tissue Value: Aerial
  misc_feature: MA Experiment ID: 20000113 Result: Down-regulated in Transcription
  misc_feature: MA Experiment 20000113 PARAMETER Experiment Name: At_42deg_Heat_cDNA_P Parameter: Temperature (deg C) Value: 42 vs. 22
  misc_feature: MA Experiment 20000113 PARAMETER Experiment Name: At_42deg_Heat_cDNA_P Parameter: Timepoint (hr) Value: 8
  misc_feature: MA Experiment 20000113 PARAMETER Experiment Name: At_42deg_Heat_cDNA_P Parameter: Tissue Value: Aerial
  misc_feature: MA Experiment ID: 20000117 Result: Down-regulated in Transcription
  misc_feature: MA Experiment 20000117 PARAMETER Experiment Name: At_100uM_ABA_Mutants_cDNA_P Parameter: Plant Line Value: Columbia
  misc_feature: MA Experiment 20000117 PARAMETER Experiment Name: At_100uM_ABA_Mutants_cDNA_P Parameter: Timepoint (hr) Value: 6
  misc_feature: MA Experiment 20000117 PARAMETER Experiment Name: At_100uM_ABA_Mutants_cDNA_P Parameter: Tissue Value: Aerial
  misc_feature: MA Experiment 20000117 PARAMETER Experiment Name: At_100uM_ABA_Mutants_cDNA_P Parameter: Treatment Value: 100uM ABA vs. No Treatment
  misc_feature: MA Experiment ID: 20000495 Result: Up-regulated in Transcription
  misc_feature: MA Experiment 20000495 PARAMETER Experiment Name: At_Guard_Cells_P Parameter: Harvest Date Value: 8/2/2002
  misc_feature: MA Experiment 20000495 PARAMETER Experiment Name: At_Guard_Cells_P Parameter: Organism Value: A. thaliana
  misc_feature: MA Experiment 20000495 PARAMETER Experiment Name: At_Guard_Cells_P Parameter: Tissue Value: Guard Cells vs. Leaves
  misc_feature: MA Experiment ID: 20000794 Result: Down-regulated in Transcription
  misc_feature: MA Experiment 20000794 PARAMETER Experiment Name: At_Petals_P Parameter: Age (day) Value: 23-25 days
  misc_feature: MA Experiment 20000794 PARAMETER Experiment Name: At_Petals_P Parameter: Plant Line Value: WS
  misc_feature: MA Experiment 20000794 PARAMETER Experiment Name: At_Petals_P Parameter: Tissue Value: Petals vs. Whole plant
  misc_feature: MA Experiment ID: 20001556 Result: Down-regulated in Transcription
  misc_feature: MA Experiment 20001556 PARAMETER Experiment Name: At_Drought_Soil_Dry_P Parameter: Age (day) Value: 26
  misc_feature: MA Experiment 20001556 PARAMETER Experiment Name: At_Drought_Soil_Dry_P Parameter: Organism Value: A. thaliana
  misc_feature: MA Experiment 20001556 PARAMETER Experiment Name: At_Drought_Soil_Dry_P Parameter: Plant Line Value: WS
  misc_feature: MA Experiment 20001556 PARAMETER Experiment Name: At_Drought_Soil_Dry_P Parameter: Post Timepoint (hr) Value: None
  misc_feature: MA Experiment 20001556 PARAMETER Experiment Name: At_Drought_Soil_Dry_P Parameter: Post-Treatment Value: None
  misc_feature: MA Experiment 20001556 PARAMETER Experiment Name: At_Drought_Soil_Dry_P Parameter: Timepoint (day) Value: 12
  misc_feature: MA Experiment 20001556 PARAMETER Experiment Name: At_Drought_Soil_Dry_P Parameter: Treatment Value: Drought vs. No Drought
  misc_feature: MA Experiment ID: 20001559 Result: Down-regulated in Transcription
  misc_feature: MA Experiment 20001559 PARAMETER Experiment Name: At_Drought_Soil_Dry_P Parameter: Age (day) Value: 28
  misc_feature: MA Experiment 20001559 PARAMETER Experiment Name: At_Drought_Soil_Dry_P Parameter: Organism Value: A. thaliana
  misc_feature: MA Experiment 20001559 PARAMETER Experiment Name: At_Drought_Soil_Dry_P Parameter: Plant Line Value: WS
  misc_feature: MA Experiment 20001559 PARAMETER Experiment Name: At_Drought_Soil_Dry_P Parameter: Post Timepoint (hr) Value: 29
  misc_feature: MA Experiment 20001559 PARAMETER Experiment Name: At_Drought_Soil_Dry_P Parameter: Post-Treatment Value: Re-Water vs. No Drought
  misc_feature: MA Experiment 20001559 PARAMETER Experiment Name: At_Drought_Soil_Dry_P Parameter: Timepoint (day) Value: 14
  misc_feature: MA Experiment 20001559 PARAMETER Experiment Name: At_Drought_Soil_Dry_P Parameter: Treatment Value: Drought vs. No Drought
  misc_feature: MA Experiment ID: 20001560 Result: Up-regulated in Transcription
  misc_feature: MA Experiment 20001560 PARAMETER Experiment Name: At_Drought_Soil_Dry_P Parameter: Age (day) Value: 28
  misc_feature: MA Experiment 20001560 PARAMETER Experiment Name: At_Drought_Soil_Dry_P Parameter: Organism Value: A. thaliana
  misc_feature: MA Experiment 20001560 PARAMETER Experiment Name: At_Drought_Soil_Dry_P Parameter: Plant Line Value: WS
  misc_feature: MA Experiment 20001560 PARAMETER Experiment Name: At_Drought_Soil_Dry_P Parameter: Post Timepoint (hr) Value: None
  misc_feature: MA Experiment 20001560 PARAMETER Experiment Name: At_Drought_Soil_Dry_P Parameter: Post-Treatment Value: None
  misc_feature: MA Experiment 20001560 PARAMETER Experiment Name: At_Drought_Soil_Dry_P Parameter: Timepoint (day) Value: 14
  misc_feature: MA Experiment 20001560 PARAMETER Experiment Name: At_Drought_Soil_Dry_P Parameter: Treatment Value: Drought vs. No Drought
  misc_feature: MA Experiment ID: 20001906 Result: Down-regulated in Transcription
  misc_feature: MA Experiment 20001906 PARAMETER Experiment Name: At_Drought_Reproduction_P Parameter: Age (day) Value: 35
  misc_feature: MA Experiment 20001906 PARAMETER Experiment Name: At_Drought_Reproduction_P Parameter: Organism Value: A. thaliana
  misc_feature: MA Experiment 20001906 PARAMETER Experiment Name: At_Drought_Reproduction_P Parameter: Plant Line Value: WS
  misc_feature: MA Experiment 20001906 PARAMETER Experiment Name: At_Drought_Reproduction_P Parameter: Timepoint (day) Value: 5
  misc_feature: MA Experiment 20001906 PARAMETER Experiment Name: At_Drought_Reproduction_P Parameter: Tissue Value: Siliques
  misc_feature: MA Experiment 20001906 PARAMETER Experiment Name: At_Drought_Reproduction_P Parameter: Treatment Value: Drought vs. No Drought
  misc_feature: MA Experiment ID: 20001911 Result: Down-regulated in Transcription
  misc_feature: MA Experiment 20001911 PARAMETER Experiment Name: At_Drought_Reproduction_P Parameter: Age (day) Value: 40
  misc_feature: MA Experiment 20001911 PARAMETER Experiment Name: At_Drought_Reproduction_P Parameter: Organism Value: A. thaliana
  misc_feature: MA Experiment 20001911 PARAMETER Experiment Name: At_Drought_Reproduction_P Parameter: Plant Line Value: WS
  misc_feature: MA Experiment 20001911 PARAMETER Experiment Name: At_Drought_Reproduction_P Parameter: Timepoint (day) Value: 10
  misc_feature: MA Experiment 20001911 PARAMETER Experiment Name: At_Drought_Reproduction_P Parameter: Tissue Value: Flowers
  misc_feature: MA Experiment 20001911 PARAMETER Experiment Name: At_Drought_Reproduction_P Parameter: Treatment Value: Drought vs. No Drought
atcattcacaatggcatatgcaactattctcatgatcttctcggtggtggcactaatgtccggcgagagagctcatgcagcagtggactgctcatcgttgatactaaacatggctgattgtttgtcttttgtgactagtggtagtacagttgtcaagccggaaggaacatgttgttcagggcttaagactgtggttaggacaggaccagaatgtctatgtgaggctttcaagaacagtggttctcttggtttaactcttgatctttctaaagctgcttctcttccttctgtttgtaaagttgctgctcctccttctgctcgttgtggcctttctgtctctggagatcctcctgctactgcccctggtttatctcctacggccggagcaggagcacccgcgttgtccagtggtgcaaatgcggcaactccagtttcgtccccgaggagttccgatgcgtccttgctctctgtatcttttgcatttgtcatcttcatggcactcatttcttctttctattgagtcttaaaatttaattgcttcttgttgagttatttttgtttgctatgtagctgaagagtttggtgttactgatcatatttacctttcatgtgtcaattttaatgagaaatctccttttagtt

SEQ ID NO: 35649 - protein, 172 aa, Arabidopsis thaliana
  peptide (1)..(172): Ceres Seq. ID no. 12393563
  misc_feature (30)..(108): Pfam Name: Protease inhibitor/seed storage/LTP family Pfam Description: Protease inhibitor/seed storage/LTP family
  misc_feature (11)..(169): Homolog of NCBI NO: 18403453 NR Description: expressed protein
  misc_feature (27)..(153): Homolog of NCBI NO: 15220327 NR Description: non-specific lipid transfer protein, putative
  misc_feature (29)..(172): Homolog of NCBI NO: 30680828 NR Description: protease inhibitor/seed storage/lipid transfer
  misc_feature (29)..(172): Homolog of NCBI NO: 7487610 NR Description: hypothetical protein T3F12.2 - Arabidopsis
  misc_feature (4)..(167): Homolog of NCBI NO: 30682659 NR Description: lipid transfer protein family [Arabidopsis
  misc_feature (3)..(166): Homolog of NCBI NO: 10176956 NR Description: contains similarity to nonspecific lipid-transfer
  misc_feature (3)..(172): Homolog of NCBI NO: 21618136 NR Description: nonspecific lipid-transfer protein-like protein
  misc_feature (3)..(172): Homolog of NCBI NO: 18424785 NR Description: putative protein
  misc_feature (4)..(172): Homolog of NCBI NO: 27765012 NR Description: At2g13820 [Arabidopsis thaliana]
  misc_feature (4)..(172): Homolog of NCBI NO: 15225509 NR Description: putative nonspecific lipid-transfer protein
SFTMAYATILMIFSVVALMSGERAHAAVDCSSLILNMADCLSFVTSGSTVVKPEGTCCSGLKTVVRTGPECLCEAFKNSGSLGLTLDLSKAASLPSVCKVAAPPSARCGLSVSGDPPATAPGLSPTAGAGAPALSSGANAATPVSSPRSSDASLLSVSFAFVIFMALISSFY

SEQ ID NO: 35650 - protein, 169 aa, Arabidopsis thaliana
  peptide (1)..(169): Ceres Seq. ID no. 12393564
  misc_feature (27)..(105): Pfam Name: Protease inhibitor/seed storage/LTP family Pfam Description: Protease inhibitor/seed storage/LTP family
  misc_feature (8)..(166): Homolog of NCBI NO: 18403453 NR Description: expressed protein
  misc_feature (24)..(150): Homolog of NCBI NO: 15220327 NR Description: non-specific lipid transfer protein, putative
  misc_feature (26)..(169): Homolog of NCBI NO: 30680828 NR Description: protease inhibitor/seed storage/lipid transfer
  misc_feature (26)..(169): Homolog of NCBI NO: 7487610 NR Description: hypothetical protein T3F12.2 - Arabidopsis
  misc_feature (1)..(164): Homolog of NCBI NO: 30682659 NR Description: lipid transfer protein family [Arabidopsis
  misc_feature (1)..(163): Homolog of NCBI NO: 10176956 NR Description: contains similarity to nonspecific lipid-transfer
  misc_feature (1)..(169): Homolog of NCBI NO: 21618136 NR Description: nonspecific lipid-transfer protein-like protein
  misc_feature (1)..(169): Homolog of NCBI NO: 18424785 NR Description: putative protein
  misc_feature (1)..(169): Homolog of NCBI NO: 27765012 NR Description: At2g13820 [Arabidopsis thaliana]
  misc_feature (1)..(169): Homolog of NCBI NO: 15225509 NR Description: putative nonspecific lipid-transfer protein
MAYATILMIFSVVALMSGERAHAAVDCSSLILNMADCLSFVTSGSTVVKPEGTCCSGLKTVVRTGPECLCEAFKNSGSLGLTLDLSKAASLPSVCKVAAPPSARCGLSVSGDPPATAPGLSPTAGAGAPALSSGANAATPVSSPRSSDASLLSVSFAFVIFMALISSFY

SEQ ID NO: 35651 - protein, 162 aa, Arabidopsis thaliana
  peptide (1)..(162): Ceres Seq. ID no. 12393565
  misc_feature (20)..(98): Pfam Name: Protease inhibitor/seed storage/LTP family Pfam Description: Protease inhibitor/seed storage/LTP family
  misc_feature (1)..(159): Homolog of NCBI NO: 18403453 NR Description: expressed protein
  misc_feature (17)..(143): Homolog of NCBI NO: 15220327 NR Description: non-specific lipid transfer protein, putative
  misc_feature (19)..(162): Homolog of NCBI NO: 30680828 NR Description: protease inhibitor/seed storage/lipid transfer
  misc_feature (19)..(162): Homolog of NCBI NO: 7487610 NR Description: hypothetical protein T3F12.2 - Arabidopsis
  misc_feature (1)..(157): Homolog of NCBI NO: 30682659 NR Description: lipid transfer protein family [Arabidopsis
  misc_feature (1)..(156): Homolog of NCBI NO: 10176956 NR Description: contains similarity to nonspecific lipid-transfer
  misc_feature (1)..(162): Homolog of NCBI NO: 21618136 NR Description: nonspecific lipid-transfer protein-like protein
  misc_feature (1)..(162): Homolog of NCBI NO: 18424785 NR Description: putative protein
  misc_feature (1)..(162): Homolog of NCBI NO: 27765012 NR Description: At2g13820 [Arabidopsis thaliana]
  misc_feature (1)..(162): Homolog of NCBI NO: 15225509 NR Description: putative nonspecific lipid-transfer protein
MIFSVVALMSGERAHAAVDCSSLILNMADCLSFVTSGSTVVKPEGTCCSGLKTVVRTGPECLCEAFKNSGSLGLTLDLSKAASLPSVCKVAAPPSARCGLSVSGDPPATAPGLSPTAGAGAPALSSGANAATPVSSPRSSDASLLSVSFAFVIFMALISSFY

SEQ ID NO: 35652 - DNA, 887 bp, Arabidopsis thaliana
  misc_feature (1)..(887): Ceres Seq. ID no. 12332865
  misc_feature: MA Experiment ID: 108434 Result: Down-regulated in Transcription
  misc_feature: MA Experiment 108434 PARAMETER Experiment Name: At_Root_Tips_cDNA_P Parameter: Tissue Value: Root Tips
  misc_feature: MA Experiment ID: 108488 Result: Down-regulated in Transcription
  misc_feature: MA Experiment ID: 108573 Result: Down-regulated in Transcription
  misc_feature: MA Experiment 108573 PARAMETER Experiment Name: At_Drought_cDNA_P Parameter: Timepoint (hr) Value: 6
  misc_feature: MA Experiment 108573 PARAMETER Experiment Name: At_Drought_cDNA_P Parameter: Tissue Value: Aerial
  misc_feature: MA Experiment 108573 PARAMETER Experiment Name: At_Drought_cDNA_P Parameter: Treatment Value: Drought vs. No Drought
  misc_feature: MA Experiment ID: 108574 Result: Up-regulated in Transcription
  misc_feature: MA Experiment 108574 PARAMETER Experiment Name: At_Wounding__cDNA_P Parameter: Timepoint (hr) Value: 1
  misc_feature: MA Experiment 108574 PARAMETER Experiment Name: At_Wounding__cDNA_P Parameter: Tissue Value: Aerial
  misc_feature: MA Experiment 108574 PARAMETER Experiment Name: At_Wounding__cDNA_P Parameter: Treatment Value: Wounding vs. No Wounding
  misc_feature: MA Experiment ID: 108576 Result: Up-regulated in Transcription
  misc_feature: MA Experiment 108576 PARAMETER Experiment Name: At_42deg_Heat_cDNA_P Parameter: Temperature (deg C) Value: 42 vs. 22
  misc_feature: MA Experiment 108576 PARAMETER Experiment Name: At_42deg_Heat_cDNA_P Parameter: Timepoint (hr) Value: 1
  misc_feature: MA Experiment 108576 PARAMETER Experiment Name: At_42deg_Heat_cDNA_P Parameter: Tissue Value: Aerial
  misc_feature: MA Experiment ID: 108585 Result: Up-regulated in Transcription
  misc_feature: MA Experiment 108585 PARAMETER Experiment Name: At_5mM_NaNP_cDNA_P Parameter: Timepoint (hr) Value: 6
  misc_feature: MA Experiment 108585 PARAMETER Experiment Name: At_5mM_NaNP_cDNA_P Parameter: Tissue Value: Aerial
  misc_feature: MA Experiment 108585 PARAMETER Experiment Name: At_5mM_NaNP_cDNA_P Parameter: Treatment Value: null
  misc_feature: MA Experiment ID: 108594 Result: Down-regulated in Transcription
  misc_feature: MA Experiment 108594 PARAMETER Experiment Name: At_Ler-rhl_Root_cDNA_P Parameter: Plant Line Value: null
  misc_feature: MA Experiment ID: 108595 Result: Up-regulated in Transcription
  misc_feature: MA Experiment 108595 PARAMETER Experiment Name: At_Ler-pi_Ovule_cDNA_P Parameter: Plant Line Value: null
  misc_feature: MA Experiment ID: 108667 Result: Up-regulated in Transcription
  misc_feature: MA Experiment 108667 PARAMETER Experiment Name: At_2mM_SA_cDNA_P Parameter: Plant Line Value: WS
  misc_feature: MA Experiment 108667 PARAMETER Experiment Name: At_2mM_SA_cDNA_P Parameter: Timepoint (hr) Value: 1
  misc_feature: MA Experiment 108667 PARAMETER Experiment Name: At_2mM_SA_cDNA_P Parameter: Treatment Value: 2mM SA vs. No Treatment
  misc_feature: MA Experiment ID: 108668 Result: Up-regulated in Transcription
  misc_feature: MA Experiment 108668 PARAMETER Experiment Name: At_2mM_SA_cDNA_P Parameter: Plant Line Value: WS
  misc_feature: MA Experiment 108668 PARAMETER Experiment Name: At_2mM_SA_cDNA_P Parameter: Timepoint (hr) Value: 6
  misc_feature: MA Experiment 108668 PARAMETER Experiment Name: At_2mM_SA_cDNA_P Parameter: Treatment Value: 2mM SA vs. No Treatment
  misc_feature: MA Experiment ID: 20000030 Result: Up-regulated in Transcription
  misc_feature: MA Experiment 20000030 PARAMETER Experiment Name: At_CS6630_Roots_cDNA_P Parameter: Plant Line Value: CS6630 vs. WS
  misc_feature: MA Experiment 20000030 PARAMETER Experiment Name: At_CS6630_Roots_cDNA_P Parameter: Tissue Value: Roots
  misc_feature: MA Experiment ID: 20000069 Result: Up-regulated in Transcription
  misc_feature: MA Experiment 20000069 PARAMETER Experiment Name: At_100uM_ABA_Mutants_cDNA_P Parameter: Plant Line Value: CS23
  misc_feature: MA Experiment 20000069 PARAMETER Experiment Name: At_100uM_ABA_Mutants_cDNA_P Parameter: Timepoint (hr) Value: 6
  misc_feature: MA Experiment 20000069 PARAMETER Experiment Name: At_100uM_ABA_Mutants_cDNA_P Parameter: Tissue Value: Aerial
  misc_feature: MA Experiment 20000069 PARAMETER Experiment Name: At_100uM_ABA_Mutants_cDNA_P Parameter: Treatment Value: 100uM ABA vs. No Treatment
  misc_feature: MA Experiment ID: 20000087 Result: Up-regulated in Transcription
  misc_feature: MA Experiment 20000087 PARAMETER Experiment Name: At_100uM_ABA_Mutants_cDNA_P Parameter: Plant Line Value: WS
  misc_feature: MA Experiment 20000087 PARAMETER Experiment Name: At_100uM_ABA_Mutants_cDNA_P Parameter: Timepoint (hr) Value: 6
  misc_feature: MA Experiment 20000087 PARAMETER Experiment Name: At_100uM_ABA_Mutants_cDNA_P Parameter: Tissue Value: Aerial
  misc_feature: MA Experiment 20000087 PARAMETER Experiment Name: At_100uM_ABA_Mutants_cDNA_P Parameter: Treatment Value: 100uM ABA vs. No Treatment
  misc_feature: MA Experiment ID: 20000089 Result: Up-regulated in Transcription
  misc_feature: MA Experiment ID: 20000117 Result: Up-regulated in Transcription
  misc_feature: MA Experiment 20000117 PARAMETER Experiment Name: At_100uM_ABA_Mutants_cDNA_P Parameter: Plant Line Value: Columbia
  misc_feature: MA Experiment 20000117 PARAMETER Experiment Name: At_100uM_ABA_Mutants_cDNA_P Parameter: Timepoint (hr) Value: 6
  misc_feature: MA Experiment 20000117 PARAMETER Experiment Name: At_100uM_ABA_Mutants_cDNA_P Parameter: Tissue Value: Aerial
  misc_feature: MA Experiment 20000117 PARAMETER Experiment Name: At_100uM_ABA_Mutants_cDNA_P Parameter: Treatment Value: 100uM ABA vs. No Treatment
  misc_feature: MA Experiment ID: 20000182 Result: Up-regulated in Transcription
  misc_feature: MA Experiment 20000182 PARAMETER Experiment Name: At_2mM_SA_P Parameter: Age (day) Value: 14
  misc_feature: MA Experiment 20000182 PARAMETER Experiment Name: At_2mM_SA_P Parameter: Organism Value: A. thaliana
  misc_feature: MA Experiment 20000182 PARAMETER Experiment Name: At_2mM_SA_P Parameter: Plant Line Value: WS
  misc_feature: MA Experiment 20000182 PARAMETER Experiment Name: At_2mM_SA_P Parameter: Timepoint (hr) Value: 6
  misc_feature: MA Experiment 20000182 PARAMETER Experiment Name: At_2mM_SA_P Parameter: Tissue Value: Aerial
  misc_feature: MA Experiment 20000182 PARAMETER Experiment Name: At_2mM_SA_P Parameter: Treatment Value: 2mM SA vs. No Treatment
  misc_feature: MA Experiment ID: 20000439 Result: Up-regulated in Transcription
  misc_feature: MA Experiment 20000439 PARAMETER Experiment Name: At_Roots__P Parameter: Age (day) Value: 14 vs. 21
  misc_feature: MA Experiment 20000439 PARAMETER Experiment Name: At_Roots__P Parameter: Organism Value: A. thaliana
  misc_feature: MA Experiment 20000439 PARAMETER Experiment Name: At_Roots__P Parameter: Tissue Value: Roots vs. Whole Plant
  misc_feature: MA Experiment ID: 20000527 Result: Down-regulated in Transcription
  misc_feature: MA Experiment 20000527 PARAMETER Experiment Name: At_10percent_PEG_P Parameter: Age (day) Value: 20
  misc_feature: MA Experiment 20000527 PARAMETER Experiment Name: At_10percent_PEG_P Parameter: Organism Value: A. thaliana
  misc_feature: MA Experiment 20000527 PARAMETER Experiment Name: At_10percent_PEG_P Parameter: Plant Line Value: WS
  misc_feature: MA Experiment 20000527 PARAMETER Experiment Name: At_10percent_PEG_P Parameter: Timepoint (day) Value: 20
  misc_feature: MA Experiment 20000527 PARAMETER Experiment Name: At_10percent_PEG_P Parameter: Tissue Value: Whole Plant
  misc_feature: MA Experiment 20000527 PARAMETER Experiment Name: At_10percent_PEG_P Parameter: Treatment Value: 10percent PEG vs. No Treatment
  misc_feature: MA Experiment ID: 20000709 Result: Up-regulated in Transcription
  misc_feature: MA Experiment 20000709 PARAMETER Experiment Name: At_15mM_NH4NO3_L-to-H_P Parameter: Age (hr) Value: 14
  misc_feature: MA Experiment 20000709 PARAMETER Experiment Name: At_15mM_NH4NO3_L-to-H_P Parameter: Organism Value: A. thaliana
  misc_feature: MA Experiment 20000709 PARAMETER Experiment Name: At_15mM_NH4NO3_L-to-H_P Parameter: Plant Line Value: WS
  misc_feature: MA Experiment 20000709 PARAMETER Experiment Name: At_15mM_NH4NO3_L-to-H_P Parameter: Timepoint (hr) Value: 4
  misc_feature: MA Experiment 20000709 PARAMETER Experiment Name: At_15mM_NH4NO3_L-to-H_P Parameter: Tissue Value: Aerial
  misc_feature: MA Experiment 20000709 PARAMETER Experiment Name: At_15mM_NH4NO3_L-to-H_P Parameter: Treatment Value: 15mM NH4NO3 vs. 30mM Mannitol
  misc_feature: MA Experiment ID: 20001560 Result: Up-regulated in Transcription
  misc_feature: MA Experiment 20001560 PARAMETER Experiment Name: At_Drought_Soil_Dry_P Parameter: Age (day) Value: 28
  misc_feature: MA Experiment 20001560 PARAMETER Experiment Name: At_Drought_Soil_Dry_P Parameter: Organism Value: A. thaliana
  misc_feature: MA Experiment 20001560 PARAMETER Experiment Name: At_Drought_Soil_Dry_P Parameter: Plant Line Value: WS
  misc_feature: MA Experiment 20001560 PARAMETER Experiment Name: At_Drought_Soil_Dry_P Parameter: Post Timepoint (hr) Value: None
  misc_feature: MA Experiment 20001560 PARAMETER Experiment Name: At_Drought_Soil_Dry_P Parameter: Post-Treatment Value: None
  misc_feature: MA Experiment 20001560 PARAMETER Experiment Name: At_Drought_Soil_Dry_P Parameter: Timepoint (day) Value: 14
  misc_feature: MA Experiment 20001560 PARAMETER Experiment Name: At_Drought_Soil_Dry_P Parameter: Treatment Value: Drought vs. No Drought
  misc_feature: MA Experiment ID: 20001904 Result: Up-regulated in Transcription
  misc_feature: MA Experiment 20001904 PARAMETER Experiment Name: At_Drought_Reproduction_P Parameter: Age (day) Value: 37
  misc_feature: MA Experiment 20001904 PARAMETER Experiment Name: At_Drought_Reproduction_P Parameter: Organism Value: A. thaliana
  misc_feature: MA Experiment 20001904 PARAMETER Experiment Name: At_Drought_Reproduction_P Parameter: Plant Line Value: WS
  misc_feature: MA Experiment 20001904 PARAMETER Experiment Name: At_Drought_Reproduction_P Parameter: Timepoint (day) Value: 7
  misc_feature: MA Experiment 20001904 PARAMETER Experiment Name: At_Drought_Reproduction_P Parameter: Tissue Value: Rosettes
  misc_feature: MA Experiment 20001904 PARAMETER Experiment Name: At_Drought_Reproduction_P Parameter: Treatment Value: Drought vs. No Drought
  misc_feature: MA Experiment ID: 20001905 Result: Up-regulated in Transcription
  misc_feature: MA Experiment 20001905 PARAMETER Experiment Name: At_Drought_Reproduction_P Parameter: Age (day) Value: 40
  misc_feature: MA Experiment 20001905 PARAMETER Experiment Name: At_Drought_Reproduction_P Parameter: Organism Value: A. thaliana
  misc_feature: MA Experiment 20001905 PARAMETER Experiment Name: At_Drought_Reproduction_P Parameter: Plant Line Value: WS
  misc_feature: MA Experiment 20001905 PARAMETER Experiment Name: At_Drought_Reproduction_P Parameter: Timepoint (day) Value: 10
  misc_feature: MA Experiment 20001905 PARAMETER Experiment Name: At_Drought_Reproduction_P Parameter: Tissue Value: Rosettes
  misc_feature: MA Experiment 20001905 PARAMETER Experiment Name: At_Drought_Reproduction_P Parameter: Treatment Value: Drought vs. No Drought
ataaagaagaagaagctaacgaaaaataatggcggagagatcaaattcagaggaagtgaagcttttgggaatgtgggcgagtccttttagtcggaggattgagattgctcttacgcttaaaggtgtttcgtatgagttcctggagcaagatatcacaaacaagagctctttgttgcttcaattgaatccggttcataagatgattccggttcttgttcataatggtaaaccgatttctgaatcacttgtgattcttgagtatattgatgagacttggagagacaatccgattcttcctcaagatccgtatgagagaactatggctcgattctggtctaaattcgtcgatgaacagatttatgtgacggcgatgaaagttgtggggaagaccggaaaagagagagatgctgtggttgaagcgacgagagatttgttgatgtttttggagaaagagcttgttgggaaagattttctcggtgggaaaagtttagggtttgtggatattgtggcgactttggtggcgttttggctgatgagaacggaggagatcgtcggggtaaaggtggttccggtggagaagttcccggagatacatagatgggttaagaatttgttgggtaatgatgttatcaagaaatgtattcctcctgaagatgagcatcttaagtacattagagctcgtatggagaaactcaatatcaaatctgcttgataaggttttataaaaattctaatgctcacagtatgtctcttttgttcttgtctcagttgctatgttctgtcacttaatgtttgctatattgaaacacgaaaatttgaactttctttcttgttctacctaaagatgttcttaagcaaataatacagaagaaactctcttttgtgct

SEQ ID NO: 35653 - protein, 227 aa, Arabidopsis thaliana
  peptide (1)..(227): Ceres Seq. ID no. 12332866
  misc_feature (89)..(199): Pfam Name: Glutathione S-transferase, C-terminal domain Pfam Description: Glutathione S-transferase, C-terminal domain
  misc_feature (1)..(215): Homolog of NCBI NO: 15227087 NR Description: glutathione transferase, putative
  misc_feature (7)..(227): Homolog of NCBI NO: 15227084 NR Description: glutathione transferase, putative
  misc_feature (1)..(222): Homolog of NCBI NO: 15227085 NR Description: glutathione transferase (103-1A)
  misc_feature (1)..(221): Homolog of NCBI NO: 15227550 NR Description: glutathione transferase, putative
  misc_feature (1)..(227): Homolog of NCBI NO: 15227551 NR Description: glutathione transferase, putative
  misc_feature (1)..(227): Homolog of NCBI NO: 15227086 NR Description: glutathione transferase, putative
  misc_feature (1)..(227): Homolog of NCBI NO: 14423534 NR Description: putative glutathione S-transferase [Arabidopsis
  misc_feature (1)..(227): Homolog of NCBI NO: 15227082 NR Description: glutathione transferase, putative
MAERSNSEEVKLLGMWASPFSRRIEIALTLKGVSYEFLEQDITNKSSLLLQLNPVHKMIPVLVHNGKPISESLVILEYIDETWRDNPILPQDPYERTMARFWSKFVDEQIYVTAMKVVGKTGKERDAVVEATRDLLMFLEKELVGKDFLGGKSLGFVDIVATLVAFWLMRTEEIVGVKVVPVEKFPEIHRWVKNLLGNDVIKKCIPPEDEHLKYIRARMEKLNIKSA

SEQ ID NO: 35654 - protein, 213 aa, Arabidopsis thaliana
  peptide (1)..(213): Ceres Seq. ID no. 12332867
  misc_feature (75)..(185): Pfam Name: Glutathione S-transferase, C-terminal domain Pfam Description: Glutathione S-transferase, C-terminal domain
  misc_feature (1)..(201): Homolog of NCBI NO: 15227087 NR Description: glutathione transferase, putative
  misc_feature (1)..(213): Homolog of NCBI NO: 15227084 NR Description: glutathione transferase, putative
  misc_feature (1)..(208): Homolog of NCBI NO: 15227085 NR Description: glutathione transferase (103-1A)
  misc_feature (1)..(207): Homolog of NCBI NO: 15227550 NR Description: glutathione transferase, putative
  misc_feature (1)..(213): Homolog of NCBI NO: 15227551 NR Description: glutathione transferase, putative
  misc_feature (1)..(213): Homolog of NCBI NO: 15227086 NR Description: glutathione transferase, putative
  misc_feature (1)..(213): Homolog of NCBI NO: 14423534 NR Description: putative glutathione S-transferase [Arabidopsis
  misc_feature (1)..(213): Homolog of NCBI NO: 15227082 NR Description: glutathione transferase, putative
MWASPFSRRIEIALTLKGVSYEFLEQDITNKSSLLLQLNPVHKMIPVLVHNGKPISESLVILEYIDETWRDNPILPQDPYERTMARFWSKFVDEQIYVTAMKVVGKTGKERDAVVEATRDLLMFLEKELVGKDFLGGKSLGFVDIVATLVAFWLMRTEEIVGVKVVPVEKFPEIHRWVKNLLGNDVIKKCIPPEDEHLKYIRARMEKLNIKSA

SEQ ID NO: 35655 - protein, 170 aa, Arabidopsis thaliana
  peptide (1)..(170): Ceres Seq. ID no. 12332868
  misc_feature (32)..(142): Pfam Name: Glutathione S-transferase, C-terminal domain Pfam Description: Glutathione S-transferase, C-terminal domain
  misc_feature (1)..(158): Homolog of NCBI NO: 15227087 NR Description: glutathione transferase, putative
  misc_feature (1)..(170): Homolog of NCBI NO: 15227084 NR Description: glutathione transferase, putative
  misc_feature (1)..(165): Homolog of NCBI NO: 15227085 NR Description: glutathione transferase (103-1A)
  misc_feature (1)..(164): Homolog of NCBI NO: 15227550 NR Description: glutathione transferase, putative
  misc_feature (1)..(170): Homolog of NCBI NO: 15227551 NR Description: glutathione transferase, putative
  misc_feature (1)..(170): Homolog of NCBI NO: 15227086 NR Description: glutathione transferase, putative
  misc_feature (1)..(170): Homolog of NCBI NO: 14423534 NR Description: putative glutathione S-transferase [Arabidopsis
  misc_feature (1)..(170): Homolog of NCBI NO: 15227082 NR Description: glutathione transferase, putative
MIPVLVHNGKPISESLVILEYIDETWRDNPILPQDPYERTMARFWSKFVDEQIYVTAMKVVGKTGKERDAVVEATRDLLMFLEKELVGKDFLGGKSLGFVDIVATLVAFWLMRTEEIVGVKVVPVEKFPEIHRWVKNLLGNDVIKKCIPPEDEHLKYIRARMEKLNIKSA

SEQ ID NO: 35656 - DNA, 560 bp, Arabidopsis thaliana
  misc_feature (1)..(560): Ceres Seq. ID no. 12339222
  misc_feature: MA Experiment ID: 108434 Result: Up-regulated in Transcription
  misc_feature: MA Experiment 108434 PARAMETER Experiment Name: At_Root_Tips_cDNA_P Parameter: Tissue Value: Root Tips
  misc_feature: MA Experiment ID: 108435 Result: Up-regulated in Transcription
  misc_feature: MA Experiment 108435 PARAMETER Experiment Name: At_stm_Mutants_cDNA_P Parameter: Plant Line Value: wt Landsburg vs stm
  misc_feature: MA Experiment 108435 PARAMETER Experiment Name: At_stm_Mutants_cDNA_P Parameter: Tissue Value: Shoot Apical Meristem Region
  misc_feature: MA Experiment ID: 108462 Result: Down-regulated in Transcription
  misc_feature: MA Experiment 108462 PARAMETER Experiment Name: At_Germinating_Seeds_cDNA_P Parameter: Age (day) Value: 2 vs. 0
  misc_feature: MA Experiment 108462 PARAMETER Experiment Name: At_Germinating_Seeds_cDNA_P Parameter: Tissue Value: Germinating Seeds
  misc_feature: MA Experiment ID: 108463 Result: Down-regulated in Transcription
  misc_feature: MA Experiment 108463 PARAMETER Experiment Name: At_Germinating_Seeds_cDNA_P Parameter: Age (day) Value: 3 vs. 0
  misc_feature: MA Experiment 108463 PARAMETER Experiment Name: At_Germinating_Seeds_cDNA_P Parameter: Tissue Value: Germinating Seeds
  misc_feature: MA Experiment ID: 108464 Result: Down-regulated in Transcription
  misc_feature: MA Experiment 108464 PARAMETER Experiment Name: At_Germinating_Seeds_cDNA_P Parameter: Age (day) Value: 4 vs. 0
  misc_feature: MA Experiment 108464 PARAMETER Experiment Name: At_Germinating_Seeds_cDNA_P Parameter: Tissue Value: Germinating Seeds
  misc_feature: MA Experiment ID: 20000224 Result: Down-regulated in Transcription
atttgatccgtttatacttgttattggcatttcatcatcgtctgggataaaaaaatgtcgacagttggagagcttgcttgcagctacgctgttatgatcctcgaggacgagggtatcgctatcacggctgacaaaatcgcgaccttggtgaaagctgctggtgttagtattgagtcatactggccaatgctattcgccaagatggctgagaaacgtaacgtgactgatctcatcatgaacgttggtgctggtggtggaggtagtgctccggttgcagctgctgctccagctgctggcggtggtgcggcagctgctcctgctgctgaggagaagaagaaggatgagccagcagaagagagtgacggagatttgggtttcggtttgtttgactaaacgcagtcacttgtctttcttctttgtagttggatattggagactatattttgtcgtatgagttattattacttgtttgatctggctaaaggactattagttggtttatgatgcgtatgttgtataactcaagtttcctagcaaaccaatcggctcgggcttttgtt

SEQ ID NO: 35657 - protein, 112 aa, Arabidopsis thaliana
  peptide (1)..(112): Ceres Seq. ID no. 12339223
  misc_feature (22)..(111): Pfam Name: 60s Acidic ribosomal protein Pfam Description: 60s Acidic ribosomal protein
  misc_feature (1)..(112): Homolog of NCBI NO: 25150244 NR Description: 60S Ribosomal Protein, Acidic 1
  misc_feature (1)..(112): Homolog of NCBI NO: 18253043 NR Description: 60S acidic ribosomal protein P1 [Spodoptera
  misc_feature (5)..(112): Homolog of NCBI NO: 1710590 NR Description: 60S ACIDIC RIBOSOMAL PROTEIN P1 (L12)
  misc_feature (5)..(112): Homolog of NCBI NO: 7440759 NR Description: acidic ribosomal protein P1a - maize
  misc_feature (1)..(112): Homolog of NCBI NO: 6094103 NR Description: 60S acidic ribosomal protein P1
  misc_feature (1)..(112): Homolog of NCBI NO: 18411448 NR Description: acidic ribosomal protein p1
  misc_feature (1)..(112): Homolog of NCBI NO: 21553441 NR Description: 60S acidic ribosomal protein P1-like protein
  misc_feature (1)..(112): Homolog of NCBI NO: 15238170 NR Description: 60S acidic ribosomal protein P1-like protein
  misc_feature (1)..(112): Homolog of NCBI NO: 15223303 NR Description: acidic ribosomal protein, putative
  misc_feature (1)..(112): Homolog of NCBI NO: 21592477 NR Description: acidic ribosomal protein, putative [Arabidopsis
MSTVGELACSYAVMILEDEGIAITADKIATLVKAAGVSIESYWPMLFAKMAEKRNVTDLIMNVGAGGGGSAPVAAAAPAAGGGAAAAPAAEEKKKDEPAEESDGDLGFGLFD

SEQ ID NO: 35658 - protein, 99 aa, Arabidopsis thaliana
  peptide (1)..(99): Ceres Seq. ID no. 12339224
  misc_feature (9)..(98): Pfam Name: 60s Acidic ribosomal protein Pfam Description: 60s Acidic ribosomal protein
  misc_feature (1)..(99): Homolog of NCBI NO: 25150244 NR Description: 60S Ribosomal Protein, Acidic 1
  misc_feature (1)..(99): Homolog of NCBI NO: 18253043 NR Description: 60S acidic ribosomal protein P1 [Spodoptera
  misc_feature (1)..(99): Homolog of NCBI NO: 1710590 NR Description: 60S ACIDIC RIBOSOMAL PROTEIN P1 (L12)
  misc_feature (1)..(99): Homolog of NCBI NO: 7440759 NR Description: acidic ribosomal protein P1a - maize
  misc_feature (1)..(99): Homolog of NCBI NO: 6094103 NR Description: 60S acidic ribosomal protein P1
  misc_feature (1)..(99): Homolog of NCBI NO: 18411448 NR Description: acidic ribosomal protein p1
  misc_feature (1)..(99): Homolog of NCBI NO: 21553441 NR Description: 60S acidic ribosomal protein P1-like protein
  misc_feature (1)..(99): Homolog of NCBI NO: 15238170 NR Description: 60S acidic ribosomal protein P1-like protein
  misc_feature (1)..(99): Homolog of NCBI NO: 15223303 NR Description: acidic ribosomal protein, putative
  misc_feature (1)..(99): Homolog of NCBI NO: 21592477 NR Description: acidic ribosomal protein, putative [Arabidopsis
MILEDEGIAITADKIATLVKAAGVSIESYWPMLFAKMAEKRNVTDLIMNVGAGGGGSAPVAAAAPAAGGGAAAAPAAEEKKKDEPAEESDGDLGFGLFD

SEQ ID NO: 35659 - protein, 68 aa, Arabidopsis thaliana
  peptide (1)..(68): Ceres Seq. ID no. 12339226
  misc_feature (1)..(67): Pfam Name: 60s Acidic ribosomal protein Pfam Description: 60s Acidic ribosomal protein
  misc_feature (1)..(68): Homolog of NCBI NO: 25150244 NR Description: 60S Ribosomal Protein, Acidic 1
  misc_feature (1)..(68): Homolog of NCBI NO: 18253043 NR Description: 60S acidic ribosomal protein P1 [Spodoptera
  misc_feature (1)..(68): Homolog of NCBI NO: 1710590 NR Description: 60S ACIDIC RIBOSOMAL PROTEIN P1 (L12)
  misc_feature (1)..(68): Homolog of NCBI NO: 7440759 NR Description: acidic ribosomal protein P1a - maize
  misc_feature (1)..(68): Homolog of NCBI NO: 6094103 NR Description: 60S acidic ribosomal protein P1
  misc_feature (1)..(68): Homolog of NCBI NO: 18411448 NR Description: acidic ribosomal protein p1
  misc_feature (1)..(68): Homolog of NCBI NO: 21553441 NR Description: 60S acidic ribosomal protein P1-like protein
  misc_feature (1)..(68): Homolog of NCBI NO: 15238170 NR Description: 60S acidic ribosomal protein P1-like protein
  misc_feature (1)..(68): Homolog of NCBI NO: 15223303 NR Description: acidic ribosomal protein, putative
  misc_feature (1)..(68): Homolog of NCBI NO: 21592477 NR Description: acidic ribosomal protein, putative [Arabidopsis
MLFAKMAEKRNVTDLIMNVGAGGGGSAPVAAAAPAAGGGAAAAPAAEEKKKDEPAEESDGDLGFGLFD

SEQ ID NO: 35660 - DNA, 1024 bp, Arabidopsis thaliana
  misc_feature (1)..(1024): Ceres Seq. ID no. 13504706
  misc_feature: MA Experiment ID: 108433 Result: Up-regulated in Transcription
  misc_feature: MA Experiment 108433 PARAMETER Experiment Name: At_rhl_Mutant2_cDNA_P Parameter: Age (day) Value: 7
  misc_feature: MA Experiment 108433 PARAMETER Experiment Name: At_rhl_Mutant2_cDNA_P Parameter: Organism Value: A. thaliana
  misc_feature: MA Experiment 108433 PARAMETER Experiment Name: At_rhl_Mutant2_cDNA_P Parameter: Plant Line Value: rhl Mutant vs. wt landsburg
  misc_feature: MA Experiment 108433 PARAMETER Experiment Name: At_rhl_Mutant2_cDNA_P Parameter: Tissue Value: Roots
  misc_feature: MA Experiment ID: 108461 Result: Up-regulated in Transcription
  misc_feature: MA Experiment 108461 PARAMETER Experiment Name: At_Germinating_Seeds_cDNA_P Parameter: Age (day) Value: 1 vs. 0
  misc_feature: MA Experiment 108461 PARAMETER Experiment Name: At_Germinating_Seeds_cDNA_P Parameter: Tissue Value: Germinating Seeds
  misc_feature: MA Experiment ID: 108462 Result: Up-regulated in Transcription
  misc_feature: MA Experiment 108462 PARAMETER Experiment Name: At_Germinating_Seeds_cDNA_P Parameter: Age (day) Value: 2 vs. 0
  misc_feature: MA Experiment 108462 PARAMETER Experiment Name: At_Germinating_Seeds_cDNA_P Parameter: Tissue Value: Germinating Seeds
  misc_feature: MA Experiment ID: 108463 Result: Up-regulated in Transcription
  misc_feature: MA Experiment 108463 PARAMETER Experiment Name: At_Germinating_Seeds_cDNA_P Parameter: Age (day) Value: 3 vs. 0
  misc_feature: MA Experiment 108463 PARAMETER Experiment Name: At_Germinating_Seeds_cDNA_P Parameter: Tissue Value: Germinating Seeds
  misc_feature: MA Experiment ID: 108464 Result: Up-regulated in Transcription
  misc_feature: MA Experiment 108464 PARAMETER Experiment Name: At_Germinating_Seeds_cDNA_P Parameter: Age (day) Value: 4 vs. 0
  misc_feature: MA Experiment 108464 PARAMETER Experiment Name: At_Germinating_Seeds_cDNA_P Parameter: Tissue Value: Germinating Seeds
  misc_feature: MA Experiment ID: 108474 Result: Up-regulated in Transcription
  misc_feature: MA Experiment 108474 PARAMETER Experiment Name: At_Drought_Flowers_cDNA_P Parameter: Timepoint (hr) Value: null
  misc_feature: MA Experiment 108474 PARAMETER Experiment Name: At_Drought_Flowers_cDNA_P Parameter: Treatment Value: Drought vs. No Drought
  misc_feature: MA Experiment ID: 108488 Result: Down-regulated in Transcription
  misc_feature: MA Experiment ID: 108501 Result: Up-regulated in Transcription
  misc_feature: MA Experiment 108501 PARAMETER Experiment Name: At_ap2_floral_buds_cDNA_P Parameter: Plant Line Value: ap2 (Ler.)
  misc_feature: MA Experiment 108501 PARAMETER Experiment Name: At_ap2_floral_buds_cDNA_P Parameter: Tissue Value: Closed Flower
  misc_feature: MA Experiment ID: 108573 Result: Up-regulated in Transcription
  misc_feature: MA Experiment 108573 PARAMETER Experiment Name: At_Drought_cDNA_P Parameter: Timepoint (hr) Value: 6
  misc_feature: MA Experiment 108573 PARAMETER Experiment Name: At_Drought_cDNA_P Parameter: Tissue Value: Aerial
  misc_feature: MA Experiment 108573 PARAMETER Experiment Name: At_Drought_cDNA_P Parameter: Treatment Value: Drought vs. No Drought
  misc_feature: MA Experiment ID: 108595 Result: Down-regulated in Transcription
  misc_feature: MA Experiment 108595 PARAMETER Experiment Name: At_Ler-pi_Ovule_cDNA_P Parameter: Plant Line Value: null
  misc_feature: MA Experiment ID: 20000068 Result: Up-regulated in Transcription
  misc_feature: MA Experiment ID: 20000071 Result: Down-regulated in Transcription
  misc_feature: MA Experiment 20000071 PARAMETER Experiment Name: At_100uM_ABA_Mutants_cDNA_P Parameter: Plant Line Value: CS8104
  misc_feature: MA Experiment 20000071 PARAMETER Experiment Name: At_100uM_ABA_Mutants_cDNA_P Parameter: Timepoint (hr) Value: 6
  misc_feature: MA Experiment 20000071 PARAMETER Experiment Name: At_100uM_ABA_Mutants_cDNA_P Parameter: Tissue Value: Aerial
  misc_feature: MA Experiment 20000071 PARAMETER Experiment Name: At_100uM_ABA_Mutants_cDNA_P Parameter: Treatment Value: 100uM ABA vs. No Treatment
  misc_feature: MA Experiment ID: 20000087 Result: Down-regulated in Transcription
  misc_feature: MA Experiment 20000087 PARAMETER Experiment Name: At_100uM_ABA_Mutants_cDNA_P Parameter: Plant Line Value: WS
  misc_feature: MA Experiment 20000087 PARAMETER Experiment Name: At_100uM_ABA_Mutants_cDNA_P Parameter: Timepoint (hr) Value: 6
  misc_feature: MA Experiment 20000087 PARAMETER Experiment Name: At_100uM_ABA_Mutants_cDNA_P Parameter: Tissue Value: Aerial
  misc_feature: MA Experiment 20000087 PARAMETER Experiment Name: At_100uM_ABA_Mutants_cDNA_P Parameter: Treatment Value: 100uM ABA vs. No Treatment
  misc_feature: MA Experiment ID: 20000088 Result: Down-regulated in Transcription
  misc_feature: MA Experiment 20000088 PARAMETER Experiment Name: At_100uM_ABA_Mutants_cDNA_P Parameter: Plant Line Value: Landsberg
  misc_feature: MA Experiment 20000088 PARAMETER Experiment Name: At_100uM_ABA_Mutants_cDNA_P Parameter: Timepoint (hr) Value: 6
  misc_feature: MA Experiment 20000088 PARAMETER Experiment Name: At_100uM_ABA_Mutants_cDNA_P Parameter: Tissue Value: Aerial
  misc_feature: MA Experiment 20000088 PARAMETER Experiment Name: At_100uM_ABA_Mutants_cDNA_P Parameter: Treatment Value: 100uM ABA vs. No Treatment
  misc_feature: MA Experiment ID: 20000184 Result: Up-regulated in Transcription
  misc_feature: MA Experiment 20000184 PARAMETER Experiment Name: At_Shoots__P Parameter: Age (day) Value: 7
  misc_feature: MA Experiment 20000184 PARAMETER Experiment Name: At_Shoots__P Parameter: Tissue Value: Shoots vs. Whole Plant
  misc_feature: MA Experiment ID: 20000185 Result: Up-regulated in Transcription
  misc_feature: MA Experiment 20000185 PARAMETER Experiment Name: At_Roots__P Parameter: Age (day) Value: 7 vs. 21
  misc_feature: MA Experiment 20000185 PARAMETER Experiment Name: At_Roots__P Parameter: Organism Value: A. thaliana
  misc_feature: MA Experiment 20000185 PARAMETER Experiment Name: At_Roots__P Parameter: Tissue Value: Roots vs. Whole Plant
  misc_feature: MA Experiment ID: 20000234 Result: Up-regulated in Transcription
  misc_feature: MA Experiment 20000234 PARAMETER Experiment Name: At_Siliques_P Parameter: Age (day) Value: 21
  misc_feature: MA Experiment 20000234 PARAMETER Experiment Name: At_Siliques_P Parameter: Organism Value: A. thaliana
  misc_feature: MA Experiment 20000234 PARAMETER Experiment Name: At_Siliques_P Parameter: Plant Line Value: WS
  misc_feature: MA Experiment 20000234 PARAMETER Experiment Name: At_Siliques_P Parameter: Tissue Value: Less Than 5mm Siliques vs. Whole Plant
  misc_feature: MA Experiment ID: 20000235 Result: Up-regulated in Transcription
  misc_feature: MA Experiment 20000235 PARAMETER Experiment Name: At_Siliques_P Parameter: Age (day) Value: 21
  misc_feature: MA Experiment 20000235 PARAMETER Experiment Name: At_Siliques_P Parameter: Organism Value: A. thaliana
  misc_feature: MA Experiment 20000235 PARAMETER Experiment Name: At_Siliques_P Parameter: Plant Line Value: WS
  misc_feature: MA Experiment 20000235 PARAMETER Experiment Name: At_Siliques_P Parameter: Tissue Value: 5-10mm Siliques vs. Whole Plant
  misc_feature: MA Experiment ID: 20000264 Result: Up-regulated in Transcription
  misc_feature: MA Experiment 20000264 PARAMETER Experiment Name: At_Open_Flower_P Parameter: Age (day) Value: 21
  misc_feature: MA Experiment 20000264 PARAMETER Experiment Name: At_Open_Flower_P Parameter: Plant Line Value: WS
  misc_feature: MA Experiment 20000264 PARAMETER Experiment Name: At_Open_Flower_P Parameter: Tissue Value: Open Flower vs. Whole Plant
  misc_feature: MA Experiment ID: 20000265 Result: Up-regulated in Transcription
  misc_feature: MA Experiment 20000265 PARAMETER Experiment Name: At_Open_Flower_P Parameter: Age (day) Value: 21
  misc_feature: MA Experiment 20000265 PARAMETER Experiment Name: At_Open_Flower_P Parameter: Plant Line Value: WS
  misc_feature: MA Experiment 20000265 PARAMETER Experiment Name: At_Open_Flower_P Parameter: Tissue Value: Closed Flower vs. Whole Plant
  misc_feature: MA Experiment ID: 20000286 Result: Up-regulated in Transcription
  misc_feature: MA Experiment 20000286 PARAMETER Experiment Name: At_Open_Flower_P Parameter: Age (day) Value: 21
  misc_feature: MA Experiment 20000286 PARAMETER Experiment Name: At_Open_Flower_P Parameter: Plant Line Value: WS
  misc_feature: MA Experiment 20000286 PARAMETER Experiment Name: At_Open_Flower_P Parameter: Tissue Value: Half Open vs. Whole Plant
  misc_feature: MA Experiment ID: 20000438 Result: Up-regulated in Transcription
  misc_feature: MA Experiment 20000438 PARAMETER Experiment Name: At_Shoots__P Parameter: Age (day) Value: 14
  misc_feature: MA Experiment 20000438 PARAMETER Experiment Name: At_Shoots__P Parameter: Tissue Value: Shoots vs. Whole Plant
  misc_feature: MA Experiment ID: 20000439 Result: Up-regulated in Transcription
  misc_feature: MA Experiment 20000439 PARAMETER Experiment Name: At_Roots__P Parameter: Age (day) Value: 14 vs. 21
  misc_feature: MA Experiment 20000439 PARAMETER Experiment Name: At_Roots__P Parameter: Organism Value: A. thaliana
  misc_feature: MA Experiment 20000439 PARAMETER Experiment Name: At_Roots__P Parameter: Tissue Value: Roots vs. Whole Plant
  misc_feature: MA Experiment ID: 20000441 Result: Up-regulated in Transcription
  misc_feature: MA Experiment 20000441 PARAMETER Experiment Name: At_1uM_BR-BRZ__P Parameter: Tissue Value: Shoot Apices
  misc_feature: MA Experiment 20000441 PARAMETER Experiment Name: At_1uM_BR-BRZ__P Parameter: Treatment Value: 1uM BR vs. No Treatment
  misc_feature: MA Experiment ID: 20000443 Result: Up-regulated in Transcription
  misc_feature: MA Experiment 20000443 PARAMETER Experiment Name: At_1uM_BR-BRZ__P Parameter: Tissue Value: Shoot Apices
  misc_feature: MA Experiment 20000443 PARAMETER Experiment Name: At_1uM_BR-BRZ__P Parameter: Treatment Value: 1uM BRZ vs. No Treatment
  misc_feature: MA Experiment ID: 20000460 Result: Down-regulated in Transcription
  misc_feature: MA Experiment 20000460 PARAMETER Experiment Name: At_10percent_PEG_P Parameter: Age (day) Value: 12
  misc_feature: MA Experiment 20000460 PARAMETER Experiment Name: At_10percent_PEG_P Parameter: Organism Value: A. thaliana
  misc_feature: MA Experiment 20000460 PARAMETER Experiment Name: At_10percent_PEG_P Parameter: Plant Line Value: WS
  misc_feature: MA Experiment 20000460 PARAMETER Experiment Name: At_10percent_PEG_P Parameter: Timepoint (day) Value: 12
  misc_feature: MA Experiment 20000460 PARAMETER Experiment Name: At_10percent_PEG_P Parameter: Tissue Value: Whole Plant
  misc_feature: MA Experiment 20000460 PARAMETER Experiment Name: At_10percent_PEG_P Parameter: Treatment Value: 10percent PEG vs. No Treatment
  misc_feature: MA Experiment ID: 20000527 Result: Down-regulated in Transcription
  misc_feature: MA Experiment 20000527 PARAMETER Experiment Name: At_10percent_PEG_P Parameter: Age (day) Value: 20
  misc_feature: MA Experiment 20000527 PARAMETER Experiment Name: At_10percent_PEG_P Parameter: Organism Value: A. thaliana
  misc_feature: MA Experiment 20000527 PARAMETER Experiment Name: At_10percent_PEG_P Parameter: Plant Line Value: WS
  misc_feature: MA Experiment 20000527 PARAMETER Experiment Name: At_10percent_PEG_P Parameter: Timepoint (day) Value: 20
  misc_feature: MA Experiment 20000527 PARAMETER Experiment Name: At_10percent_PEG_P Parameter: Tissue Value: Whole Plant
  misc_feature: MA Experiment 20000527 PARAMETER Experiment Name: At_10percent_PEG_P Parameter: Treatment Value: 10percent PEG vs. No Treatment
  misc_feature: MA Experiment ID: 20000573 Result: Down-regulated in Transcription
  misc_feature: MA Experiment 20000573 PARAMETER Experiment Name: At_100uM_ABA_Mutants__P Parameter: Organism Value: A. thaliana
  misc_feature: MA Experiment 20000573 PARAMETER Experiment Name: At_100uM_ABA_Mutants__P Parameter: Plant Line Value: CS22 vs. Ler wt
  misc_feature: MA Experiment 20000573 PARAMETER Experiment Name: At_100uM_ABA_Mutants__P Parameter: Timepoint (hr) Value: N/A
  misc_feature: MA Experiment 20000573 PARAMETER Experiment Name: At_100uM_ABA_Mutants__P Parameter: Tissue Value: Whole Plant
  misc_feature: MA Experiment 20000573 PARAMETER Experiment Name: At_100uM_ABA_Mutants__P Parameter: Treatment Value: None
  misc_feature: MA Experiment ID: 20000574 Result: Down-regulated in Transcription
  misc_feature: MA Experiment 20000574 PARAMETER Experiment Name: At_100uM_ABA_Mutants__P Parameter: Organism Value: A. thaliana
  misc_feature: MA Experiment 20000574 PARAMETER Experiment Name: At_100uM_ABA_Mutants__P Parameter: Plant Line Value: CS23 vs. Ler wt
  misc_feature: MA Experiment 20000574 PARAMETER Experiment Name: At_100uM_ABA_Mutants__P Parameter: Timepoint (hr) Value: N/A
  misc_feature: MA Experiment 20000574 PARAMETER Experiment Name: At_100uM_ABA_Mutants__P Parameter: Tissue Value: Whole Plant
  misc_feature: MA Experiment 20000574 PARAMETER Experiment Name: At_100uM_ABA_Mutants__P Parameter: Treatment Value: None
  misc_feature: MA Experiment ID: 20000576 Result: Down-regulated in Transcription
  misc_feature: MA Experiment 20000576 PARAMETER Experiment Name: At_100uM_ABA_Mutants__P Parameter: Organism Value: A. thaliana
  misc_feature: MA Experiment 20000576 PARAMETER Experiment Name: At_100uM_ABA_Mutants__P Parameter: Plant Line Value: CS23
  misc_feature: MA Experiment 20000576 PARAMETER Experiment Name: At_100uM_ABA_Mutants__P Parameter: Timepoint (hr) Value: 6
  misc_feature: MA Experiment 20000576 PARAMETER Experiment Name: At_100uM_ABA_Mutants__P Parameter: Tissue Value: Whole Plant
  misc_feature: MA Experiment 20000576 PARAMETER Experiment Name: At_100uM_ABA_Mutants__P Parameter: Treatment Value: 1uM ABA vs. No Treatment
  misc_feature: MA Experiment ID: 20000794 Result: Up-regulated in Transcription
  misc_feature: MA Experiment 20000794 PARAMETER Experiment Name: At_Petals_P Parameter: Age (day) Value: 23-25 days
  misc_feature: MA Experiment 20000794 PARAMETER Experiment Name: At_Petals_P Parameter: Plant Line Value: WS
  misc_feature: MA Experiment 20000794 PARAMETER Experiment Name: At_Petals_P Parameter: Tissue Value: Petals vs. Whole plant
  misc_feature: MA Experiment ID: 20001247 Result: Up-regulated in Transcription
  misc_feature: MA Experiment 20001247 PARAMETER Experiment Name: At_Far-red-induction_P Parameter: Age (day) Value: 7
  misc_feature: MA Experiment 20001247 PARAMETER Experiment Name: At_Far-red-induction_P Parameter: Light Value: Far-red vs. White
  misc_feature: MA Experiment 20001247 PARAMETER Experiment Name: At_Far-red-induction_P Parameter: Organism Value: A. thaliana
  misc_feature: MA Experiment 20001247 PARAMETER Experiment Name: At_Far-red-induction_P Parameter: Plant Line Value: Columbia
  misc_feature: MA Experiment 20001247 PARAMETER Experiment Name: At_Far-red-induction_P Parameter: Timepoint (hr) Value: 1
  misc_feature: MA Experiment 20001247 PARAMETER Experiment Name: At_Far-red-induction_P Parameter: Tissue Value: Whole Plant
  misc_feature: MA Experiment ID: 20001557 Result: Down-regulated in Transcription
  misc_feature: MA Experiment 20001557 PARAMETER Experiment Name: At_Drought_Soil_Dry_P Parameter: Age (day) Value: 27
  misc_feature: MA Experiment 20001557 PARAMETER Experiment Name: At_Drought_Soil_Dry_P Parameter: Organism Value: A. thaliana
  misc_feature: MA Experiment 20001557 PARAMETER Experiment Name: At_Drought_Soil_Dry_P Parameter: Plant Line Value: WS
  misc_feature: MA Experiment 20001557 PARAMETER Experiment Name: At_Drought_Soil_Dry_P Parameter: Post Timepoint (hr) Value: 3
  misc_feature: MA Experiment 20001557 PARAMETER Experiment Name: At_Drought_Soil_Dry_P Parameter: Post-Treatment Value: Re-Water vs. No Drought
  misc_feature: MA Experiment 20001557 PARAMETER Experiment Name: At_Drought_Soil_Dry_P Parameter: Timepoint (day) Value: 13
  misc_feature: MA Experiment 20001557 PARAMETER Experiment Name: At_Drought_Soil_Dry_P Parameter: Treatment Value: Drought vs. No Drought
  misc_feature: MA Experiment ID: 20001560 Result: Down-regulated in Transcription
  misc_feature: MA Experiment 20001560 PARAMETER Experiment Name: At_Drought_Soil_Dry_P Parameter: Age (day) Value: 28
  misc_feature: MA Experiment 20001560 PARAMETER Experiment Name: At_Drought_Soil_Dry_P Parameter: Organism Value: A. thaliana
  misc_feature: MA Experiment 20001560 PARAMETER Experiment Name: At_Drought_Soil_Dry_P Parameter: Plant Line Value: WS
  misc_feature: MA Experiment 20001560 PARAMETER Experiment Name: At_Drought_Soil_Dry_P Parameter: Post Timepoint (hr) Value: None
  misc_feature: MA Experiment 20001560 PARAMETER Experiment Name: At_Drought_Soil_Dry_P Parameter: Post-Treatment Value: None
  misc_feature: MA Experiment 20001560 PARAMETER Experiment Name: At_Drought_Soil_Dry_P Parameter: Timepoint (day) Value: 14
  misc_feature: MA Experiment 20001560 PARAMETER Experiment Name: At_Drought_Soil_Dry_P Parameter: Treatment Value: Drought vs. No Drought
  misc_feature: MA Experiment ID: 20001906 Result: Down-regulated in Transcription
  misc_feature: MA Experiment 20001906 PARAMETER Experiment Name: At_Drought_Reproduction_P Parameter: Age (day) Value: 35
  misc_feature: MA Experiment 20001906 PARAMETER Experiment Name: At_Drought_Reproduction_P Parameter: Organism Value: A. thaliana
  misc_feature: MA Experiment 20001906 PARAMETER Experiment Name: At_Drought_Reproduction_P Parameter: Plant Line Value: WS
  misc_feature: MA Experiment 20001906 PARAMETER Experiment Name: At_Drought_Reproduction_P Parameter: Timepoint (day) Value: 5
  misc_feature: MA Experiment 20001906 PARAMETER Experiment Name: At_Drought_Reproduction_P Parameter: Tissue Value: Siliques
  misc_feature: MA Experiment 20001906 PARAMETER Experiment Name: At_Drought_Reproduction_P Parameter: Treatment Value: Drought vs. No Drought
  misc_feature: MA Experiment ID: 20001907 Result: Down-regulated in Transcription
  misc_feature: MA Experiment 20001907 PARAMETER Experiment Name: At_Drought_Reproduction_P Parameter: Age (day) Value: 37
  misc_feature: MA Experiment 20001907 PARAMETER Experiment Name: At_Drought_Reproduction_P Parameter: Organism Value: A. thaliana
  misc_feature: MA Experiment 20001907 PARAMETER Experiment Name: At_Drought_Reproduction_P Parameter: Plant Line Value: WS
  misc_feature: MA Experiment 20001907 PARAMETER Experiment Name: At_Drought_Reproduction_P Parameter: Timepoint (day) Value: 7
  misc_feature: MA Experiment 20001907 PARAMETER Experiment Name: At_Drought_Reproduction_P Parameter: Tissue Value: Siliques
  misc_feature: MA Experiment 20001907 PARAMETER Experiment Name: At_Drought_Reproduction_P Parameter: Treatment Value: Drought vs. No Drought
  misc_feature: MA Experiment ID: 20001908 Result: Down-regulated in Transcription
  misc_feature: MA Experiment 20001908 PARAMETER Experiment Name: At_Drought_Reproduction_P Parameter: Age (day) Value: 40
  misc_feature: MA Experiment 20001908 PARAMETER Experiment Name: At_Drought_Reproduction_P Parameter: Organism Value: A. thaliana
  misc_feature: MA Experiment 20001908 PARAMETER Experiment Name: At_Drought_Reproduction_P Parameter: Plant Line Value: WS
  misc_feature: MA Experiment 20001908 PARAMETER Experiment Name: At_Drought_Reproduction_P Parameter: Timepoint (day) Value: 10
  misc_feature: MA Experiment 20001908 PARAMETER Experiment Name: At_Drought_Reproduction_P Parameter: Tissue Value: Siliques
  misc_feature: MA Experiment 20001908 PARAMETER Experiment Name: At_Drought_Reproduction_P Parameter: Treatment Value: Drought vs. No Drought
  misc_feature: MA Experiment ID: 20001911 Result: Down-regulated in Transcription
  misc_feature: MA Experiment 20001911 PARAMETER Experiment Name: At_Drought_Reproduction_P Parameter: Age (day) Value: 40
  misc_feature: MA Experiment 20001911 PARAMETER Experiment Name: At_Drought_Reproduction_P Parameter: Organism Value: A. thaliana
  misc_feature: MA Experiment 20001911 PARAMETER Experiment Name: At_Drought_Reproduction_P Parameter: Plant Line Value: WS
  misc_feature: MA Experiment 20001911 PARAMETER Experiment Name: At_Drought_Reproduction_P Parameter: Timepoint (day) Value: 10
  misc_feature: MA Experiment 20001911 PARAMETER Experiment Name: At_Drought_Reproduction_P Parameter: Tissue Value: Flowers
  misc_feature: MA Experiment 20001911 PARAMETER Experiment Name: At_Drought_Reproduction_P Parameter: Treatment Value: Drought vs. No Drought
acaactcgattaccaaaaagcagagccatccaaccataaaactcaaaacacacagattccactggcgtgtgctctcctcacttcactcgtccttgaaacttgagcttcaattacaaagaatggctgcttcaagtgctgtcaccgcaaactacgtcctcaagccacctccattcgcactggatgctttggagccgcatatgagcaaacaaactctggagtttcactggggaaaacatcacagagcttacgtggacaacctcaagaaacaggttcttggaaccgagcttgaaggcaagcccttagagcacattatccacagcacttacaacaatggtgatctcctccctgctttcaacaacgctgctcaggcgtggaaccacgagttcttctgggagtcaatgaaaccaggtggtggaggaaaaccatcaggagagcttcttgctttgcttgaaagagatttcacttcttatgagaagttctatgaagagttcaatgctgctgcagccactcagtttggagctggctgggcctggcttgcttattcaaatgaaaaactcaaagtagtgaaaactcccaatgctgtgaatccccttgtgctcggctctttcccattgcttaccattgatgtctgggagcatgcttactaccttgacttccagaaccgaagaccagattacataaagacattcatgaccaatcttgtgtcttgggaagctgtaagtgccagacttgaggccgccaaggctgcttctgcttaagcaaatttctgaacaatttgacttcagtgacagtgagttctgcatcaccgaagtctcttataaaatattggtcgctgtaataaggacacagctctcttgttgtgtatgtgtcacagagttcttcattttgcttgtgtaatgaacaattaaacatgctcttttctgagtgtgtgtgcgttttgtgtgtgtcaagtttttcatcgtctcctttattaaactcaaattggcacctaccatcagtaattcatagtttggcatggcccatt

SEQ ID NO: 35661 - protein, 251 aa, Arabidopsis thaliana
  peptide (1)..(251): Ceres Seq. ID no. 13504707
  misc_feature (39)..(197): Homolog of NCBI NO: 16974682 NR Description: Fe-superoxide dismutase precursor [Medicago
  misc_feature (36)..(248): Homolog of NCBI NO: 33439120 NR Description: iron superoxide dismutase [Lycopersicon
  misc_feature (36)..(248): Homolog of NCBI NO: 33413303 NR Description: superoxide dismutase [Fe] [Lycopersicon
  misc_feature (179)..(251): Homolog of NCBI NO: 6840824 NR Description: iron-superoxide dismutase precursor [Vigna
  misc_feature (46)..(196): Homolog of NCBI NO: 6840824 NR Description: iron-superoxide dismutase precursor [Vigna
  misc_feature (40)..(251): Homolog of NCBI NO: 3114705 NR Description: superoxide dismutase [Raphanus sativus]
  misc_feature (40)..(251): Homolog of NCBI NO: 15234913 NR Description: iron superoxide dismutase (FSD1) [Arabidopsis
  misc_feature (26)..(251): Homolog of NCBI NO: 99759 NR Description: superoxide dismutase (EC 1.15.1.1) (Fe) -
  misc_feature (26)..(251): Homolog of NCBI NO: 166700 NR Description: Fe-superoxide dismutase
  misc_feature (18)..(251): Homolog of NCBI NO: 7433338 NR Description: superoxide dismutase (EC 1.15.1.1) (Fe) -
NSITKKQSHPTIKLKTHRFHWRVLSSLHSSLKLELQLQRMAASSAVTANYVLKPPPFALDALEPHMSKQTLEFHWGKHHRAYVDNLKKQVLGTELEGKPLEHIIHSTYNNGDLLPAFNNAAQAWNHEFFWESMKPGGGGKPSGELLALLERDFTSYEKFYEEFNAAAATQFGAGWAWLAYSNEKLKVVKTPNAVNPLVLGSFPLLTIDVWEHAYYLDFQNRRPDYIKTFMTNLVSWEAVSARLEAAKAASA

SEQ ID NO: 35662 - protein, 212 aa, Arabidopsis thaliana; identical to SEQ ID NO: 21185
  peptide (1)..(212): Ceres Seq. ID no. 13504708
  misc_feature (1)..(158): Homolog of NCBI NO: 16974682 NR Description: Fe-superoxide dismutase precursor [Medicago
  misc_feature (1)..(209): Homolog of NCBI NO: 33439120 NR Description: iron superoxide dismutase [Lycopersicon
  misc_feature (1)..(209): Homolog of NCBI NO: 33413303 NR Description: superoxide dismutase [Fe] [Lycopersicon
  misc_feature (140)..(212): Homolog of NCBI NO: 6840824 NR Description: iron-superoxide dismutase precursor [Vigna
  misc_feature (7)..(157): Homolog of NCBI NO: 6840824 NR Description: iron-superoxide dismutase precursor [Vigna
  misc_feature (1)..(212): Homolog of NCBI NO: 3114705 NR Description: superoxide dismutase [Raphanus sativus]
  misc_feature (1)..(212): Homolog of NCBI NO: 15234913 NR Description: iron superoxide dismutase (FSD1) [Arabidopsis
  misc_feature (1)..(212): Homolog of NCBI NO: 99759 NR Description: superoxide dismutase (EC 1.15.1.1) (Fe) -
  misc_feature (1)..(212): Homolog of NCBI NO: 166700 NR Description: Fe-superoxide dismutase
  misc_feature (1)..(212): Homolog of NCBI NO: 7433338 NR Description: superoxide dismutase (EC 1.15.1.1) (Fe) -

SEQ ID NO: 35663 - protein, 186 aa, Arabidopsis thaliana; identical to SEQ ID NO: 21186
  peptide (1)..(186): Ceres Seq. ID no. 13504709
  misc_feature (1)..(132): Homolog of NCBI NO: 16974682 NR Description: Fe-superoxide dismutase precursor [Medicago
  misc_feature (1)..(183): Homolog of NCBI NO: 33439120 NR Description: iron superoxide dismutase [Lycopersicon
  misc_feature (1)..(183): Homolog of NCBI NO: 33413303 NR Description: superoxide dismutase [Fe] [Lycopersicon
  misc_feature (114)..(186): Homolog of NCBI NO: 6840824 NR Description: iron-superoxide dismutase precursor [Vigna
  misc_feature (1)..(131): Homolog of NCBI NO: 6840824 NR Description: iron-superoxide dismutase precursor [Vigna
  misc_feature (1)..(186): Homolog of NCBI NO: 3114705 NR Description: superoxide dismutase [Raphanus sativus]
  misc_feature (1)..(186): Homolog of NCBI NO: 15234913 NR Description: iron superoxide dismutase (FSD1) [Arabidopsis
  misc_feature (1)..(186): Homolog of NCBI NO: 99759 NR Description: superoxide dismutase (EC 1.15.1.1) (Fe) -
  misc_feature (1)..(186): Homolog of NCBI NO: 166700 NR Description: Fe-superoxide dismutase
  misc_feature (1)..(186): Homolog of NCBI NO: 7433338 NR Description: superoxide dismutase (EC 1.15.1.1) (Fe) -

SEQ ID NO: 35664 - DNA, 925 bp, Arabidopsis thaliana
  misc_feature (1)..(925): Ceres Seq. ID no. 12384577
  misc_feature: MA Experiment ID: 108433 Result: Up-regulated in Transcription
  misc_feature: MA Experiment 108433 PARAMETER Experiment Name: At_rhl_Mutant2_cDNA_P Parameter: Age (day) Value: 7
  misc_feature: MA Experiment 108433 PARAMETER Experiment Name: At_rhl_Mutant2_cDNA_P Parameter: Organism Value: A. thaliana
  misc_feature: MA Experiment 108433 PARAMETER Experiment Name: At_rhl_Mutant2_cDNA_P Parameter: Plant Line Value: rhl Mutant vs. wt landsburg
  misc_feature: MA Experiment 108433 PARAMETER Experiment Name: At_rhl_Mutant2_cDNA_P Parameter: Tissue Value: Roots
  misc_feature: MA Experiment ID: 108462 Result: Down-regulated in Transcription
  misc_feature: MA Experiment 108462 PARAMETER Experiment Name: At_Germinating_Seeds_cDNA_P Parameter: Age (day) Value: 2 vs. 0
  misc_feature: MA Experiment 108462 PARAMETER Experiment Name: At_Germinating_Seeds_cDNA_P Parameter: Tissue Value: Germinating Seeds
  misc_feature: MA Experiment ID: 108463 Result: Down-regulated in Transcription
  misc_feature: MA Experiment 108463 PARAMETER Experiment Name: At_Germinating_Seeds_cDNA_P Parameter: Age (day) Value: 3 vs. 0
  misc_feature: MA Experiment 108463 PARAMETER Experiment Name: At_Germinating_Seeds_cDNA_P Parameter: Tissue Value: Germinating Seeds
  misc_feature: MA Experiment ID: 108595 Result: Down-regulated in Transcription
  misc_feature: MA Experiment 108595 PARAMETER Experiment Name: At_Ler-pi_Ovule_cDNA_P Parameter: Plant Line Value: null
  misc_feature: MA Experiment ID: 20000184 Result: Up-regulated in Transcription
  misc_feature: MA Experiment 20000184 PARAMETER Experiment Name: At_Shoots__P Parameter: Age (day) Value: 7
  misc_feature: MA Experiment 20000184 PARAMETER Experiment Name: At_Shoots__P Parameter: Tissue Value: Shoots vs. Whole Plant
aaaaacattagttacagtcggaatttcgaaaaaccctaattcagctaaaggttgatcgttgatctaaaagctcgagtgatgaagggaaattggtcgatcgtacgaaaggttcttcatcgccagttctccactctccgttcctcgacaccatcgtcgcgattatctacttccatccgaccgcttgttctggccccaaactcgatatcgtcgctaatcgctagaaactcattgtttactgcctccaacattggtccatccatcgattttaacttctccaacacttcgcttcctcatcggagaagcctctgctcggaagctggaggtgaaaatggtgttgttctagtgaaatcagaggaagagttcatcaatgcaatgagcaaagctcaagatggatctttaccatcggtcttctatttcactgccgcctggtgtggaccatgcaggtttatctctcctgtaatcgtggagcttagtaaacaatatcccgatgtaactacgtataaagtcgacattgatgagggcgggatttcgaacactatcagcaagttgaatatcacggctgtgccaacactgcatttcttcaaaggaggctcgaagcaaggcgaggttgtgggtgcagatgtcacgaagctgaagaatctcatggaacagctctacaagtgaagacctaatccgtcctagtaaagaacgtgttgaatagttgcaagatagtttaagactgaaaatttgaaatcaatctaaaaataatgaatgcgctgaaccagtttcgtctttgttcccccctcgttgttcaggattgtaattgcccttttgttttgtttgttttctccatttcctttgggcttagtttcctgagatttgtttgtgtccgtcggtgacaacttcaaaaaatatcgacaagtcataactttttatcaaaattttg

SEQ ID NO: 35665 - protein, 194 aa, Arabidopsis thaliana
  peptide (1)..(194): Ceres Seq. ID no. 12384578
  misc_feature (83)..(187): Homolog of NCBI NO: 3915131 NR Description: Thioredoxin H-type (TRX-H) (Phloem sap 13 kDa
  misc_feature (80)..(191): Homolog of NCBI NO: 27763683 NR Description: thioredoxin o [Chlamydomonas reinhardtii]
  misc_feature (99)..(194): Homolog of NCBI NO: 26453152 NR Description: putative thioredoxin [Arabidopsis thaliana]
  misc_feature (46)..(194): Homolog of NCBI NO: 9755396 NR Description: F17F8.6 [Arabidopsis thaliana]
  misc_feature (46)..(194): Homolog of NCBI NO: 18397764 NR Description: expressed protein
  misc_feature (1)..(194): Homolog of NCBI NO: 15226875 NR Description: thioredoxin, putative; protein id: At2g35010.1
MKGNWSIVRKVLHRQFSTLRSSTPSSRLSTSIRPLVLAPNSISSLIARNSLFTASNIGPSIDFNFSNTSLPHRRSLCSEAGGENGVVLVKSEEEFINAMSKAQDGSLPSVFYFTAAWCGPCRFISPVIVELSKQYPDVTTYKVDIDEGGISNTISKLNITAVPTLHFFKGGSKQGEVVGADVTKLKNLMEQLYK

SEQ ID NO: 35666 - DNA, 1155 bp, Arabidopsis thaliana; identical to SEQ ID NO: 22188
  misc_feature (1)..(1155): Ceres Seq. ID no. 12377359
  misc_feature: MA Experiment ID: 20000093 Result: Up-regulated in Transcription
  misc_feature: MA Experiment 20000093 PARAMETER Experiment Name: At_42deg_Heat_cDNA_P Parameter: Temperature (deg C) Value: 42 vs. 22
  misc_feature: MA Experiment 20000093 PARAMETER Experiment Name: At_42deg_Heat_cDNA_P Parameter: Timepoint (hr) Value: 0.5
  misc_feature: MA Experiment 20000093 PARAMETER Experiment Name: At_42deg_Heat_cDNA_P Parameter: Tissue Value: Aerial
  misc_feature: MA Experiment ID: 20000173 Result: Up-regulated in Transcription
  misc_feature: MA Experiment 20000173 PARAMETER Experiment Name: At_42deg_Heat_P Parameter: Age (day) Value: 14
  misc_feature: MA Experiment 20000173 PARAMETER Experiment Name: At_42deg_Heat_P Parameter: Organism Value: A. thaliana
  misc_feature: MA Experiment 20000173 PARAMETER Experiment Name: At_42deg_Heat_P Parameter: Plant Line Value: WS
  misc_feature: MA Experiment 20000173 PARAMETER Experiment Name: At_42deg_Heat_P Parameter: Temperature (deg C) Value: 42 vs. 22
  misc_feature: MA Experiment 20000173 PARAMETER Experiment Name: At_42deg_Heat_P Parameter: Timepoint (hr) Value: 6
  misc_feature: MA Experiment 20000173 PARAMETER Experiment Name: At_42deg_Heat_P Parameter: Tissue Value: Aerial
  misc_feature: MA Experiment ID: 20000180 Result: Down-regulated in Transcription
  misc_feature: MA Experiment 20000180 PARAMETER Experiment Name: At_Germinating_Seeds_P Parameter: Age (hr) Value: 24 vs. 0
  misc_feature: MA Experiment 20000180 PARAMETER Experiment Name: At_Germinating_Seeds_P Parameter: Tissue Value: Germinating Seeds
  misc_feature: MA Experiment ID: 20000227 Result: Up-regulated in Transcription
  misc_feature: MA Experiment 20000227 PARAMETER Experiment Name: At_Root-Tips-vs-Tops_P Parameter: Tissue Value: Root Tips vs. Root Tops
  misc_feature: MA Experiment ID: 20000307 Result: Down-regulated in Transcription
  misc_feature: MA Experiment 20000307 PARAMETER Experiment Name: At_Germinating_Seeds_Sub_P Parameter: Age (hr) Value: 24 vs. 0
  misc_feature: MA Experiment 20000307 PARAMETER Experiment Name: At_Germinating_Seeds_Sub_P Parameter: Organism Value: A. thaliana
  misc_feature: MA Experiment 20000307 PARAMETER Experiment Name: At_Germinating_Seeds_Sub_P Parameter: Plant Line Value: WS
  misc_feature: MA Experiment 20000307 PARAMETER Experiment Name: At_Germinating_Seeds_Sub_P Parameter: Tissue Value: Germinating Seeds
  misc_feature: MA Experiment ID: 20000328 Result: Up-regulated in Transcription
  misc_feature: MA Experiment 20000328 PARAMETER Experiment Name: At_42deg_Heat_Sub_P Parameter: Age (day) Value: 14
  misc_feature: MA Experiment 20000328 PARAMETER Experiment Name: At_42deg_Heat_Sub_P Parameter: Organism Value: A. thaliana
  misc_feature: MA Experiment 20000328 PARAMETER Experiment Name: At_42deg_Heat_Sub_P Parameter: Plant Line Value: WS
  misc_feature: MA Experiment 20000328 PARAMETER Experiment Name: At_42deg_Heat_Sub_P Parameter: Temperature (deg C) Value: 42 vs. 22
  misc_feature: MA Experiment 20000328 PARAMETER Experiment Name: At_42deg_Heat_Sub_P Parameter: Timepoint (hr) Value: 6
  misc_feature: MA Experiment 20000328 PARAMETER Experiment Name: At_42deg_Heat_Sub_P Parameter: Tissue Value: Aerial
  misc_feature: MA Experiment ID: 20000440 Result: Up-regulated in Transcription
  misc_feature: MA Experiment 20000440 PARAMETER Experiment Name: At_Closed-Flower__Sub_P Parameter: Tissue Value: Closed Flower vs. Whole Plant
  misc_feature: MA Experiment ID: 20001458 Result: Up-regulated in Transcription
  misc_feature: MA Experiment 20001458 PARAMETER Experiment Name: At_50mM_NH4NO3_L-to-H_P Parameter: Age (day) Value: Undefined
  misc_feature: MA Experiment 20001458 PARAMETER Experiment Name: At_50mM_NH4NO3_L-to-H_P Parameter: Organism Value: Undefined
  misc_feature: MA Experiment 20001458 PARAMETER Experiment Name: At_50mM_NH4NO3_L-to-H_P Parameter: Plant Line Value: Undefined
  misc_feature: MA Experiment 20001458 PARAMETER Experiment Name: At_50mM_NH4NO3_L-to-H_P Parameter: Timepoint (hr) Value: 2
  misc_feature: MA Experiment 20001458 PARAMETER Experiment Name: At_50mM_NH4NO3_L-to-H_P Parameter: Tissue Value: Siliques
  misc_feature: MA Experiment 20001458 PARAMETER Experiment Name: At_50mM_NH4NO3_L-to-H_P Parameter: Treatment Value: 50mM NH4NO3 vs. 100mM Manitol
  misc_feature: MA Experiment ID: 20001555 Result: Up-regulated in Transcription
  misc_feature: MA Experiment 20001555 PARAMETER Experiment Name: At_Drought_Soil_Dry_P Parameter: Age (day) Value: 24
  misc_feature: MA Experiment 20001555 PARAMETER Experiment Name: At_Drought_Soil_Dry_P Parameter: Organism Value: A. thaliana
  misc_feature: MA Experiment 20001555 PARAMETER Experiment Name: At_Drought_Soil_Dry_P Parameter: Plant Line Value: WS
  misc_feature: MA Experiment 20001555 PARAMETER Experiment Name: At_Drought_Soil_Dry_P Parameter: Post Timepoint (hr) Value: None
  misc_feature: MA Experiment 20001555 PARAMETER Experiment Name: At_Drought_Soil_Dry_P Parameter: Post-Treatment Value: None
  misc_feature: MA Experiment 20001555 PARAMETER Experiment Name: At_Drought_Soil_Dry_P Parameter: Timepoint (day) Value: 10
  misc_feature: MA Experiment 20001555 PARAMETER Experiment Name: At_Drought_Soil_Dry_P Parameter: Treatment Value: Drought vs. No Drought
  misc_feature: MA Experiment ID: 20001556 Result: Up-regulated in Transcription
  misc_feature: MA Experiment 20001556 PARAMETER Experiment Name: At_Drought_Soil_Dry_P Parameter: Age (day) Value: 26
  misc_feature: MA Experiment 20001556 PARAMETER Experiment Name: At_Drought_Soil_Dry_P Parameter: Organism Value: A. thaliana
  misc_feature: MA Experiment 20001556 PARAMETER Experiment Name: At_Drought_Soil_Dry_P Parameter: Plant Line Value: WS
  misc_feature: MA Experiment 20001556 PARAMETER Experiment Name: At_Drought_Soil_Dry_P Parameter: Post Timepoint (hr) Value: None
  misc_feature: MA Experiment 20001556 PARAMETER Experiment Name: At_Drought_Soil_Dry_P Parameter: Post-Treatment Value: None
  misc_feature: MA Experiment 20001556 PARAMETER Experiment Name: At_Drought_Soil_Dry_P Parameter: Timepoint (day) Value: 12
  misc_feature: MA Experiment 20001556 PARAMETER Experiment Name: At_Drought_Soil_Dry_P Parameter: Treatment Value: Drought vs. No Drought
  misc_feature: MA Experiment ID: 20001558 Result: Up-regulated in Transcription
  misc_feature: MA Experiment 20001558 PARAMETER Experiment Name: At_Drought_Soil_Dry_P Parameter: Age (day) Value: 27
  misc_feature: MA Experiment 20001558 PARAMETER Experiment Name: At_Drought_Soil_Dry_P Parameter: Organism Value: A. thaliana
  misc_feature: MA Experiment 20001558 PARAMETER Experiment Name: At_Drought_Soil_Dry_P Parameter: Plant Line Value: WS
  misc_feature: MA Experiment 20001558 PARAMETER Experiment Name: At_Drought_Soil_Dry_P Parameter: Post Timepoint (hr) Value: 6
  misc_feature: MA Experiment 20001558 PARAMETER Experiment Name: At_Drought_Soil_Dry_P Parameter: Post-Treatment Value: Re-Water vs. No Drought
  misc_feature: MA Experiment 20001558 PARAMETER Experiment Name: At_Drought_Soil_Dry_P Parameter: Timepoint (day) Value: 13
  misc_feature: MA Experiment 20001558 PARAMETER Experiment Name: At_Drought_Soil_Dry_P Parameter: Treatment Value: Drought vs. No Drought
  misc_feature: MA Experiment ID: 20001560 Result: Up-regulated in Transcription
  misc_feature: MA Experiment 20001560 PARAMETER Experiment Name: At_Drought_Soil_Dry_P Parameter: Age (day) Value: 28
  misc_feature: MA Experiment 20001560 PARAMETER Experiment Name: At_Drought_Soil_Dry_P Parameter: Organism Value: A. thaliana
  misc_feature: MA Experiment 20001560 PARAMETER Experiment Name: At_Drought_Soil_Dry_P Parameter: Plant Line Value: WS
  misc_feature: MA Experiment 20001560 PARAMETER Experiment Name: At_Drought_Soil_Dry_P Parameter: Post Timepoint (hr) Value: None
  misc_feature: MA Experiment 20001560 PARAMETER Experiment Name: At_Drought_Soil_Dry_P Parameter: Post-Treatment Value: None
  misc_feature: MA Experiment 20001560 PARAMETER Experiment Name: At_Drought_Soil_Dry_P Parameter: Timepoint (day) Value: 14
  misc_feature: MA Experiment 20001560 PARAMETER Experiment Name: At_Drought_Soil_Dry_P Parameter: Treatment Value: Drought vs. No Drought
  misc_feature: MA Experiment ID: 20001757 Result: Up-regulated in Transcription
  misc_feature: MA Experiment 20001757 PARAMETER Experiment Name: At_50mM_NH4NO3_L-to-H_P Parameter: Timepoint (hr) Value: 6
  misc_feature: MA Experiment 20001757 PARAMETER Experiment Name: At_50mM_NH4NO3_L-to-H_P Parameter: Tissue Value: Leaf
  misc_feature: MA Experiment 20001757 PARAMETER Experiment Name: At_50mM_NH4NO3_L-to-H_P Parameter: Treatment Value: 50mM NH4NO3 vs 100mM Mannitol

SEQ ID NO: 35667 - protein, 322 aa, Arabidopsis thaliana; identical to SEQ ID NO: 22189
  peptide (1)..(322): Ceres Seq. ID no. 12377360
  misc_feature (25)..(246): Homolog of NCBI NO: 6321860 NR Description: Ribosomal RNA Processing; Rrp4p [Saccharomyces
  misc_feature (27)..(294): Homolog of NCBI NO: 17544090 NR Description: Ribosomal RNA processing like (34.1 kD)
  misc_feature (27)..(303): Homolog of NCBI NO: 39584168 NR Description: Hypothetical protein CBG05449 [Caenorhabditis
  misc_feature (21)..(271): Homolog of NCBI NO: 24762324 NR Description: CG3931-PA [Drosophila melanogaster]
  misc_feature (21)..(271): Homolog of NCBI NO: 21428348 NR Description: GM02257p [Drosophila melanogaster]
  misc_feature (39)..(224): Homolog of NCBI NO: 19923403 NR Description: homolog of Yeast RRP4 (ribosomal RNA processing
  misc_feature (28)..(227): Homolog of NCBI NO: 21450259 NR Description: hypothetical protein MGC30456 [Mus musculus]
  misc_feature (39)..(278): Homolog of NCBI NO: 19113896 NR Description: conserved hypothetical protein
  misc_feature (38)..(292): Homolog of NCBI NO: 20378673 NR Description: exonuclease [Phytophthora sojae]
  misc_feature (1)..(322): Homolog of NCBI NO: 15218790 NR Description: hypothetical protein; protein id: At1g03360.1
  misc_feature (25)..(246): Homolog of NCBI NO: 6321860 NR Description: Ribosomal RNA Processing; Rrp4p [Saccharomyces
  misc_feature (27)..(294): Homolog of NCBI NO: 17544090 NR Description: Ribosomal RNA processing like (34.1 kD)
  misc_feature (27)..(303): Homolog of NCBI NO: 39584168 NR Description: Hypothetical protein CBG05449 [Caenorhabditis
  misc_feature (21)..(271): Homolog of NCBI NO: 24762324 NR Description: CG3931-PA [Drosophila melanogaster]
  misc_feature (21)..(271): Homolog of NCBI NO: 21428348 NR Description: GM02257p [Drosophila melanogaster]
  misc_feature (39)..(224): Homolog of NCBI NO: 19923403 NR Description: homolog of Yeast RRP4 (ribosomal RNA processing
  misc_feature (28)..(227): Homolog of NCBI NO: 21450259 NR Description: hypothetical protein MGC30456 [Mus musculus]
  misc_feature (39)..(278): Homolog of NCBI NO: 19113896 NR Description: conserved hypothetical protein
  misc_feature (38)..(292): Homolog of NCBI NO: 20378673 NR Description: exonuclease [Phytophthora sojae]
  misc_feature (1)..(322): Homolog of NCBI NO: 15218790 NR Description: hypothetical protein; protein id: At1g03360.1

SEQ ID NO: 35668 - protein, 320 aa, Arabidopsis thaliana; identical to SEQ ID NO: 22190
  peptide (1)..(320): Ceres Seq. ID no. 12377361
  misc_feature (23)..(244): Homolog of NCBI NO: 6321860 NR Description: Ribosomal RNA Processing; Rrp4p [Saccharomyces
  misc_feature (25)..(292): Homolog of NCBI NO: 17544090 NR Description: Ribosomal RNA processing like (34.1 kD)
  misc_feature (25)..(301): Homolog of NCBI NO: 39584168 NR Description: Hypothetical protein CBG05449 [Caenorhabditis
  misc_feature (19)..(269): Homolog of NCBI NO: 24762324 NR Description: CG3931-PA [Drosophila melanogaster]
  misc_feature (19)..(269): Homolog of NCBI NO: 21428348 NR Description: GM02257p [Drosophila melanogaster]
  misc_feature (37)..(222): Homolog of NCBI NO: 19923403 NR Description: homolog of Yeast RRP4 (ribosomal RNA processing
  misc_feature (26)..(225): Homolog of NCBI NO: 21450259 NR Description: hypothetical protein MGC30456 [Mus musculus]
  misc_feature (37)..(276): Homolog of NCBI NO: 19113896 NR Description: conserved hypothetical protein
  misc_feature (36)..(290): Homolog of NCBI NO: 20378673 NR Description: exonuclease [Phytophthora sojae]
  misc_feature (1)..(320): Homolog of NCBI NO: 15218790 NR Description: hypothetical protein; protein id: At1g03360.1
  misc_feature (23)..(244): Homolog of NCBI NO: 6321860 NR Description: Ribosomal RNA Processing; Rrp4p [Saccharomyces
  misc_feature (25)..(292): Homolog of NCBI NO: 17544090 NR Description: Ribosomal RNA processing like (34.1 kD)
  misc_feature (25)..(301): Homolog of NCBI NO: 39584168 NR Description: Hypothetical protein CBG05449 [Caenorhabditis
  misc_feature (19)..(269): Homolog of NCBI NO: 24762324 NR Description: CG3931-PA [Drosophila melanogaster]
  misc_feature (19)..(269): Homolog of NCBI NO: 21428348 NR Description: GM02257p [Drosophila melanogaster]
  misc_feature (37)..(222): Homolog of NCBI NO: 19923403 NR Description: homolog of Yeast RRP4 (ribosomal RNA processing
  misc_feature (26)..(225): Homolog of NCBI NO: 21450259 NR Description: hypothetical protein MGC30456 [Mus musculus]
  misc_feature (37)..(276): Homolog of NCBI NO: 19113896 NR Description: conserved hypothetical protein
  misc_feature (36)..(290): Homolog of NCBI NO: 20378673 NR Description: exonuclease [Phytophthora sojae]
  misc_feature (1)..(320): Homolog of NCBI NO: 15218790 NR Description: hypothetical protein; protein id: At1g03360.1

SEQ ID NO: 35669 - protein, 201 aa, Arabidopsis thaliana; identical to SEQ ID NO: 22191
  peptide (1)..(201): Ceres Seq. ID no. 12377362
  misc_feature (1)..(125): Homolog of NCBI NO: 6321860 NR Description: Ribosomal RNA Processing; Rrp4p [Saccharomyces
  misc_feature (1)..(173): Homolog of NCBI NO: 17544090 NR Description: Ribosomal RNA processing like (34.1 kD)
  misc_feature (1)..(182): Homolog of NCBI NO: 39584168 NR Description: Hypothetical protein CBG05449 [Caenorhabditis
  misc_feature (1)..(150): Homolog of NCBI NO: 24762324 NR Description: CG3931-PA [Drosophila melanogaster]
  misc_feature (1)..(150): Homolog of NCBI NO: 21428348 NR Description: GM02257p [Drosophila melanogaster]
  misc_feature (1)..(103): Homolog of NCBI NO: 19923403 NR Description: homolog of Yeast RRP4 (ribosomal RNA processing
  misc_feature (1)..(106): Homolog of NCBI NO: 21450259 NR Description: hypothetical protein MGC30456 [Mus musculus]
  misc_feature (1)..(157): Homolog of NCBI NO: 19113896 NR Description: conserved hypothetical protein
  misc_feature (1)..(171): Homolog of NCBI NO: 20378673 NR Description: exonuclease [Phytophthora sojae]
  misc_feature (1)..(201): Homolog of NCBI NO: 15218790 NR Description: hypothetical protein; protein id: At1g03360.1
  misc_feature (1)..(125): Homolog of NCBI NO: 6321860 NR Description: Ribosomal RNA Processing; Rrp4p [Saccharomyces
  misc_feature (1)..(173): Homolog of NCBI NO: 17544090 NR Description: Ribosomal RNA processing like (34.1 kD)
  misc_feature (1)..(182): Homolog of NCBI NO: 39584168 NR Description: Hypothetical protein CBG05449 [Caenorhabditis
  misc_feature (1)..(150): Homolog of NCBI NO: 24762324 NR Description: CG3931-PA [Drosophila melanogaster]
  misc_feature (1)..(150): Homolog of NCBI NO: 21428348 NR Description: GM02257p [Drosophila melanogaster]
  misc_feature (1)..(103): Homolog of NCBI NO: 19923403 NR Description: homolog of Yeast RRP4 (ribosomal RNA processing
  misc_feature (1)..(106): Homolog of NCBI NO: 21450259 NR Description: hypothetical protein MGC30456 [Mus musculus]
  misc_feature (1)..(157): Homolog of NCBI NO: 19113896 NR Description: conserved hypothetical protein
  misc_feature (1)..(171): Homolog of NCBI NO: 20378673 NR Description: exonuclease [Phytophthora sojae]
  misc_feature (1)..(201): Homolog of NCBI NO: 15218790 NR Description: hypothetical protein; protein id: At1g03360.1

SEQ ID NO: 35670 - DNA, 1284 bp, Arabidopsis thaliana
  misc_feature (1)..(1284): Ceres Seq. ID no. 13618547
  misc_feature: MA Experiment ID: 108473 Result: Down-regulated in Transcription
  misc_feature: MA Experiment 108473 PARAMETER Experiment Name: At_Drought_Flowers_cDNA_P Parameter: Timepoint (hr) Value: 7 d
  misc_feature: MA Experiment 108473 PARAMETER Experiment Name: At_Drought_Flowers_cDNA_P Parameter: Tissue Value: Flower
  misc_feature: MA Experiment 108473 PARAMETER Experiment Name: At_Drought_Flowers_cDNA_P Parameter: Treatment Value: Drought vs. No Drought
  misc_feature: MA Experiment ID: 108501 Result: Down-regulated in Transcription
  misc_feature: MA Experiment 108501 PARAMETER Experiment Name: At_ap2_floral_buds_cDNA_P Parameter: Plant Line Value: ap2 (Ler.)
  misc_feature: MA Experiment 108501 PARAMETER Experiment Name: At_ap2_floral_buds_cDNA_P Parameter: Tissue Value: Closed Flower
  misc_feature: MA Experiment ID: 20000087 Result: Up-regulated in Transcription
  misc_feature: MA Experiment 20000087 PARAMETER Experiment Name: At_100uM_ABA_Mutants_cDNA_P Parameter: Plant Line Value: WS
  misc_feature: MA Experiment 20000087 PARAMETER Experiment Name: At_100uM_ABA_Mutants_cDNA_P Parameter: Timepoint (hr) Value: 6
  misc_feature: MA Experiment 20000087 PARAMETER Experiment Name: At_100uM_ABA_Mutants_cDNA_P Parameter: Tissue Value: Aerial
  misc_feature: MA Experiment 20000087 PARAMETER Experiment Name: At_100uM_ABA_Mutants_cDNA_P Parameter: Treatment Value: 100uM ABA vs. No Treatment
  misc_feature: MA Experiment ID: 20000113 Result: Down-regulated in Transcription
  misc_feature: MA Experiment 20000113 PARAMETER Experiment Name: At_42deg_Heat_cDNA_P Parameter: Temperature (deg C) Value: 42 vs. 22
  misc_feature: MA Experiment 20000113 PARAMETER Experiment Name: At_42deg_Heat_cDNA_P Parameter: Timepoint (hr) Value: 8
  misc_feature: MA Experiment 20000113 PARAMETER Experiment Name: At_42deg_Heat_cDNA_P Parameter: Tissue Value: Aerial
  misc_feature: MA Experiment ID: 20000234 Result: Down-regulated in Transcription
  misc_feature: MA Experiment 20000234 PARAMETER Experiment Name: At_Siliques_P Parameter: Age (day) Value: 21
  misc_feature: MA Experiment 20000234 PARAMETER Experiment Name: At_Siliques_P Parameter: Organism Value: A. thaliana
  misc_feature: MA Experiment 20000234 PARAMETER Experiment Name: At_Siliques_P Parameter: Plant Line Value: WS
  misc_feature: MA Experiment 20000234 PARAMETER Experiment Name: At_Siliques_P Parameter: Tissue Value: Less Than 5mm Siliques vs. Whole Plant
  misc_feature: MA Experiment ID: 20000235 Result: Down-regulated in Transcription
  misc_feature: MA Experiment 20000235 PARAMETER Experiment Name: At_Siliques_P Parameter: Age (day) Value: 21
  misc_feature: MA Experiment 20000235 PARAMETER Experiment Name: At_Siliques_P Parameter: Organism Value: A. thaliana
  misc_feature: MA Experiment 20000235 PARAMETER Experiment Name: At_Siliques_P Parameter: Plant Line Value: WS
  misc_feature: MA Experiment 20000235 PARAMETER Experiment Name: At_Siliques_P Parameter: Tissue Value: 5-10mm Siliques vs. Whole Plant
  misc_feature: MA Experiment ID: 20000265 Result: Up-regulated in Transcription
  misc_feature: MA Experiment 20000265 PARAMETER Experiment Name: At_Open_Flower_P Parameter: Age (day) Value: 21
  misc_feature: MA Experiment 20000265 PARAMETER Experiment Name: At_Open_Flower_P Parameter: Plant Line Value: WS
  misc_feature: MA Experiment 20000265 PARAMETER Experiment Name: At_Open_Flower_P Parameter: Tissue Value: Closed Flower vs. Whole Plant
  misc_feature: MA Experiment ID: 20000286 Result: Up-regulated in Transcription
  misc_feature: MA Experiment 20000286 PARAMETER Experiment Name: At_Open_Flower_P Parameter: Age (day) Value: 21
  misc_feature: MA Experiment 20000286 PARAMETER Experiment Name: At_Open_Flower_P Parameter: Plant Line Value: WS
  misc_feature: MA Experiment 20000286 PARAMETER Experiment Name: At_Open_Flower_P Parameter: Tissue Value: Half Open vs. Whole Plant
  misc_feature: MA Experiment ID: 20001768 Result: Up-regulated in Transcription
  misc_feature: MA Experiment 20001768 PARAMETER Experiment Name: At_Far-red-enriched-adult_P Parameter: Age (day) Value: 28
  misc_feature: MA Experiment 20001768 PARAMETER Experiment Name: At_Far-red-enriched-adult_P Parameter: Light Value: Far-red enriched vs. White
  misc_feature: MA Experiment 20001768 PARAMETER Experiment Name: At_Far-red-enriched-adult_P Parameter: Organism Value: A. thaliana
  misc_feature: MA Experiment 20001768 PARAMETER Experiment Name: At_Far-red-enriched-adult_P Parameter: Plant Line Value: Columbia
  misc_feature: MA Experiment 20001768 PARAMETER Experiment Name: At_Far-red-enriched-adult_P Parameter: Timepoint (hr) Value: 1
  misc_feature: MA Experiment 20001768 PARAMETER Experiment Name: At_Far-red-enriched-adult_P Parameter: Tissue Value: Aerial
  misc_feature: MA Experiment ID: 20001771 Result: Up-regulated in Transcription
  misc_feature: MA Experiment 20001771 PARAMETER Experiment Name: At_Far-red-enriched-adult_P Parameter: Age (day) Value: 28
  misc_feature: MA Experiment 20001771 PARAMETER Experiment Name: At_Far-red-enriched-adult_P Parameter: Light Value: Far-red enriched vs. White
  misc_feature: MA Experiment 20001771 PARAMETER Experiment Name: At_Far-red-enriched-adult_P Parameter: Organism Value: A. thaliana
  misc_feature: MA Experiment 20001771 PARAMETER Experiment Name: At_Far-red-enriched-adult_P Parameter: Plant Line Value: Columbia
  misc_feature: MA Experiment 20001771 PARAMETER Experiment Name: At_Far-red-enriched-adult_P Parameter: Timepoint (hr) Value: 16
  misc_feature: MA Experiment 20001771 PARAMETER Experiment Name: At_Far-red-enriched-adult_P Parameter: Tissue Value: Aerial
  misc_feature: MA Experiment ID: 20001773 Result: Up-regulated in Transcription
  misc_feature: MA Experiment 20001773 PARAMETER Experiment Name: At_Far-red-enriched-adult_P Parameter: Age (day) Value: 30
  misc_feature: MA Experiment 20001773 PARAMETER Experiment Name: At_Far-red-enriched-adult_P Parameter: Light Value: Far-red enriched vs. White
  misc_feature: MA Experiment 20001773 PARAMETER Experiment Name: At_Far-red-enriched-adult_P Parameter: Organism Value: A. thaliana
  misc_feature: MA Experiment 20001773 PARAMETER Experiment Name: At_Far-red-enriched-adult_P Parameter: Plant Line Value: Columbia
  misc_feature: MA Experiment 20001773 PARAMETER Experiment Name: At_Far-red-enriched-adult_P Parameter: Timepoint (hr) Value: 48
  misc_feature: MA Experiment 20001773 PARAMETER Experiment Name: At_Far-red-enriched-adult_P Parameter: Tissue Value: Aerial
  misc_feature: MA Experiment ID: 20001910 Result: Down-regulated in Transcription
  misc_feature: MA Experiment 20001910 PARAMETER Experiment Name: At_Drought_Reproduction_P Parameter: Age (day) Value: 37
  misc_feature: MA Experiment 20001910 PARAMETER Experiment Name: At_Drought_Reproduction_P Parameter: Organism Value: A. thaliana
  misc_feature: MA Experiment 20001910 PARAMETER Experiment Name: At_Drought_Reproduction_P Parameter: Plant Line Value: WS
  misc_feature: MA Experiment 20001910 PARAMETER Experiment Name: At_Drought_Reproduction_P Parameter: Timepoint (day) Value: 7
  misc_feature: MA Experiment 20001910 PARAMETER Experiment Name: At_Drought_Reproduction_P Parameter: Tissue Value: Flowers
  misc_feature: MA Experiment 20001910 PARAMETER Experiment Name: At_Drought_Reproduction_P Parameter: Treatment Value: Drought vs. No Drought
actaattaaattctctataaaacataagagagtctaaacactgtggtagaaaaaaatatagacttttagatatgtgtagtaaaataacattagtgttaactttattttccagttatttcatatcaacagatgctgtgaatggatcatttcctgcgcttttggcttttggagattcaattctcgatactggcaacaacaattttctcctgacttttatgaaaggaaatatctggccatatggaaggagtttcagcatgagaagggcgacaggaagatttggaaatggaagagttttctctgatatagttgctgaaggtttagggatcaagaagattttaccagcttatcgtaagttgttcaattctccaagtgaccttagaactggtgtttgcttcgcatcaggtggtgcaggagttgaccctgttacatccaaattgctgagagttttaacgccaaaggatcaagtaaacgatttcaaagggtacataagaaagctaaaggccacagcaggtccttcaagagcaagtagtatagtttcaaatgcagtgattcttgtttctcaaggaaataatgatattggaatctcatattttggaactccaactgctgctttccgaggattaactcccaatagatataccactaaactagctggttggaacaaacagtttatgaaagaattatacgatcaaggagcgagaaaattcgcggtaatgggagtgataccgttgggatgtttgcctatgacaagaatcttccttggtgggttcgtcatcacgtgtaacttcttcgcgaatagagtcgcagaacagtacaacggaaaattgaggagcggaactaaaagttggggacgtgaagcaggttttaggggtgcaaaatttgtctatgtcgacatgtacaacactcttatggatgttattaaaaattatagaagatacggattttctaatgagaaaaatgggtgttgttgtatgattacggctataataccatgccccaacccagataaatacgtcttctacgacttcgttcatccatccgagaaagcttacagaacaatttctaaaaagcttgtccaggatatcaagaatggccttgcctgatttattatatatacaatgctttattttaattttaataacagccatcgttaataatagaaatgagaagacaaaaatcatacatggcgatctctctgtttttcttatgttaaagaatgtataatccagtttatgtattgttcactttatataatcccagaacaacaaaggagtttgtttacaa

SEQ ID NO: 35671 - protein, 343 aa, Arabidopsis thaliana
  peptide (1)..(343): Ceres Seq. ID no. 13618548
  misc_feature (29)..(334): Pfam Name: GDSL-like Lipase/Acylhydrolase Pfam Description: GDSL-like Lipase/Acylhydrolase
  misc_feature (1)..(343): Homolog of NCBI NO: 15220775 NR Description: lipase, putative [Arabidopsis thaliana]
  misc_feature (1)..(343): Homolog of NCBI NO: 15219505 NR Description: GDSL-motif lipase/hydrolase protein [Arabidopsis
  misc_feature (3)..(343): Homolog of NCBI NO: 15242657 NR Description: lipase, putative [Arabidopsis thaliana]
  misc_feature (8)..(327): Homolog of NCBI NO: 25404995 NR Description: protein T4O12.15 [imported] - Arabidopsis
  misc_feature (8)..(343): Homolog of NCBI NO: 15222904 NR Description: family II extracellular lipase 6 (EXL6)
  misc_feature (7)..(343): Homolog of NCBI NO: 18410967 NR Description: family II extracellular lipase 5 (EXL5)
  misc_feature (1)..(343): Homolog of NCBI NO: 8778809 NR Description: T4O12.14 [Arabidopsis thaliana]
  misc_feature (21)..(343): Homolog of NCBI NO: 25404994 NR Description: protein T4O12.13 [imported] - Arabidopsis
  misc_feature (1)..(343): Homolog of NCBI NO: 15054388 NR Description: family II lipase EXL4 [Arabidopsis thaliana]
  misc_feature (1)..(343): Homolog of NCBI NO: 15222902 NR Description: family II extracellular lipase 4 (EXL4)
MCSKITLVLTLFSSYFISTDAVNGSFPALLAFGDSILDTGNNNFLLTFMKGNIWPYGRSFSMRRATGRFGNGRVFSDIVAEGLGIKKILPAYRKLFNSPSDLRTGVCFASGGAGVDPVTSKLLRVLTPKDQVNDFKGYIRKLKATAGPSRASSIVSNAVILVSQGNNDIGISYFGTPTAAFRGLTPNRYTTKLAGWNKQFMKELYDQGARKFAVMGVIPLGCLPMTRIFLGGFVITCNFFANRVAEQYNGKLRSGTKSWGREAGFRGAKFVYVDMYNTLMDVIKNYRRYGFSNEKNGCCCMITAIIPCPNPDKYVFYDFVHPSEKAYRTISKKLVQDIKNGLA

SEQ ID NO: 35672 - protein, 295 aa, Arabidopsis thaliana
  peptide (1)..(295): Ceres Seq. ID no. 13618549
  misc_feature (1)..(286): Pfam Name: GDSL-like Lipase/Acylhydrolase Pfam Description: GDSL-like Lipase/Acylhydrolase
  misc_feature (1)..(295): Homolog of NCBI NO: 15220775 NR Description: lipase, putative [Arabidopsis thaliana]
  misc_feature (1)..(295): Homolog of NCBI NO: 15219505 NR Description: GDSL-motif lipase/hydrolase protein [Arabidopsis
  misc_feature (1)..(295): Homolog of NCBI NO: 15242657 NR Description: lipase, putative [Arabidopsis thaliana]
  misc_feature (1)..(279): Homolog of NCBI NO: 25404995 NR Description: protein T4O12.15 [imported] - Arabidopsis
  misc_feature (1)..(295): Homolog of NCBI NO: 15222904 NR Description: family II extracellular lipase 6 (EXL6)
  misc_feature (1)..(295): Homolog of NCBI NO: 18410967 NR Description: family II extracellular lipase 5 (EXL5)
  misc_feature (1)..(295): Homolog of NCBI NO: 8778809 NR Description: T4O12.14 [Arabidopsis thaliana]
  misc_feature (1)..(295): Homolog of NCBI NO: 25404994 NR Description: protein T4O12.13 [imported] - Arabidopsis
  misc_feature (1)..(295): Homolog of NCBI NO: 15054388 NR Description: family II lipase EXL4 [Arabidopsis thaliana]
  misc_feature (1)..(295): Homolog of NCBI NO: 15222902 NR Description: family II extracellular lipase 4 (EXL4)
MKGNIWPYGRSFSMRRATGRFGNGRVFSDIVAEGLGIKKILPAYRKLFNSPSDLRTGVCFASGGAGVDPVTSKLLRVLTPKDQVNDFKGYIRKLKATAGPSRASSIVSNAVILVSQGNNDIGISYFGTPTAAFRGLTPNRYTTKLAGWNKQFMKELYDQGARKFAVMGVIPLGCLPMTRIFLGGFVITCNFFANRVAEQYNGKLRSGTKSWGREAGFRGAKFVYVDMYNTLMDVIKNYRRYGFSNEKNGCCCMITAIIPCPNPDKYVFYDFVHPSEKAYRTISKKLVQDIKNGLA

SEQ ID NO: 35673 - protein, 282 aa, Arabidopsis thaliana
  peptide (1)..(282): Ceres Seq. ID no. 13618550
  misc_feature (1)..(273): Pfam Name: GDSL-like Lipase/Acylhydrolase Pfam Description: GDSL-like Lipase/Acylhydrolase
  misc_feature (1)..(282): Homolog of NCBI NO: 15220775 NR Description: lipase, putative [Arabidopsis thaliana]
  misc_feature (1)..(282): Homolog of NCBI NO: 15219505 NR Description: GDSL-motif lipase/hydrolase protein [Arabidopsis
  misc_feature (1)..(282): Homolog of NCBI NO: 15242657 NR Description: lipase, putative [Arabidopsis thaliana]
  misc_feature (1)..(266): Homolog of NCBI NO: 25404995 NR Description: protein T4O12.15 [imported] - Arabidopsis
  misc_feature (1)..(282): Homolog of NCBI NO: 15222904 NR Description: family II extracellular lipase 6 (EXL6)
  misc_feature (1)..(282): Homolog of NCBI NO: 18410967 NR Description: family II extracellular lipase 5 (EXL5)
  misc_feature (1)..(282): Homolog of NCBI NO: 8778809 NR Description: T4O12.14 [Arabidopsis thaliana]
  misc_feature (1)..(282): Homolog of NCBI NO: 25404994 NR Description: protein T4O12.13 [imported] - Arabidopsis
  misc_feature (1)..(282): Homolog of NCBI NO: 15054388 NR Description: family II lipase EXL4 [Arabidopsis thaliana]
  misc_feature (1)..(282): Homolog of NCBI NO: 15222902 NR Description: family II extracellular lipase 4 (EXL4)
MRRATGRFGNGRVFSDIVAEGLGIKKILPAYRKLFNSPSDLRTGVCFASGGAGVDPVTSKLLRVLTPKDQVNDFKGYIRKLKATAGPSRASSIVSNAVILVSQGNNDIGISYFGTPTAAFRGLTPNRYTTKLAGWNKQFMKELYDQGARKFAVMGVIPLGCLPMTRIFLGGFVITCNFFANRVAEQYNGKLRSGTKSWGREAGFRGAKFVYVDMYNTLMDVIKNYRRYGFSNEKNGCCCMITAIIPCPNPDKYVFYDFVHPSEKAYRTISKKLVQDIKNGLA

SEQ ID NO: 35674 - DNA, 528 bp, Arabidopsis thaliana
  misc_feature (1)..(528): Ceres Seq. ID no. 12580481
  misc_feature: MA Experiment ID: 108595 Result: Up-regulated in Transcription
  misc_feature: MA Experiment 108595 PARAMETER Experiment Name: At_Ler-pi_Ovule_cDNA_P Parameter: Plant Line Value: null
  misc_feature: MA Experiment ID: 20000113 Result: Up-regulated in Transcription
  misc_feature: MA Experiment 20000113 PARAMETER Experiment Name: At_42deg_Heat_cDNA_P Parameter: Temperature (deg C) Value: 42 vs. 22
  misc_feature: MA Experiment 20000113 PARAMETER Experiment Name: At_42deg_Heat_cDNA_P Parameter: Timepoint (hr) Value: 8
  misc_feature: MA Experiment 20000113 PARAMETER Experiment Name: At_42deg_Heat_cDNA_P Parameter: Tissue Value: Aerial
  misc_feature: MA Experiment ID: 20001451 Result: Up-regulated in Transcription
  misc_feature: MA Experiment 20001451 PARAMETER Experiment Name: At_Far-red-induction_P Parameter: Age (day) Value: 7
  misc_feature: MA Experiment 20001451 PARAMETER Experiment Name: At_Far-red-induction_P Parameter: Light Value: Far-red vs. White
  misc_feature: MA Experiment 20001451 PARAMETER Experiment Name: At_Far-red-induction_P Parameter: Organism Value: A. thaliana
  misc_feature: MA Experiment 20001451 PARAMETER Experiment Name: At_Far-red-induction_P Parameter: Plant Line Value: Columbia
  misc_feature: MA Experiment 20001451 PARAMETER Experiment Name: At_Far-red-induction_P Parameter: Timepoint (hr) Value: 24
  misc_feature: MA Experiment 20001451 PARAMETER Experiment Name: At_Far-red-induction_P Parameter: Tissue Value: Whole Plant
acgttggtattatctctggtttcacattttcttaaccctctttggtgaatgcgtcattgaaacgccattatccgccgtgctaatctgatctcctcccccgtcggaaaaaatggccactggtggaaaagtctccttcaaagtcactctgacttcggatcctaagcttcctttcaaagttttcagcgtaccagaaggagctccgttcacggcggttctgaaattcgcagcagaagagttcaaggttcctccacaaaccagcgccatcatcactaatgatgggatcgggatcaatcctcaacagagtgcaggaaacgtttttctgaagcacggatctgaactaagattgatcccgcgtgatagagttggagctgtgtttgtgatggatccatagatgatgtgtaagcaatgattaaaaactcagttccaaaaaaaacataataatatactgaaatgcttatgtatcaacttcgttgaataaatatgtaatcgtcacatccttttacggattgaagtgagttgaatttggtc

SEQ ID NO: 35675 - protein, 93 aa, Arabidopsis thaliana; identical to SEQ ID NO: 26059
  peptide (1)..(93): Ceres Seq. ID no. 12580482
  misc_feature (5)..(80): Pfam Name: Uncharacterised protein family (UPF0185) Pfam Description: Uncharacterised protein family (UPF0185)
  misc_feature (6)..(80): Homolog of NCBI NO: 1235522 NR Description: ORF is homologous to hypothetical 9.8 kD protein
  misc_feature (6)..(86): Homolog of NCBI NO: 28277496 NR Description: Similar to RIKEN cDNA 1810045K17 gene [Danio
  misc_feature (6)..(86): Homolog of NCBI NO: 37595394 NR Description: hypothetical protein BM-002 [Danio rerio]
  misc_feature (6)..(87): Homolog of NCBI NO: 7705300 NR Description: hypothetical protein BM-002 [Homo sapiens]
  misc_feature (4)..(86): Homolog of NCBI NO: 17557033 NR Description: Eukaryotic protein similar to human bone marrow
  misc_feature (1)..(86): Homolog of NCBI NO: 39589640 NR Description: Hypothetical protein CBG12253 [Caenorhabditis
  misc_feature (1)..(87): Homolog of NCBI NO: 40889046 NR Description: Chain A, Solution Structure Of Mouse Hypothetical
  misc_feature (1)..(88): Homolog of NCBI NO: 20140686 NR Description: Hypothetical protein pr46A
  misc_feature (2)..(88): Homolog of NCBI NO: 34905822 NR Description: P0483G10.15 [Oryza sativa (japonica
  misc_feature (1)..(93): Homolog of NCBI NO: 15217447 NR Description: unknown protein

SEQ ID NO: 35676 - DNA, 1180 bp, Arabidopsis thaliana; identical to SEQ ID NO: 30934
  misc_feature (1)..(1180): Ceres Seq. ID no. 13504734
  misc_feature: MA Experiment ID: 108434 Result: Up-regulated in Transcription
  misc_feature: MA Experiment 108434 PARAMETER Experiment Name: At_Root_Tips_cDNA_P Parameter: Tissue Value: Root Tips
  misc_feature: MA Experiment ID: 108462 Result: Down-regulated in Transcription
  misc_feature: MA Experiment 108462 PARAMETER Experiment Name: At_Germinating_Seeds_cDNA_P Parameter: Age (day) Value: 2 vs. 0
  misc_feature: MA Experiment 108462 PARAMETER Experiment Name: At_Germinating_Seeds_cDNA_P Parameter: Tissue Value: Germinating Seeds
  misc_feature: MA Experiment ID: 108463 Result: Down-regulated in Transcription
  misc_feature: MA Experiment 108463 PARAMETER Experiment Name: At_Germinating_Seeds_cDNA_P Parameter: Age (day) Value: 3 vs. 0
  misc_feature: MA Experiment 108463 PARAMETER Experiment Name: At_Germinating_Seeds_cDNA_P Parameter: Tissue Value: Germinating Seeds
  misc_feature: MA Experiment ID: 108464 Result: Down-regulated in Transcription
  misc_feature: MA Experiment 108464 PARAMETER Experiment Name: At_Germinating_Seeds_cDNA_P Parameter: Age (day) Value: 4 vs. 0
  misc_feature: MA Experiment 108464 PARAMETER Experiment Name: At_Germinating_Seeds_cDNA_P Parameter: Tissue Value: Germinating Seeds
  misc_feature: MA Experiment ID: 108488 Result: Up-regulated in Transcription
  misc_feature: MA Experiment ID: 20000224 Result: Down-regulated in Transcription
  misc_feature: MA Experiment ID: 20001807 Result: Up-regulated in Transcription
  misc_feature: MA Experiment 20001807 PARAMETER Experiment Name: At_50mM_NH4NO3_L-to-H_Sub_P Parameter: Timepoint (hr) Value: 6
  misc_feature: MA Experiment 20001807 PARAMETER Experiment Name: At_50mM_NH4NO3_L-to-H_Sub_P Parameter: Tissue Value: Leaf
  misc_feature: MA Experiment 20001807 PARAMETER Experiment Name: At_50mM_NH4NO3_L-to-H_Sub_P Parameter: Treatment Value: 50mM NH4NO3 vs 100mM Mannitol

SEQ ID NO: 35677 - protein, 320 aa, Arabidopsis thaliana; identical to SEQ ID NO: 30935
  peptide (1)..(320): Ceres Seq. ID no. 13504735
  misc_feature (5)..(109): Pfam Name: Ribosomal protein L10 Pfam Description: Ribosomal protein L10
  misc_feature (5)..(109): Pfam Name: Ribosomal protein L10 Pfam Description: Ribosomal protein L10
  misc_feature (2)..(315): Homolog of NCBI NO: 15225613 NR Description: 60S acidic ribosomal protein P0 (RPP0A)
  misc_feature (5)..(318): Homolog of NCBI NO: 6984134 NR Description: 60S acidic ribosomal protein PO [Euphorbia esula]
  misc_feature (1)..(320): Homolog of NCBI NO: 21593316 NR Description: 60S acidic ribosomal protein P0-C [Arabidopsis
  misc_feature (2)..(315): Homolog of NCBI NO: 15225613 NR Description: 60S acidic ribosomal protein P0 (RPP0A)
  misc_feature (1)..(320): Homolog of NCBI NO: 21593316 NR Description: 60S acidic ribosomal protein P0-C [Arabidopsis
  misc_feature (1)..(320): Homolog of NCBI NO: 21554645 NR Description: putative 60S acidic ribosomal protein P0
  misc_feature (1)..(320): Homolog of NCBI NO: 15232603 NR Description: 60S acidic ribosomal protein P0 (RPP0B)
  misc_feature (1)..(320): Homolog of NCBI NO: 15229706 NR Description: 60S acidic ribosomal protein P0 (RPP0C)
  misc_feature (5)..(318): Homolog of NCBI NO: 6984134 NR Description: 60S acidic ribosomal protein PO [Euphorbia esula]
  misc_feature (1)..(320): Homolog of NCBI NO: 15229706 NR Description: 60S acidic ribosomal protein P0 (RPP0C)
  misc_feature (1)..(320): Homolog of NCBI NO: 21554645 NR Description: putative 60S acidic ribosomal protein P0
  misc_feature (1)..(320): Homolog of NCBI NO: 15232603 NR Description: 60S acidic ribosomal protein P0 (RPP0B)

SEQ ID NO: 35678 - protein, 266 aa, Arabidopsis thaliana; identical to SEQ ID NO: 26377
  peptide (1)..(266): Ceres Seq. ID no. 13504736
  misc_feature (1)..(55): Pfam Name: Ribosomal protein L10 Pfam Description: Ribosomal protein L10
  misc_feature (1)..(55): Pfam Name: Ribosomal protein L10 Pfam Description: Ribosomal protein L10
  misc_feature (1)..(261): Homolog of NCBI NO: 15225613 NR Description: 60S acidic ribosomal protein P0 (RPP0A)
  misc_feature (1)..(264): Homolog of NCBI NO: 6984134 NR Description: 60S acidic ribosomal protein PO [Euphorbia esula]
  misc_feature (1)..(266): Homolog of NCBI NO: 21593316 NR Description: 60S acidic ribosomal protein P0-C [Arabidopsis
  misc_feature (1)..(261): Homolog of NCBI NO: 15225613 NR Description: 60S acidic ribosomal protein P0 (RPP0A)
  misc_feature (1)..(266): Homolog of NCBI NO: 21593316 NR Description: 60S acidic ribosomal protein P0-C [Arabidopsis
  misc_feature (1)..(266): Homolog of NCBI NO: 21554645 NR Description: putative 60S acidic ribosomal protein P0
  misc_feature (1)..(266): Homolog of NCBI NO: 15232603 NR Description: 60S acidic ribosomal protein P0 (RPP0B)
  misc_feature (1)..(266): Homolog of NCBI NO: 15229706 NR Description: 60S acidic ribosomal protein P0 (RPP0C)
  misc_feature (1)..(264): Homolog of NCBI NO: 6984134 NR Description: 60S acidic ribosomal protein PO [Euphorbia esula]
  misc_feature (1)..(266): Homolog of NCBI NO: 15229706 NR Description: 60S acidic ribosomal protein P0 (RPP0C)
  misc_feature (1)..(266): Homolog of NCBI NO: 21554645 NR Description: putative 60S acidic ribosomal protein P0
  misc_feature (1)..(266): Homolog of NCBI NO: 15232603 NR Description: 60S acidic ribosomal protein P0 (RPP0B)

SEQ ID NO: 35679 - protein, 261 aa, Arabidopsis thaliana; identical to SEQ ID NO: 26378
  peptide (1)..(261): Ceres Seq. ID no. 13504737
  misc_feature (176)..(258): Pfam Name: 60s Acidic ribosomal protein Pfam Description: 60s Acidic ribosomal protein
  misc_feature (176)..(258): Pfam Name: 60s Acidic ribosomal protein Pfam Description: 60s Acidic ribosomal protein
  misc_feature (1)..(256): Homolog of NCBI NO: 15225613 NR Description: 60S acidic ribosomal protein P0 (RPP0A)
  misc_feature (1)..(259): Homolog of NCBI NO: 6984134 NR Description: 60S acidic ribosomal protein PO [Euphorbia esula]
  misc_feature (1)..(261): Homolog of NCBI NO: 21593316 NR Description: 60S acidic ribosomal protein P0-C [Arabidopsis
  misc_feature (1)..(256): Homolog of NCBI NO: 15225613 NR Description: 60S acidic ribosomal protein P0 (RPP0A)
  misc_feature (1)..(261): Homolog of NCBI NO: 21593316 NR Description: 60S acidic ribosomal protein P0-C [Arabidopsis
  misc_feature (1)..(261): Homolog of NCBI NO: 21554645 NR Description: putative 60S acidic ribosomal protein P0
  misc_feature (1)..(261): Homolog of NCBI NO: 15232603 NR Description: 60S acidic ribosomal protein P0 (RPP0B)
  misc_feature (1)..(261): Homolog of NCBI NO: 15229706 NR Description: 60S acidic ribosomal protein P0 (RPP0C)
  misc_feature (1)..(259): Homolog of NCBI NO: 6984134 NR Description: 60S acidic ribosomal protein PO [Euphorbia esula]
  misc_feature (1)..(261): Homolog of NCBI NO: 15229706 NR Description: 60S acidic ribosomal protein P0 (RPP0C)
  misc_feature (1)..(261): Homolog of NCBI NO: 21554645 NR Description: putative 60S acidic ribosomal protein P0
  misc_feature (1)..(261): Homolog of NCBI NO: 15232603 NR Description: 60S acidic ribosomal protein P0 (RPP0B)

SEQ ID NO: 35680 - DNA, 770 bp, Arabidopsis thaliana
  misc_feature (1)..(770): Ceres Seq. ID no. 12339783
  misc_feature: MA Experiment ID: 108573 Result: Down-regulated in Transcription
  misc_feature: MA Experiment 108573 PARAMETER Experiment Name: At_Drought_cDNA_P Parameter: Timepoint (hr) Value: 6
  misc_feature: MA Experiment 108573 PARAMETER Experiment Name: At_Drought_cDNA_P Parameter: Tissue Value: Aerial
  misc_feature: MA Experiment 108573 PARAMETER Experiment Name: At_Drought_cDNA_P Parameter: Treatment Value: Drought vs. No Drought
  misc_feature: MA Experiment ID: 108576 Result: Up-regulated in Transcription
  misc_feature: MA Experiment 108576 PARAMETER Experiment Name: At_42deg_Heat_cDNA_P Parameter: Temperature (deg C) Value: 42 vs. 22
  misc_feature: MA Experiment 108576 PARAMETER Experiment Name: At_42deg_Heat_cDNA_P Parameter: Timepoint (hr) Value: 1
  misc_feature: MA Experiment 108576 PARAMETER Experiment Name: At_42deg_Heat_cDNA_P Parameter: Tissue Value: Aerial
  misc_feature: MA Experiment ID: 108577 Result: Up-regulated in Transcription
  misc_feature: MA Experiment 108577 PARAMETER Experiment Name: At_42deg_Heat_cDNA_P Parameter: Temperature (deg C) Value: 42 vs. 22
  misc_feature: MA Experiment 108577 PARAMETER Experiment Name: At_42deg_Heat_cDNA_P Parameter: Timepoint (hr) Value: 6
  misc_feature: MA Experiment 108577 PARAMETER Experiment Name: At_42deg_Heat_cDNA_P Parameter: Tissue Value: Aerial
  misc_feature: MA Experiment ID: 108668 Result: Up-regulated in Transcription
  misc_feature: MA Experiment 108668 PARAMETER Experiment Name: At_2mM_SA_cDNA_P Parameter: Plant Line Value: WS
  misc_feature: MA Experiment 108668 PARAMETER Experiment Name: At_2mM_SA_cDNA_P Parameter: Timepoint (hr) Value: 6
  misc_feature: MA Experiment 108668 PARAMETER Experiment Name: At_2mM_SA_cDNA_P Parameter: Treatment Value: 2mM SA vs. No Treatment
  misc_feature: MA Experiment ID: 20000090 Result: Up-regulated in Transcription
  misc_feature: MA Experiment ID: 20000093 Result: Up-regulated in Transcription
  misc_feature: MA Experiment 20000093 PARAMETER Experiment Name: At_42deg_Heat_cDNA_P Parameter: Temperature (deg C) Value: 42 vs. 22
  misc_feature: MA Experiment 20000093 PARAMETER Experiment Name: At_42deg_Heat_cDNA_P Parameter: Timepoint (hr) Value: 0.5
  misc_feature: MA Experiment 20000093 PARAMETER Experiment Name: At_42deg_Heat_cDNA_P Parameter: Tissue Value: Aerial
  misc_feature: MA Experiment ID: 20000112 Result: Up-regulated in Transcription
  misc_feature: MA Experiment 20000112 PARAMETER Experiment Name: At_42deg_Heat_cDNA_P Parameter: Temperature (deg C) Value: 42 vs. 22
  misc_feature: MA Experiment 20000112 PARAMETER Experiment Name: At_42deg_Heat_cDNA_P Parameter: Timepoint (hr) Value: 2
  misc_feature: MA Experiment 20000112 PARAMETER Experiment Name: At_42deg_Heat_cDNA_P Parameter: Tissue Value: Aerial
  misc_feature: MA Experiment ID: 20000144 Result: Up-regulated in Transcription
  misc_feature: MA Experiment 20000144 PARAMETER Experiment Name: At_42deg_Heat_cDNA_P Parameter: Temperature (deg C) Value: 42 vs. 22
  misc_feature: MA Experiment 20000144 PARAMETER Experiment Name: At_42deg_Heat_cDNA_P Parameter: Timepoint (hr) Value: 1
  misc_feature: MA Experiment 20000144 PARAMETER Experiment Name: At_42deg_Heat_cDNA_P Parameter: Tissue Value: Aerial
  misc_feature: MA Experiment ID: 20000171 Result: Up-regulated in Transcription
  misc_feature: MA Experiment 20000171 PARAMETER Experiment Name: At_42deg_Heat_P Parameter: Age (day) Value: 14
  misc_feature: MA Experiment 20000171 PARAMETER Experiment Name: At_42deg_Heat_P Parameter: Organism Value: A. thaliana
  misc_feature: MA Experiment 20000171 PARAMETER Experiment Name: At_42deg_Heat_P Parameter: Plant Line Value: WS
  misc_feature: MA Experiment 20000171 PARAMETER Experiment Name: At_42deg_Heat_P Parameter: Temperature (deg C) Value: 42 vs. 22
  misc_feature: MA Experiment 20000171 PARAMETER Experiment Name: At_42deg_Heat_P Parameter: Timepoint (hr) Value: 1
  misc_feature: MA Experiment 20000171 PARAMETER Experiment Name: At_42deg_Heat_P Parameter: Tissue Value: Aerial
  misc_feature: MA Experiment ID: 20000173 Result: Up-regulated in Transcription
  misc_feature: MA Experiment 20000173 PARAMETER Experiment Name: At_42deg_Heat_P Parameter: Age (day) Value: 14
  misc_feature: MA Experiment 20000173 PARAMETER Experiment Name: At_42deg_Heat_P Parameter: Organism Value: A. thaliana
  misc_feature: MA Experiment 20000173 PARAMETER Experiment Name: At_42deg_Heat_P Parameter: Plant Line Value: WS
  misc_feature: MA Experiment 20000173 PARAMETER Experiment Name: At_42deg_Heat_P Parameter: Temperature (deg C) Value: 42 vs. 22
  misc_feature: MA Experiment 20000173 PARAMETER Experiment Name: At_42deg_Heat_P Parameter: Timepoint (hr) Value: 6
  misc_feature: MA Experiment 20000173 PARAMETER Experiment Name: At_42deg_Heat_P Parameter: Tissue Value: Aerial
  misc_feature: MA Experiment ID: 20000179 Result: Up-regulated in Transcription
  misc_feature: MA Experiment 20000179 PARAMETER Experiment Name: At_Germinating_Seeds_P Parameter: Age (hr) Value: 6 vs. 0
  misc_feature: MA Experiment 20000179 PARAMETER Experiment Name: At_Germinating_Seeds_P Parameter: Tissue Value: Germinating Seeds
  misc_feature: MA Experiment ID: 20000180 Result: Up-regulated in Transcription
  misc_feature: MA Experiment 20000180 PARAMETER Experiment Name: At_Germinating_Seeds_P Parameter: Age (hr) Value: 24 vs. 0
  misc_feature: MA Experiment 20000180 PARAMETER Experiment Name: At_Germinating_Seeds_P Parameter: Tissue Value: Germinating Seeds
  misc_feature: MA Experiment ID: 20000184 Result: Down-regulated in Transcription
  misc_feature: MA Experiment 20000184 PARAMETER Experiment Name: At_Shoots__P Parameter: Age (day) Value: 7
  misc_feature: MA Experiment 20000184 PARAMETER Experiment Name: At_Shoots__P Parameter: Tissue Value: Shoots vs. Whole Plant
  misc_feature: MA Experiment ID: 20000227 Result: Up-regulated in Transcription
  misc_feature: MA Experiment 20000227 PARAMETER Experiment Name: At_Root-Tips-vs-Tops_P Parameter: Tissue Value: Root Tips vs. Root Tops
  misc_feature: MA Experiment ID: 20000234 Result: Up-regulated in Transcription
  misc_feature: MA Experiment 20000234 PARAMETER Experiment Name: At_Siliques_P Parameter: Age (day) Value: 21
  misc_feature: MA Experiment 20000234 PARAMETER Experiment Name: At_Siliques_P Parameter: Organism Value: A. thaliana
  misc_feature: MA Experiment 20000234 PARAMETER Experiment Name: At_Siliques_P Parameter: Plant Line Value: WS
  misc_feature: MA Experiment 20000234 PARAMETER Experiment Name: At_Siliques_P Parameter: Tissue Value: Less Than 5mm Siliques vs. Whole Plant
  misc_feature: MA Experiment ID: 20001248 Result: Down-regulated in Transcription
  misc_feature: MA Experiment 20001248 PARAMETER Experiment Name: At_Far-red-induction_P Parameter: Age (day) Value: 7
  misc_feature: MA Experiment 20001248 PARAMETER Experiment Name: At_Far-red-induction_P Parameter: Light Value: Far-red vs. White
  misc_feature: MA Experiment 20001248 PARAMETER Experiment Name: At_Far-red-induction_P Parameter: Organism Value: A. thaliana
  misc_feature: MA Experiment 20001248 PARAMETER Experiment Name: At_Far-red-induction_P Parameter: Plant Line Value: Columbia
  misc_feature: MA Experiment 20001248 PARAMETER Experiment Name: At_Far-red-induction_P Parameter: Timepoint (hr) Value: 4
  misc_feature: MA Experiment 20001248 PARAMETER Experiment Name: At_Far-red-induction_P Parameter: Tissue Value: Whole Plant
tagcgcaaggcgtttgttgaaaagcttgatgaggtgcaagattggctttacatggatggagaagatgctaatgccacagagtttgagaagcggcttgactcacttaaagccatcggcagtcccatatctttccgatcagaggagcttacagcacgaccagtagcaattgaatatgctaggaaatacctaactgaactcaaagagatcataaaagaatgggagacgaacaaaacttggcttccaaaagaaaaaatcgacgaggtctcaaaggaagcagagaaagtaaaaagctggttagataagaatgtggctgagcaagaaaagacttctctgtggagcaaaccggtgttcacgtccactgaagtgtacgctaaagtatttactctacaagacaaggtcacaaaggtgaataagatcccaaagccaaagccaaagatagagaaagtaaccaagacggagaacacaacaaaggaggaggaacaatcaaaatcctctgatgaagctgccaaagaagaagaaagtcacgacgagctttgattaaggatatataataaatagagttttcgttaatttttgtgtttttaagagggaaaataggattaaaagtaggcagctgagatgagcaaaaggattttattcctttctcctcaacttcttcacatcaccattagaaacggaatcttctgtgtttttgtttttcattatatcaagttttggtctctctatttctataactgaatcttcaatatatttagtagaagtttataatc

SEQ ID NO: 35681 - protein, 161 aa, Arabidopsis thaliana
  peptide (1)..(161): Ceres Seq. ID no. 12339784
  misc_feature (1)..(140): Homolog of NCBI NO: 30525062 NR Description: heat shock protein 4 [Cyprinus carpio]
  misc_feature (1)..(160): Homolog of NCBI NO: 26344529 NR Description: unnamed protein product [Mus musculus]
  misc_feature (1)..(140): Homolog of NCBI NO: 28856138 NR Description: Similar to heat shock protein 4 [Danio rerio]
  misc_feature (1)..(160): Homolog of NCBI NO: 6226870 NR Description: 97 KDA HEAT SHOCK PROTEIN (EGG SPERM RECEPTOR)
  misc_feature (1)..(160): Homolog of NCBI NO: 1649012 NR Description: egg receptor for sperm [Strongylocentrotus
  misc_feature (1)..(159): Homolog of NCBI NO: 2495362 NR Description: 97 KDA HEAT SHOCK PROTEIN (HEAT SHOCK PROTEIN
  misc_feature (1)..(120): Homolog of NCBI NO: 7488120 NR Description: probable heat shock protein 110 - Arabidopsis
  misc_feature (1)..(161): Homolog of NCBI NO: 15293149 NR Description: putative HSP protein [Arabidopsis thaliana]
  misc_feature (1)..(161): Homolog of NCBI NO: 25407544 NR Description: HSP like protein [imported] - Arabidopsis
  misc_feature (1)..(161): Homolog of NCBI NO: 18414718 NR Description: HSP like protein
MDGEDANATEFEKRLDSLKAIGSPISFRSEELTARPVAIEYARKYLTELKEIIKEWETNKTWLPKEKIDEVSKEAEKVKSWLDKNVAEQEKTSLWSKPVFTSTEVYAKVFTLQDKVTKVNKIPKPKPKIEKVTKTENTTKEEEQSKSSDEAAKEEESHDEL

SEQ ID NO: 35682 - DNA, 1250 bp, Arabidopsis thaliana
  misc_feature (1)..(1250): Ceres Seq. ID no. 13490630
  misc_feature: MA Experiment ID: 108434 Result: Up-regulated in Transcription
  misc_feature: MA Experiment 108434 PARAMETER Experiment Name: At_Root_Tips_cDNA_P Parameter: Tissue Value: Root Tips
  misc_feature: MA Experiment ID: 108462 Result: Down-regulated in Transcription
  misc_feature: MA Experiment 108462 PARAMETER Experiment Name: At_Germinating_Seeds_cDNA_P Parameter: Age (day) Value: 2 vs. 0
  misc_feature: MA Experiment 108462 PARAMETER Experiment Name: At_Germinating_Seeds_cDNA_P Parameter: Tissue Value: Germinating Seeds
  misc_feature: MA Experiment ID: 108463 Result: Down-regulated in Transcription
  misc_feature: MA Experiment 108463 PARAMETER Experiment Name: At_Germinating_Seeds_cDNA_P Parameter: Age (day) Value: 3 vs. 0
  misc_feature: MA Experiment 108463 PARAMETER Experiment Name: At_Germinating_Seeds_cDNA_P Parameter: Tissue Value: Germinating Seeds
  misc_feature: MA Experiment ID: 108464 Result: Down-regulated in Transcription
  misc_feature: MA Experiment 108464 PARAMETER Experiment Name: At_Germinating_Seeds_cDNA_P Parameter: Age (day) Value: 4 vs. 0
  misc_feature: MA Experiment 108464 PARAMETER Experiment Name: At_Germinating_Seeds_cDNA_P Parameter: Tissue Value: Germinating Seeds
  misc_feature: MA Experiment ID: 108474 Result: Down-regulated in Transcription
  misc_feature: MA Experiment 108474 PARAMETER Experiment Name: At_Drought_Flowers_cDNA_P Parameter: Timepoint (hr) Value: null
  misc_feature: MA Experiment 108474 PARAMETER Experiment Name: At_Drought_Flowers_cDNA_P Parameter: Treatment Value: Drought vs. No Drought
  misc_feature: MA Experiment ID: 108561 Result: Up-regulated in Transcription
  misc_feature: MA Experiment 108561 PARAMETER Experiment Name: At_100uM_ABA_cDNA_P Parameter: Timepoint (hr) Value: 6
  misc_feature: MA Experiment 108561 PARAMETER Experiment Name: At_100uM_ABA_cDNA_P Parameter: Tissue Value: Aerial
  misc_feature: MA Experiment 108561 PARAMETER Experiment Name: At_100uM_ABA_cDNA_P Parameter: Treatment Value: 100uM ABA vs. No Treatment
  misc_feature: MA Experiment ID: 108595 Result: Up-regulated in Transcription
  misc_feature: MA Experiment 108595 PARAMETER Experiment Name: At_Ler-pi_Ovule_cDNA_P Parameter: Plant Line Value: null
  misc_feature: MA Experiment ID: 20000068 Result: Up-regulated in Transcription
  misc_feature: MA Experiment ID: 20000069 Result: Up-regulated in Transcription
  misc_feature: MA Experiment 20000069 PARAMETER Experiment Name: At_100uM_ABA_Mutants_cDNA_P Parameter: Plant Line Value: CS23
  misc_feature: MA Experiment 20000069 PARAMETER Experiment Name: At_100uM_ABA_Mutants_cDNA_P Parameter: Timepoint (hr) Value: 6
  misc_feature: MA Experiment 20000069 PARAMETER Experiment Name: At_100uM_ABA_Mutants_cDNA_P Parameter: Tissue Value: Aerial
  misc_feature: MA Experiment 20000069 PARAMETER Experiment Name: At_100uM_ABA_Mutants_cDNA_P Parameter: Treatment Value: 100uM ABA vs. No Treatment
  misc_feature: MA Experiment ID: 20000071 Result: Up-regulated in Transcription
  misc_feature: MA Experiment 20000071 PARAMETER Experiment Name: At_100uM_ABA_Mutants_cDNA_P Parameter: Plant Line Value: CS8104
  misc_feature: MA Experiment 20000071 PARAMETER Experiment Name: At_100uM_ABA_Mutants_cDNA_P Parameter: Timepoint (hr) Value: 6
  misc_feature: MA Experiment 20000071 PARAMETER Experiment Name: At_100uM_ABA_Mutants_cDNA_P Parameter: Tissue Value: Aerial
  misc_feature: MA Experiment 20000071 PARAMETER Experiment Name: At_100uM_ABA_Mutants_cDNA_P Parameter: Treatment Value: 100uM ABA vs. No Treatment
  misc_feature: MA Experiment ID: 20000088 Result: Up-regulated in Transcription
  misc_feature: MA Experiment 20000088 PARAMETER Experiment Name: At_100uM_ABA_Mutants_cDNA_P Parameter: Plant Line Value: Landsberg
  misc_feature: MA Experiment 20000088 PARAMETER Experiment Name: At_100uM_ABA_Mutants_cDNA_P Parameter: Timepoint (hr) Value: 6
  misc_feature: MA Experiment 20000088 PARAMETER Experiment Name: At_100uM_ABA_Mutants_cDNA_P Parameter: Tissue Value: Aerial
  misc_feature: MA Experiment 20000088 PARAMETER Experiment Name: At_100uM_ABA_Mutants_cDNA_P Parameter: Treatment Value: 100uM ABA vs. No Treatment
  misc_feature: MA Experiment ID: 20000117 Result: Up-regulated in Transcription
  misc_feature: MA Experiment 20000117 PARAMETER Experiment Name: At_100uM_ABA_Mutants_cDNA_P Parameter: Plant Line Value: Columbia
  misc_feature: MA Experiment 20000117 PARAMETER Experiment Name: At_100uM_ABA_Mutants_cDNA_P Parameter: Timepoint (hr) Value: 6
  misc_feature: MA Experiment 20000117 PARAMETER Experiment Name: At_100uM_ABA_Mutants_cDNA_P Parameter: Tissue Value: Aerial
  misc_feature: MA Experiment 20000117 PARAMETER Experiment Name: At_100uM_ABA_Mutants_cDNA_P Parameter: Treatment Value: 100uM ABA vs. No Treatment
  misc_feature: MA Experiment ID: 20000185 Result: Down-regulated in Transcription
  misc_feature: MA Experiment 20000185 PARAMETER Experiment Name: At_Roots__P Parameter: Age (day) Value: 7 vs. 21
  misc_feature: MA Experiment 20000185 PARAMETER Experiment Name: At_Roots__P Parameter: Organism Value: A. thaliana
  misc_feature: MA Experiment 20000185 PARAMETER Experiment Name: At_Roots__P Parameter: Tissue Value: Roots vs. Whole Plant
  misc_feature: MA Experiment ID: 20000227 Result: Up-regulated in Transcription
  misc_feature: MA Experiment 20000227 PARAMETER Experiment Name: At_Root-Tips-vs-Tops_P Parameter: Tissue Value: Root Tips vs. Root Tops
  misc_feature: MA Experiment ID: 20000264 Result: Up-regulated in Transcription
  misc_feature: MA Experiment 20000264 PARAMETER Experiment Name: At_Open_Flower_P Parameter: Age (day) Value: 21
  misc_feature: MA Experiment 20000264 PARAMETER Experiment Name: At_Open_Flower_P Parameter: Plant Line Value: WS
  misc_feature: MA Experiment 20000264 PARAMETER Experiment Name: At_Open_Flower_P Parameter: Tissue Value: Open Flower vs. Whole Plant
  misc_feature: MA Experiment ID: 20000286 Result: Up-regulated in Transcription
  misc_feature: MA Experiment 20000286 PARAMETER Experiment Name: At_Open_Flower_P Parameter: Age (day) Value: 21
  misc_feature: MA Experiment 20000286 PARAMETER Experiment Name: At_Open_Flower_P Parameter: Plant Line Value: WS
  misc_feature: MA Experiment 20000286 PARAMETER Experiment Name: At_Open_Flower_P Parameter: Tissue Value: Half Open vs. Whole Plant
  misc_feature: MA Experiment ID: 20000438 Result: Down-regulated in Transcription
  misc_feature: MA Experiment 20000438 PARAMETER Experiment Name: At_Shoots__P Parameter: Age (day) Value: 14
  misc_feature: MA Experiment 20000438 PARAMETER Experiment Name: At_Shoots__P Parameter: Tissue Value: Shoots vs. Whole Plant
  misc_feature: MA Experiment ID: 20000439 Result: Down-regulated in Transcription
  misc_feature: MA Experiment 20000439 PARAMETER Experiment Name: At_Roots__P Parameter: Age (day) Value: 14 vs. 21
  misc_feature: MA Experiment 20000439 PARAMETER Experiment Name: At_Roots__P Parameter: Organism Value: A. thaliana
  misc_feature: MA Experiment 20000439 PARAMETER Experiment Name: At_Roots__P Parameter: Tissue Value: Roots vs. Whole Plant
  misc_feature: MA Experiment ID: 20000794 Result: Up-regulated in Transcription
  misc_feature: MA Experiment 20000794 PARAMETER Experiment Name: At_Petals_P Parameter: Age (day) Value: 23-25 days
  misc_feature: MA Experiment 20000794 PARAMETER Experiment Name: At_Petals_P Parameter: Plant Line Value: WS
  misc_feature: MA Experiment 20000794 PARAMETER Experiment Name: At_Petals_P Parameter: Tissue Value: Petals vs. Whole plant
  misc_feature: MA Experiment ID: 20001554 Result: Up-regulated in Transcription
  misc_feature: MA Experiment 20001554 PARAMETER Experiment Name: At_Drought_Soil_Dry_P Parameter: Age (day) Value: 21
  misc_feature: MA Experiment 20001554 PARAMETER Experiment Name: At_Drought_Soil_Dry_P Parameter: Organism Value: A. thaliana
  misc_feature: MA Experiment 20001554 PARAMETER Experiment Name: At_Drought_Soil_Dry_P Parameter: Plant Line Value: WS
  misc_feature: MA Experiment 20001554 PARAMETER Experiment Name: At_Drought_Soil_Dry_P Parameter: Post Timepoint (hr) Value: None
  misc_feature: MA Experiment 20001554 PARAMETER Experiment Name: At_Drought_Soil_Dry_P Parameter: Post-Treatment Value: None
  misc_feature: MA Experiment 20001554 PARAMETER Experiment Name: At_Drought_Soil_Dry_P Parameter: Timepoint (day) Value: 7
  misc_feature: MA Experiment 20001554 PARAMETER Experiment Name: At_Drought_Soil_Dry_P Parameter: Treatment Value: Drought vs. No Drought
  misc_feature: MA Experiment ID: 20001757 Result: Down-regulated in Transcription
  misc_feature: MA Experiment 20001757 PARAMETER Experiment Name: At_50mM_NH4NO3_L-to-H_P Parameter: Timepoint (hr) Value: 6
  misc_feature: MA Experiment 20001757 PARAMETER Experiment Name: At_50mM_NH4NO3_L-to-H_P Parameter: Tissue Value: Leaf
  misc_feature: MA Experiment 20001757 PARAMETER Experiment Name: At_50mM_NH4NO3_L-to-H_P Parameter: Treatment Value: 50mM NH4NO3 vs 100mM Mannitol
  misc_feature: Phenotype: HYPOCOTYL Length-Long
  misc_feature: Phenotype: HYPOCOTYL Length-Long
  misc_feature: Phenotype: WHOLE PLANT Size-Small
  misc_feature: Phenotype: HYPOCOTYL Length-Long
  misc_feature: Phenotype: WHOLE PLANT Size-Small
  misc_feature: Phenotype: WHOLE PLANT Size-Small
  misc_feature: Phenotype: HYPOCOTYL Length-Long
  misc_feature: Phenotype: WHOLE PLANT Size-Small
  misc_feature: Phenotype: WHOLE PLANT Size-Small
  misc_feature: Phenotype: HYPOCOTYL Length-Long
  misc_feature: Phenotype: WHOLE PLANT Size-Small
  misc_feature: Phenotype: WHOLE PLANT Size-Small
  misc_feature: Phenotype: FERTILITY Fertility-Reduced
aacaagaacacagtaacgcaatcacagactccacagtccaaggagttttgcatactcaccaagccacaatcatttctctcttctctatctctctggttttgaatcggcgacgactgagtcaactcggtgttgttactggtttcgtcgtatgtgttgtaactgattaagttgatggatccgagtgggatgatgaacgaaggaggaccgtttaatctagcggagatctggcagtttccgttgaacggagtttcaaccgccggagattcttctagaagaagcttcgttggaccgaatcagttcggtgatgctgatctaaccacagctgctaacggtgatccagcgcgtatgagtcacgcgttgtctcaggcggttattgaaggtatctccggcgcttggaaacggagggaagatgagtctaagtcggcgaagatcgtctccaccattggcgctagtgaaggtgagaacaaaagacagaagatagatgaagtgtgtgatgggaaagcagaagcagaatcgctaggaacagagacggaacaaaagaagcaacagatggaaccaacgaaagattatattcatgttcgagctagaagaggtcaagctactgatagtcacagtttagctgaaagagcgagaagagagaaaataagtgagcggatgaaaatcttgcaagatcttgttccgggatgtaacaaggttattggaaaagcacttgttctagatgagataattaactatatacaatcattgcaacgtcaagttgagttcttatcgatgaagcttgaagcagtcaactcaagaatgaaccctggtatcgaggtttttccacccaaagagtttggtcagcaagcgtttgaaaatccggagatacagttcgggtcgcagtctacgagggaatacagtagaggagcatcaccagagtggttgcacatgcagataggatcaggtggtttcgaaagaacgtcttgataaagaaacaacacttggtcatcatcttactacaaataagatctaaaagctctaatatcccgagaagaaaaagcatacatacatataaatctcattctcattataggtttaaatatatggatgtgaatatacacatcatattgttgttctgaagaaagcaaaatagaaaagaagatatagttagtttcgacatcaagaaaaaacaagctgggaagggtttaaagtagaagaaacctcttgtaaaagaaaaaacgtttgttgttataaaattgtatctcattctt

SEQ ID NO: 35683 - protein, 264 aa, Arabidopsis thaliana
  peptide (1)..(264): Ceres Seq. ID no. 13490631
  misc_feature (143)..(193): Pfam Name: Helix-loop-helix DNA-binding domain Pfam Description: Helix-loop-helix DNA-binding domain
  misc_feature (93)..(238): Homolog of NCBI NO: 15239013 NR Description: bHLH protein family [Arabidopsis thaliana]
  misc_feature (13)..(264): Homolog of NCBI NO: 15241896 NR Description: bHLH protein family [Arabidopsis thaliana]
  misc_feature (12)..(264): Homolog of NCBI NO: 29150361 NR Description: hypothetical protein [Oryza sativa (japonica
  misc_feature (1)..(264): Homolog of NCBI NO: 33339703 NR Description: MYC1 [Catharanthus roseus]
  misc_feature (1)..(247): Homolog of NCBI NO: 30696324 NR Description: bHLH protein [Arabidopsis thaliana]
  misc_feature (1)..(247): Homolog of NCBI NO: 25453562 NR Description: helix-loop-helix protein homolog
  misc_feature (222)..(264): Homolog of NCBI NO: 25404871 NR Description: protein T30E16.21 [imported] - Arabidopsis
  misc_feature (7)..(247): Homolog of NCBI NO: 25404871 NR Description: protein T30E16.21 [imported] - Arabidopsis
  misc_feature (1)..(264): Homolog of NCBI NO: 21592490 NR Description: unknown [Arabidopsis thaliana]
  misc_feature (1)..(264): Homolog of NCBI NO: 18406408 NR Description: bHLH protein [Arabidopsis thaliana]
MDPSGMMNEGGPFNLAEIWQFPLNGVSTAGDSSRRSFVGPNQFGDADLTTAANGDPARMSHALSQAVIEGISGAWKRREDESKSAKIVSTIGASEGENKRQKIDEVCDGKAEAESLGTETEQKKQQMEPTKDYIHVRARRGQATDSHSLAERARREKISERMKILQDLVPGCNKVIGKALVLDEIINYIQSLQRQVEFLSMKLEAVNSRMNPGIEVFPPKEFGQQAFENPEIQFGSQSTREYSRGASPEWLHMQIGSGGFERTS

SEQ ID NO: 35684 - protein, 259 aa, Arabidopsis thaliana
  peptide (1)..(259): Ceres Seq. ID no. 13490632
  misc_feature (138)..(188): Pfam Name: Helix-loop-helix DNA-binding domain Pfam Description: Helix-loop-helix DNA-binding domain
  misc_feature (88)..(233): Homolog of NCBI NO: 15239013 NR Description: bHLH protein family [Arabidopsis thaliana]
  misc_feature (8)..(259): Homolog of NCBI NO: 15241896 NR Description: bHLH protein family [Arabidopsis thaliana]
  misc_feature (7)..(259): Homolog of NCBI NO: 29150361 NR Description: hypothetical protein [Oryza sativa (japonica
  misc_feature (1)..(259): Homolog of NCBI NO: 33339703 NR Description: MYC1 [Catharanthus roseus]
  misc_feature (1)..(242): Homolog of NCBI NO: 30696324 NR Description: bHLH protein [Arabidopsis thaliana]
  misc_feature (1)..(242): Homolog of NCBI NO: 25453562 NR Description: helix-loop-helix protein homolog
  misc_feature (217)..(259): Homolog of NCBI NO: 25404871 NR Description: protein T30E16.21 [imported] - Arabidopsis
  misc_feature (2)..(242): Homolog of NCBI NO: 25404871 NR Description: protein T30E16.21 [imported] - Arabidopsis
  misc_feature (1)..(259): Homolog of NCBI NO: 21592490 NR Description: unknown [Arabidopsis thaliana]
  misc_feature (1)..(259): Homolog of NCBI NO: 18406408 NR Description: bHLH protein [Arabidopsis thaliana]
MMNEGGPFNLAEIWQFPLNGVSTAGDSSRRSFVGPNQFGDADLTTAANGDPARMSHALSQAVIEGISGAWKRREDESKSAKIVSTIGASEGENKRQKIDEVCDGKAEAESLGTETEQKKQQMEPTKDYIHVRARRGQATDSHSLAERARREKISERMKILQDLVPGCNKVIGKALVLDEIINYIQSLQRQVEFLSMKLEAVNSRMNPGIEVFPPKEFGQQAFENPEIQFGSQSTREYSRGASPEWLHMQIGSGGFERTS

SEQ ID NO: 35685 - protein, 258 aa, Arabidopsis thaliana
  peptide (1)..(258): Ceres Seq. ID no. 13490633
  misc_feature (137)..(187): Pfam Name: Helix-loop-helix DNA-binding domain Pfam Description: Helix-loop-helix DNA-binding domain
  misc_feature (87)..(232): Homolog of NCBI NO: 15239013 NR Description: bHLH protein family [Arabidopsis thaliana]
  misc_feature (7)..(258): Homolog of NCBI NO: 15241896 NR Description: bHLH protein family [Arabidopsis thaliana]
  misc_feature (6)..(258): Homolog of NCBI NO: 29150361 NR Description: hypothetical protein [Oryza sativa (japonica
  misc_feature (1)..(258): Homolog of NCBI NO: 33339703 NR Description: MYC1 [Catharanthus roseus]
  misc_feature (1)..(241): Homolog of NCBI NO: 30696324 NR Description: bHLH protein [Arabidopsis thaliana]
  misc_feature (1)..(241): Homolog of NCBI NO: 25453562 NR Description: helix-loop-helix protein homolog
  misc_feature (216)..(258): Homolog of NCBI NO: 25404871 NR Description: protein T30E16.21 [imported] - Arabidopsis
  misc_feature (1)..(241): Homolog of NCBI NO: 25404871 NR Description: protein T30E16.21 [imported] - Arabidopsis
  misc_feature (1)..(258): Homolog of NCBI NO: 21592490 NR Description: unknown [Arabidopsis thaliana]
  misc_feature (1)..(258): Homolog of NCBI NO: 18406408 NR Description: bHLH protein [Arabidopsis thaliana]
MNEGGPFNLAEIWQFPLNGVSTAGDSSRRSFVGPNQFGDADLTTAANGDPARMSHALSQAVIEGISGAWKRREDESKSAKIVSTIGASEGENKRQKIDEVCDGKAEAESLGTETEQKKQQMEPTKDYIHVRARRGQATDSHSLAERARREKISERMKILQDLVPGCNKVIGKALVLDEIINYIQSLQRQVEFLSMKLEAVNSRMNPGIEVFPPKEFGQQAFENPEIQFGSQSTREYSRGASPEWLHMQIGSGGFERTS

SEQ ID NO: 35686 - DNA, 1090 bp, Arabidopsis thaliana
  misc_feature (1)..(1090): Ceres Seq. ID no. 13490166
  misc_feature: MA Experiment ID: 108434 Result: Up-regulated in Transcription
  misc_feature: MA Experiment 108434 PARAMETER Experiment Name: At_Root_Tips_cDNA_P Parameter: Tissue Value: Root Tips
  misc_feature: MA Experiment ID: 108462 Result: Up-regulated in Transcription
  misc_feature: MA Experiment 108462 PARAMETER Experiment Name: At_Germinating_Seeds_cDNA_P Parameter: Age (day) Value: 2 vs. 0
  misc_feature: MA Experiment 108462 PARAMETER Experiment Name: At_Germinating_Seeds_cDNA_P Parameter: Tissue Value: Germinating Seeds
  misc_feature: MA Experiment ID: 108463 Result: Up-regulated in Transcription
  misc_feature: MA Experiment 108463 PARAMETER Experiment Name: At_Germinating_Seeds_cDNA_P Parameter: Age (day) Value: 3 vs. 0
  misc_feature: MA Experiment 108463 PARAMETER Experiment Name: At_Germinating_Seeds_cDNA_P Parameter: Tissue Value: Germinating Seeds
  misc_feature: MA Experiment ID: 108464 Result: Up-regulated in Transcription
  misc_feature: MA Experiment 108464 PARAMETER Experiment Name: At_Germinating_Seeds_cDNA_P Parameter: Age (day) Value: 4 vs. 0
  misc_feature: MA Experiment 108464 PARAMETER Experiment Name: At_Germinating_Seeds_cDNA_P Parameter: Tissue Value: Germinating Seeds
  misc_feature: MA Experiment ID: 108488 Result: Down-regulated in Transcription
  misc_feature: MA Experiment ID: 108572 Result: Down-regulated in Transcription
  misc_feature: MA Experiment 108572 PARAMETER Experiment Name: At_Drought_cDNA_P Parameter: Timepoint (hr) Value: 1
  misc_feature: MA Experiment 108572 PARAMETER Experiment Name: At_Drought_cDNA_P Parameter: Tissue Value: Aerial
  misc_feature: MA Experiment 108572 PARAMETER Experiment Name: At_Drought_cDNA_P Parameter: Treatment Value: Drought vs. No Drought
  misc_feature: MA Experiment ID: 108576 Result: Down-regulated in Transcription
  misc_feature: MA Experiment 108576 PARAMETER Experiment Name: At_42deg_Heat_cDNA_P Parameter: Temperature (deg C) Value: 42 vs. 22
  misc_feature: MA Experiment 108576 PARAMETER Experiment Name: At_42deg_Heat_cDNA_P Parameter: Timepoint (hr) Value: 1
  misc_feature: MA Experiment 108576 PARAMETER Experiment Name: At_42deg_Heat_cDNA_P Parameter: Tissue Value: Aerial
  misc_feature: MA Experiment ID: 108577 Result: Down-regulated in Transcription
  misc_feature: MA Experiment 108577 PARAMETER Experiment Name: At_42deg_Heat_cDNA_P Parameter: Temperature (deg C) Value: 42 vs. 22
  misc_feature: MA Experiment 108577 PARAMETER Experiment Name: At_42deg_Heat_cDNA_P Parameter: Timepoint (hr) Value: 6
  misc_feature: MA Experiment 108577 PARAMETER Experiment Name: At_42deg_Heat_cDNA_P Parameter: Tissue Value: Aerial
  misc_feature: MA Experiment ID: 108579 Result: Down-regulated in Transcription
  misc_feature: MA Experiment 108579 PARAMETER Experiment Name: At_4deg_Cold_cDNA_P Parameter: Temperature (deg C) Value: 4 vs. 22
  misc_feature: MA Experiment 108579 PARAMETER Experiment Name: At_4deg_Cold_cDNA_P Parameter: Timepoint (hr) Value: 6
  misc_feature: MA Experiment 108579 PARAMETER Experiment Name: At_4deg_Cold_cDNA_P Parameter: Tissue Value: Aerial
  misc_feature: MA Experiment ID: 20000093 Result: Down-regulated in Transcription
  misc_feature: MA Experiment 20000093 PARAMETER Experiment Name: At_42deg_Heat_cDNA_P Parameter: Temperature (deg C) Value: 42 vs. 22
  misc_feature: MA Experiment 20000093 PARAMETER Experiment Name: At_42deg_Heat_cDNA_P Parameter: Timepoint (hr) Value: 0.5
  misc_feature: MA Experiment 20000093 PARAMETER Experiment Name: At_42deg_Heat_cDNA_P Parameter: Tissue Value: Aerial
  misc_feature: MA Experiment ID: 20000111 Result: Down-regulated in Transcription
  misc_feature: MA Experiment 20000111 PARAMETER Experiment Name: At_42deg_Heat_cDNA_P Parameter: Temperature (deg C) Value: 42 vs. 22
  misc_feature: MA Experiment 20000111 PARAMETER Experiment Name: At_42deg_Heat_cDNA_P Parameter: Timepoint (hr) Value: 6
  misc_feature: MA Experiment 20000111 PARAMETER Experiment Name: At_42deg_Heat_cDNA_P Parameter: Tissue Value: Aerial
  misc_feature: MA Experiment ID: 20000113 Result: Down-regulated in Transcription
  misc_feature: MA Experiment 20000113 PARAMETER Experiment Name: At_42deg_Heat_cDNA_P Parameter: Temperature (deg C) Value: 42 vs. 22
  misc_feature: MA Experiment 20000113 PARAMETER Experiment Name: At_42deg_Heat_cDNA_P Parameter: Timepoint (hr) Value: 8
  misc_feature: MA Experiment 20000113 PARAMETER Experiment Name: At_42deg_Heat_cDNA_P Parameter: Tissue Value: Aerial
  misc_feature: MA Experiment ID: 20000144 Result: Down-regulated in Transcription
  misc_feature: MA Experiment 20000144 PARAMETER Experiment Name: At_42deg_Heat_cDNA_P Parameter: Temperature (deg C) Value: 42 vs. 22
  misc_feature: MA Experiment 20000144 PARAMETER Experiment Name: At_42deg_Heat_cDNA_P Parameter: Timepoint (hr) Value: 1
  misc_feature: MA Experiment 20000144 PARAMETER Experiment Name: At_42deg_Heat_cDNA_P Parameter: Tissue Value: Aerial
  misc_feature: MA Experiment ID: 20000171 Result: Down-regulated in Transcription
  misc_feature: MA Experiment 20000171 PARAMETER Experiment Name: At_42deg_Heat_P Parameter: Age (day) Value: 14
  misc_feature: MA Experiment 20000171 PARAMETER Experiment Name: At_42deg_Heat_P Parameter: Organism Value: A. thaliana
  misc_feature: MA Experiment 20000171 PARAMETER Experiment Name: At_42deg_Heat_P Parameter: Plant Line Value: WS
  misc_feature: MA Experiment 20000171 PARAMETER Experiment Name: At_42deg_Heat_P Parameter: Temperature (deg C) Value: 42 vs. 22
  misc_feature: MA Experiment 20000171 PARAMETER Experiment Name: At_42deg_Heat_P Parameter: Timepoint (hr) Value: 1
  misc_feature: MA Experiment 20000171 PARAMETER Experiment Name: At_42deg_Heat_P Parameter: Tissue Value: Aerial
  misc_feature: MA Experiment ID: 20000173 Result: Down-regulated in Transcription
  misc_feature: MA Experiment 20000173 PARAMETER Experiment Name: At_42deg_Heat_P Parameter: Age (day) Value: 14
  misc_feature: MA Experiment 20000173 PARAMETER Experiment Name: At_42deg_Heat_P Parameter: Organism Value: A. thaliana
  misc_feature: MA Experiment 20000173 PARAMETER Experiment Name: At_42deg_Heat_P Parameter: Plant Line Value: WS
  misc_feature: MA Experiment 20000173 PARAMETER Experiment Name: At_42deg_Heat_P Parameter: Temperature (deg C) Value: 42 vs. 22
  misc_feature: MA Experiment 20000173 PARAMETER Experiment Name: At_42deg_Heat_P Parameter: Timepoint (hr) Value: 6
  misc_feature: MA Experiment 20000173 PARAMETER Experiment Name: At_42deg_Heat_P Parameter: Tissue Value: Aerial
  misc_feature: MA Experiment ID: 20000179 Result: Up-regulated in Transcription
  misc_feature: MA Experiment 20000179 PARAMETER Experiment Name: At_Germinating_Seeds_P Parameter: Age (hr) Value: 6 vs. 0
  misc_feature: MA Experiment 20000179 PARAMETER Experiment Name: At_Germinating_Seeds_P Parameter: Tissue Value: Germinating Seeds
  misc_feature: MA Experiment ID: 20000794 Result: Up-regulated in Transcription
  misc_feature: MA Experiment 20000794 PARAMETER Experiment Name: At_Petals_P Parameter: Age (day) Value: 23-25 days
  misc_feature: MA Experiment 20000794 PARAMETER Experiment Name: At_Petals_P Parameter: Plant Line Value: WS
  misc_feature: MA Experiment 20000794 PARAMETER Experiment Name: At_Petals_P Parameter: Tissue Value: Petals vs. Whole plant
  misc_feature: MA Experiment ID: 20001556 Result: Down-regulated in Transcription
  misc_feature: MA Experiment 20001556 PARAMETER Experiment Name: At_Drought_Soil_Dry_P Parameter: Age (day) Value: 26
  misc_feature: MA Experiment 20001556 PARAMETER Experiment Name: At_Drought_Soil_Dry_P Parameter: Organism Value: A. thaliana
  misc_feature: MA Experiment 20001556 PARAMETER Experiment Name: At_Drought_Soil_Dry_P Parameter: Plant Line Value: WS
  misc_feature: MA Experiment 20001556 PARAMETER Experiment Name: At_Drought_Soil_Dry_P Parameter: Post Timepoint (hr) Value: None
  misc_feature: MA Experiment 20001556 PARAMETER Experiment Name: At_Drought_Soil_Dry_P Parameter: Post-Treatment Value: None
  misc_feature: MA Experiment 20001556 PARAMETER Experiment Name: At_Drought_Soil_Dry_P Parameter: Timepoint (day) Value: 12
  misc_feature: MA Experiment 20001556 PARAMETER Experiment Name: At_Drought_Soil_Dry_P Parameter: Treatment Value: Drought vs. No Drought
  misc_feature: MA Experiment ID: 20001558 Result: Down-regulated in Transcription
  misc_feature: MA Experiment 20001558 PARAMETER Experiment Name: At_Drought_Soil_Dry_P Parameter: Age (day) Value: 27
  misc_feature: MA Experiment 20001558 PARAMETER Experiment Name: At_Drought_Soil_Dry_P Parameter: Organism Value: A. thaliana
  misc_feature: MA Experiment 20001558 PARAMETER Experiment Name: At_Drought_Soil_Dry_P Parameter: Plant Line Value: WS
  misc_feature: MA Experiment 20001558 PARAMETER Experiment Name: At_Drought_Soil_Dry_P Parameter: Post Timepoint (hr) Value: 6
  misc_feature: MA Experiment 20001558 PARAMETER Experiment Name: At_Drought_Soil_Dry_P Parameter: Post-Treatment Value: Re-Water vs. No Drought
  misc_feature: MA Experiment 20001558 PARAMETER Experiment Name: At_Drought_Soil_Dry_P Parameter: Timepoint (day) Value: 13
  misc_feature: MA Experiment 20001558 PARAMETER Experiment Name: At_Drought_Soil_Dry_P Parameter: Treatment Value: Drought vs. No Drought
  misc_feature: MA Experiment ID: 20001560 Result: Down-regulated in Transcription
  misc_feature: MA Experiment 20001560 PARAMETER Experiment Name: At_Drought_Soil_Dry_P Parameter: Age (day) Value: 28
  misc_feature: MA Experiment 20001560 PARAMETER Experiment Name: At_Drought_Soil_Dry_P Parameter: Organism Value: A. thaliana
  misc_feature: MA Experiment 20001560 PARAMETER Experiment Name: At_Drought_Soil_Dry_P Parameter: Plant Line Value: WS
  misc_feature: MA Experiment 20001560 PARAMETER Experiment Name: At_Drought_Soil_Dry_P Parameter: Post Timepoint (hr) Value: None
  misc_feature: MA Experiment 20001560 PARAMETER Experiment Name: At_Drought_Soil_Dry_P Parameter: Post-Treatment Value: None
  misc_feature: MA Experiment 20001560 PARAMETER Experiment Name: At_Drought_Soil_Dry_P Parameter: Timepoint (day) Value: 14
  misc_feature: MA Experiment 20001560 PARAMETER Experiment Name: At_Drought_Soil_Dry_P Parameter: Treatment Value: Drought vs. No Drought
  misc_feature: MA Experiment ID: 20001905 Result: Down-regulated in Transcription
  misc_feature: MA Experiment 20001905 PARAMETER Experiment Name: At_Drought_Reproduction_P Parameter: Age (day) Value: 40
  misc_feature: MA Experiment 20001905 PARAMETER Experiment Name: At_Drought_Reproduction_P Parameter: Organism Value: A. thaliana
  misc_feature: MA Experiment 20001905 PARAMETER Experiment Name: At_Drought_Reproduction_P Parameter: Plant Line Value: WS
  misc_feature: MA Experiment 20001905 PARAMETER Experiment Name: At_Drought_Reproduction_P Parameter: Timepoint (day) Value: 10
  misc_feature: MA Experiment 20001905 PARAMETER Experiment Name: At_Drought_Reproduction_P Parameter: Tissue Value: Rosettes
  misc_feature: MA Experiment 20001905 PARAMETER Experiment Name: At_Drought_Reproduction_P Parameter: Treatment Value: Drought vs. No Drought
  misc_feature: MA Experiment ID: 20001911 Result: Down-regulated in Transcription
  misc_feature: MA Experiment 20001911 PARAMETER Experiment Name: At_Drought_Reproduction_P Parameter: Age (day) Value: 40
  misc_feature: MA Experiment 20001911 PARAMETER Experiment Name: At_Drought_Reproduction_P Parameter: Organism Value: A. thaliana
  misc_feature: MA Experiment 20001911 PARAMETER Experiment Name: At_Drought_Reproduction_P Parameter: Plant Line Value: WS
  misc_feature: MA Experiment 20001911 PARAMETER Experiment Name: At_Drought_Reproduction_P Parameter: Timepoint (day) Value: 10
  misc_feature: MA Experiment 20001911 PARAMETER Experiment Name: At_Drought_Reproduction_P Parameter: Tissue Value: Flowers
  misc_feature: MA Experiment 20001911 PARAMETER Experiment Name: At_Drought_Reproduction_P Parameter: Treatment Value: Drought vs. No Drought
cttcacaatcctcataatcactttcgaaattacatttacgctttcttgcaatcaaattttccgatcttaagttcagaagacgatgtcagaggtggaaatagagaacgctgctacgatcgaaggaaacaccgctgcggatgcgccggtgacggatgcggccgttgagaagaagcctgcagcgaaaggacgaaagacgaagaatgttaaggaagtgaaggagaagaagactgttgctgccgctccgaagaagagaactgtttcatctcatcctacttacgaagagatgattaaggatgcgattgttacgttgaaagagagaactggatctagccaatacgcgattcagaagttcatcgaggagaagcgtaaggagcttcctccaacattcagaaagctgttgcttctcaatctgaagagactcgttgcttctgggaagcttgtgaaggtcaaagcctcgtttaaactcccatcggcgtcggctaaagcatcatcccctaaggcggcagcggagaaatctgctcctgcgaagaagaaaccggcgactgtggcggttaccaaggcgaagagaaaggtcgctgcggcttccaaggctaagaaaacaatcgccgttaaacctaagactgctgctgctaagaaagtgaccgcgaaggctaaggctaagcccgttcctcgtgccactgctgctgcaactaagaggaaagctgttgatgcgaagcccaaggctaaggctagaccagccaaggcagccaaaacggccaaggttacatctccggctaagaaagctgttgctgccacgaagaaagttgctacggtggccacaaagaagaagactccggttaagaaggttgtgaagccaaagacggttaagtctccagcaaagagggcttcttctagggttaagaagtgaagttagggtttgtaggtagaagaatggttaacgatagtttagacttgtataattcaatcatctttatgcgactttgtttgcttttcttctttcagtgttcttgttattcacagttcctttggactaccccttaaatcatatatagatttcatcaatgaagcaaactcgagtttctttgcagct

SEQ ID NO: 35687 - protein, 274 aa, Arabidopsis thaliana; identical to SEQ ID NO: 30943
  peptide (1)..(274): Ceres Seq. ID no. 13490167
  misc_feature (61)..(130): Pfam Name: linker histone H1 and H5 family Pfam Description: linker histone H1 and H5 family
  misc_feature (61)..(130): Pfam Name: linker histone H1 and H5 family Pfam Description: linker histone H1 and H5 family
  misc_feature (1)..(271): Homolog of NCBI NO: 2623960 NR Description: histone H1 [Apium graveolens]
  misc_feature (12)..(274): Homolog of NCBI NO: 13540393 NR Description: histone H1 [Pisum sativum]
  misc_feature (10)..(274): Homolog of NCBI NO: 28301619 NR Description: histone H1 [Pisum sativum]
  misc_feature (25)..(271): Homolog of NCBI NO: 6681423 NR Description: histone H1 [Nicotiana tabacum]
  misc_feature (10)..(274): Homolog of NCBI NO: 29469895 NR Description: histone H1 subtype 5 [Pisum sativum]
  misc_feature (1)..(271): Homolog of NCBI NO: 2623960 NR Description: histone H1 [Apium graveolens]
  misc_feature (10)..(274): Homolog of NCBI NO: 28301619 NR Description: histone H1 [Pisum sativum]
  misc_feature (10)..(274): Homolog of NCBI NO: 29469895 NR Description: histone H1 subtype 5 [Pisum sativum]
  misc_feature (1)..(274): Homolog of NCBI NO: 15222199 NR Description: histone H1, putative [Arabidopsis thaliana]
  misc_feature (33)..(274): Homolog of NCBI NO: 16314 NR Description: histone H1-1 [Arabidopsis thaliana]
  misc_feature (4)..(274): Homolog of NCBI NO: 15224536 NR Description: histone H1 [Arabidopsis thaliana]
  misc_feature (25)..(271): Homolog of NCBI NO: 1084419 NR Description: histone H1 - common tobacco
  misc_feature (22)..(269): Homolog of NCBI NO: 121953 NR Description: HISTONE H1
  misc_feature (25)..(271): Homolog of NCBI NO: 6681423 NR Description: histone H1 [Nicotiana tabacum]
  misc_feature (12)..(274): Homolog of NCBI NO: 13540393 NR Description: histone H1 [Pisum sativum]
  misc_feature (22)..(269): Homolog of NCBI NO: 121953 NR Description: HISTONE H1
  misc_feature (25)..(271): Homolog of NCBI NO: 1084419 NR Description: histone H1 - common tobacco
  misc_feature (4)..(274): Homolog of NCBI NO: 15224536 NR Description: histone H1 [Arabidopsis thaliana]
  misc_feature (33)..(274): Homolog of NCBI NO: 16314 NR Description: histone H1-1 [Arabidopsis thaliana]
  misc_feature (1)..(274): Homolog of NCBI NO: 15222199 NR Description: histone H1, putative [Arabidopsis thaliana]

SEQ ID NO: 35688 - protein, 207 aa, Arabidopsis thaliana; identical to SEQ ID NO: 30944
  peptide (1)..(207): Ceres Seq. ID no. 13490168
  misc_feature (1)..(63): Pfam Name: linker histone H1 and H5 family Pfam Description: linker histone H1 and H5 family
  misc_feature (1)..(63): Pfam Name: linker histone H1 and H5 family Pfam Description: linker histone H1 and H5 family
  misc_feature (1)..(204): Homolog of NCBI NO: 2623960 NR Description: histone H1 [Apium graveolens]
  misc_feature (1)..(207): Homolog of NCBI NO: 13540393 NR Description: histone H1 [Pisum sativum]
  misc_feature (1)..(207): Homolog of NCBI NO: 28301619 NR Description: histone H1 [Pisum sativum]
  misc_feature (1)..(204): Homolog of NCBI NO: 6681423 NR Description: histone H1 [Nicotiana tabacum]
  misc_feature (1)..(207): Homolog of NCBI NO: 29469895 NR Description: histone H1 subtype 5 [Pisum sativum]
  misc_feature (1)..(204): Homolog of NCBI NO: 2623960 NR Description: histone H1 [Apium graveolens]
  misc_feature (1)..(207): Homolog of NCBI NO: 28301619 NR Description: histone H1 [Pisum sativum]
  misc_feature (1)..(207): Homolog of NCBI NO: 29469895 NR Description: histone H1 subtype 5 [Pisum sativum]
  misc_feature (1)..(207): Homolog of NCBI NO: 15222199 NR Description: histone H1, putative [Arabidopsis thaliana]
  misc_feature (1)..(207): Homolog of NCBI NO: 16314 NR Description: histone H1-1 [Arabidopsis thaliana]
  misc_feature (1)..(207): Homolog of NCBI NO: 15224536 NR Description: histone H1 [Arabidopsis thaliana]
  misc_feature (1)..(204): Homolog of NCBI NO: 1084419 NR Description: histone H1 - common tobacco
  misc_feature (1)..(202): Homolog of NCBI NO: 121953 NR Description: HISTONE H1
  misc_feature (1)..(204): Homolog of NCBI NO: 6681423 NR Description: histone H1 [Nicotiana tabacum]
  misc_feature (1)..(207): Homolog of NCBI NO: 13540393 NR Description: histone H1 [Pisum sativum]
  misc_feature (1)..(202): Homolog of NCBI NO: 121953 NR Description: HISTONE H1
  misc_feature (1)..(204): Homolog of NCBI NO: 1084419 NR Description: histone H1 - common tobacco
  misc_feature (1)..(207): Homolog of NCBI NO: 15224536 NR Description: histone H1 [Arabidopsis thaliana]
  misc_feature (1)..(207): Homolog of NCBI NO: 16314 NR Description: histone H1-1 [Arabidopsis thaliana]
  misc_feature (1)..(207): Homolog of NCBI NO: 15222199 NR Description: histone H1, putative [Arabidopsis thaliana]

SEQ ID NO: 35689 - DNA, 1291 bp, Arabidopsis thaliana; identical to SEQ ID NO: 27363
  misc_feature (1)..(1291): Ceres Seq. ID no. 12337912
  misc_feature: MA Experiment ID: 108435 Result: Up-regulated in Transcription
  misc_feature: MA Experiment 108435 PARAMETER Experiment Name: At_stm_Mutants_cDNA_P Parameter: Plant Line Value: wt Landsburg vs stm
  misc_feature: MA Experiment 108435 PARAMETER Experiment Name: At_stm_Mutants_cDNA_P Parameter: Tissue Value: Shoot Apical Meristem Region
  misc_feature: MA Experiment ID: 108461 Result: Up-regulated in Transcription
  misc_feature: MA Experiment 108461 PARAMETER Experiment Name: At_Germinating_Seeds_cDNA_P Parameter: Age (day) Value: 1 vs. 0
  misc_feature: MA Experiment 108461 PARAMETER Experiment Name: At_Germinating_Seeds_cDNA_P Parameter: Tissue Value: Germinating Seeds
  misc_feature: MA Experiment ID: 108462 Result: Up-regulated in Transcription
  misc_feature: MA Experiment 108462 PARAMETER Experiment Name: At_Germinating_Seeds_cDNA_P Parameter: Age (day) Value: 2 vs. 0
  misc_feature: MA Experiment 108462 PARAMETER Experiment Name: At_Germinating_Seeds_cDNA_P Parameter: Tissue Value: Germinating Seeds
  misc_feature: MA Experiment ID: 108473 Result: Down-regulated in Transcription
  misc_feature: MA Experiment 108473 PARAMETER Experiment Name: At_Drought_Flowers_cDNA_P Parameter: Timepoint (hr) Value: 7 d
  misc_feature: MA Experiment 108473 PARAMETER Experiment Name: At_Drought_Flowers_cDNA_P Parameter: Tissue Value: Flower
  misc_feature: MA Experiment 108473 PARAMETER Experiment Name: At_Drought_Flowers_cDNA_P Parameter: Treatment Value: Drought vs. No Drought
  misc_feature: MA Experiment ID: 20000069 Result: Down-regulated in Transcription
  misc_feature: MA Experiment 20000069 PARAMETER Experiment Name: At_100uM_ABA_Mutants_cDNA_P Parameter: Plant Line Value: CS23
  misc_feature: MA Experiment 20000069 PARAMETER Experiment Name: At_100uM_ABA_Mutants_cDNA_P Parameter: Timepoint (hr) Value: 6
  misc_feature: MA Experiment 20000069 PARAMETER Experiment Name: At_100uM_ABA_Mutants_cDNA_P Parameter: Tissue Value: Aerial
  misc_feature: MA Experiment 20000069 PARAMETER Experiment Name: At_100uM_ABA_Mutants_cDNA_P Parameter: Treatment Value: 100uM ABA vs. No Treatment
  misc_feature: MA Experiment ID: 20000111 Result: Down-regulated in Transcription
  misc_feature: MA Experiment 20000111 PARAMETER Experiment Name: At_42deg_Heat_cDNA_P Parameter: Temperature (deg C) Value: 42 vs. 22
  misc_feature: MA Experiment 20000111 PARAMETER Experiment Name: At_42deg_Heat_cDNA_P Parameter: Timepoint (hr) Value: 6
  misc_feature: MA Experiment 20000111 PARAMETER Experiment Name: At_42deg_Heat_cDNA_P Parameter: Tissue Value: Aerial
  misc_feature: MA Experiment ID: 20000144 Result: Down-regulated in Transcription
  misc_feature: MA Experiment 20000144 PARAMETER Experiment Name: At_42deg_Heat_cDNA_P Parameter: Temperature (deg C) Value: 42 vs. 22
  misc_feature: MA Experiment 20000144 PARAMETER Experiment Name: At_42deg_Heat_cDNA_P Parameter: Timepoint (hr) Value: 1
  misc_feature: MA Experiment 20000144 PARAMETER Experiment Name: At_42deg_Heat_cDNA_P Parameter: Tissue Value: Aerial
  misc_feature: MA Experiment ID: 20000180 Result: Up-regulated in Transcription
  misc_feature: MA Experiment 20000180 PARAMETER Experiment Name: At_Germinating_Seeds_P Parameter: Age (hr) Value: 24 vs. 0
  misc_feature: MA Experiment 20000180 PARAMETER Experiment Name: At_Germinating_Seeds_P Parameter: Tissue Value: Germinating Seeds
  misc_feature: MA Experiment ID: 20000185 Result: Down-regulated in Transcription
  misc_feature: MA Experiment 20000185 PARAMETER Experiment Name: At_Roots__P Parameter: Age (day) Value: 7 vs. 21
  misc_feature: MA Experiment 20000185 PARAMETER Experiment Name: At_Roots__P Parameter: Organism Value: A. thaliana
  misc_feature: MA Experiment 20000185 PARAMETER Experiment Name: At_Roots__P Parameter: Tissue Value: Roots vs. Whole Plant
  misc_feature: MA Experiment ID: 20000224 Result: Up-regulated in Transcription
  misc_feature: MA Experiment ID: 20000234 Result: Up-regulated in Transcription
  misc_feature: MA Experiment 20000234 PARAMETER Experiment Name: At_Siliques_P Parameter: Age (day) Value: 21
  misc_feature: MA Experiment 20000234 PARAMETER Experiment Name: At_Siliques_P Parameter: Organism Value: A. thaliana
  misc_feature: MA Experiment 20000234 PARAMETER Experiment Name: At_Siliques_P Parameter: Plant Line Value: WS
  misc_feature: MA Experiment 20000234 PARAMETER Experiment Name: At_Siliques_P Parameter: Tissue Value: Less Than 5mm Siliques vs. Whole Plant
  misc_feature: MA Experiment ID: 20000265 Result: Up-regulated in Transcription
  misc_feature: MA Experiment 20000265 PARAMETER Experiment Name: At_Open_Flower_P Parameter: Age (day) Value: 21
  misc_feature: MA Experiment 20000265 PARAMETER Experiment Name: At_Open_Flower_P Parameter: Plant Line Value: WS
  misc_feature: MA Experiment 20000265 PARAMETER Experiment Name: At_Open_Flower_P Parameter: Tissue Value: Closed Flower vs. Whole Plant
  misc_feature: MA Experiment ID: 20000286 Result: Up-regulated in Transcription
  misc_feature: MA Experiment 20000286 PARAMETER Experiment Name: At_Open_Flower_P Parameter: Age (day) Value: 21
  misc_feature: MA Experiment 20000286 PARAMETER Experiment Name: At_Open_Flower_P Parameter: Plant Line Value: WS
  misc_feature: MA Experiment 20000286 PARAMETER Experiment Name: At_Open_Flower_P Parameter: Tissue Value: Half Open vs. Whole Plant
  misc_feature: MA Experiment ID: 20000437 Result: Down-regulated in Transcription
  misc_feature: MA Experiment 20000437 PARAMETER Experiment Name: At_Drought_P Parameter: Age (day) Value: 8
  misc_feature: MA Experiment 20000437 PARAMETER Experiment Name: At_Drought_P Parameter: Organism Value: A. thaliana
  misc_feature: MA Experiment 20000437 PARAMETER Experiment Name: At_Drought_P Parameter: Plant Line Value: WS
  misc_feature: MA Experiment 20000437 PARAMETER Experiment Name: At_Drought_P Parameter: Timepoint (hr) Value: 24
  misc_feature: MA Experiment 20000437 PARAMETER Experiment Name: At_Drought_P Parameter: Tissue Value: Whole Plant
  misc_feature: MA Experiment 20000437 PARAMETER Experiment Name: At_Drought_P Parameter: Treatment Value: Drought vs. No Drought
  misc_feature: MA Experiment ID: 20000439 Result: Down-regulated in Transcription
  misc_feature: MA Experiment 20000439 PARAMETER Experiment Name: At_Roots__P Parameter: Age (day) Value: 14 vs. 21
  misc_feature: MA Experiment 20000439 PARAMETER Experiment Name: At_Roots__P Parameter: Organism Value: A. thaliana
  misc_feature: MA Experiment 20000439 PARAMETER Experiment Name: At_Roots__P Parameter: Tissue Value: Roots vs. Whole Plant
  misc_feature: MA Experiment ID: 20000495 Result: Up-regulated in Transcription
  misc_feature: MA Experiment 20000495 PARAMETER Experiment Name: At_Guard_Cells_P Parameter: Harvest Date Value: 8/2/2002
  misc_feature: MA Experiment 20000495 PARAMETER Experiment Name: At_Guard_Cells_P Parameter: Organism Value: A. thaliana
  misc_feature: MA Experiment 20000495 PARAMETER Experiment Name: At_Guard_Cells_P Parameter: Tissue Value: Guard Cells vs. Leaves
  misc_feature: MA Experiment ID: 20001248 Result: Down-regulated in Transcription
  misc_feature: MA Experiment 20001248 PARAMETER Experiment Name: At_Far-red-induction_P Parameter: Age (day) Value: 7
  misc_feature: MA Experiment 20001248 PARAMETER Experiment Name: At_Far-red-induction_P Parameter: Light Value: Far-red vs. White
  misc_feature: MA Experiment 20001248 PARAMETER Experiment Name: At_Far-red-induction_P Parameter: Organism Value: A. thaliana
  misc_feature: MA Experiment 20001248 PARAMETER Experiment Name: At_Far-red-induction_P Parameter: Plant Line Value: Columbia
  misc_feature: MA Experiment 20001248 PARAMETER Experiment Name: At_Far-red-induction_P Parameter: Timepoint (hr) Value: 4
  misc_feature: MA Experiment 20001248 PARAMETER Experiment Name: At_Far-red-induction_P Parameter: Tissue Value: Whole Plant
  misc_feature: MA Experiment ID: 20001555 Result: Down-regulated in Transcription
  misc_feature: MA Experiment 20001555 PARAMETER Experiment Name: At_Drought_Soil_Dry_P Parameter: Age (day) Value: 24
  misc_feature: MA Experiment 20001555 PARAMETER Experiment Name: At_Drought_Soil_Dry_P Parameter: Organism Value: A. thaliana
  misc_feature: MA Experiment 20001555 PARAMETER Experiment Name: At_Drought_Soil_Dry_P Parameter: Plant Line Value: WS
  misc_feature: MA Experiment 20001555 PARAMETER Experiment Name: At_Drought_Soil_Dry_P Parameter: Post Timepoint (hr) Value: None
  misc_feature: MA Experiment 20001555 PARAMETER Experiment Name: At_Drought_Soil_Dry_P Parameter: Post-Treatment Value: None
  misc_feature: MA Experiment 20001555 PARAMETER Experiment Name: At_Drought_Soil_Dry_P Parameter: Timepoint (day) Value: 10
  misc_feature: MA Experiment 20001555 PARAMETER Experiment Name: At_Drought_Soil_Dry_P Parameter: Treatment Value: Drought vs. No Drought

SEQ ID NO: 35690 - protein, 350 aa, Arabidopsis thaliana; identical to SEQ ID NO: 27364
  peptide (1)..(350): Ceres Seq. ID no. 12337913
  misc_feature (73)..(338): Pfam Name: alpha/beta hydrolase fold Pfam Description: alpha/beta hydrolase fold
  misc_feature (73)..(338): Pfam Name: alpha/beta hydrolase fold Pfam Description: alpha/beta hydrolase fold
  misc_feature (20)..(350): Homolog of NCBI NO: 15230018 NR Description: putative epoxide hydrolase
  misc_feature (20)..(350): Homolog of NCBI NO: 15230018 NR Description: putative epoxide hydrolase

SEQ ID NO: 35691 - protein, 331 aa, Arabidopsis thaliana; identical to SEQ ID NO: 21476
  peptide (1)..(331): Ceres Seq. ID no. 12337914
  misc_feature (54)..(319): Pfam Name: alpha/beta hydrolase fold Pfam Description: alpha/beta hydrolase fold
  misc_feature (54)..(319): Pfam Name: alpha/beta hydrolase fold Pfam Description: alpha/beta hydrolase fold
  misc_feature (1)..(331): Homolog of NCBI NO: 15230018 NR Description: putative epoxide hydrolase
  misc_feature (1)..(331): Homolog of NCBI NO: 15230018 NR Description: putative epoxide hydrolase

SEQ ID NO: 35692 - protein, 324 aa, Arabidopsis thaliana; identical to SEQ ID NO: 21477
  peptide (1)..(324): Ceres Seq. ID no. 12337915
  misc_feature (47)..(312): Pfam Name: alpha/beta hydrolase fold Pfam Description: alpha/beta hydrolase fold
  misc_feature (47)..(312): Pfam Name: alpha/beta hydrolase fold Pfam Description: alpha/beta hydrolase fold
  misc_feature (1)..(324): Homolog of NCBI NO: 15230018 NR Description: putative epoxide hydrolase
  misc_feature (1)..(324): Homolog of NCBI NO: 15230018 NR Description: putative epoxide hydrolase

SEQ ID NO: 35693 - DNA, 1918 bp, Arabidopsis thaliana
  misc_feature (1)..(1918): Ceres Seq. ID no. 13487554
  misc_feature: MA Experiment ID: 108461 Result: Up-regulated in Transcription
  misc_feature: MA Experiment 108461 PARAMETER Experiment Name: At_Germinating_Seeds_cDNA_P Parameter: Age (day) Value: 1 vs. 0
  misc_feature: MA Experiment 108461 PARAMETER Experiment Name: At_Germinating_Seeds_cDNA_P Parameter: Tissue Value: Germinating Seeds
  misc_feature: MA Experiment ID: 108462 Result: Up-regulated in Transcription
  misc_feature: MA Experiment 108462 PARAMETER Experiment Name: At_Germinating_Seeds_cDNA_P Parameter: Age (day) Value: 2 vs. 0
  misc_feature: MA Experiment 108462 PARAMETER Experiment Name: At_Germinating_Seeds_cDNA_P Parameter: Tissue Value: Germinating Seeds
  misc_feature: MA Experiment ID: 108569 Result: Up-regulated in Transcription
  misc_feature: MA Experiment 108569 PARAMETER Experiment Name: At_0.001%_MeJA__cDNA_P Parameter: Timepoint (hr) Value: 6
  misc_feature: MA Experiment 108569 PARAMETER Experiment Name: At_0.001%_MeJA__cDNA_P Parameter: Tissue Value: Aerial
  misc_feature: MA Experiment 108569 PARAMETER Experiment Name: At_0.001%_MeJA__cDNA_P Parameter: Treatment Value: 0.001% MeJA vs. No Treatment
  misc_feature: MA Experiment ID: 108572 Result: Down-regulated in Transcription
  misc_feature: MA Experiment 108572 PARAMETER Experiment Name: At_Drought_cDNA_P Parameter: Timepoint (hr) Value: 1
  misc_feature: MA Experiment 108572 PARAMETER Experiment Name: At_Drought_cDNA_P Parameter: Tissue Value: Aerial
  misc_feature: MA Experiment 108572 PARAMETER Experiment Name: At_Drought_cDNA_P Parameter: Treatment Value: Drought vs. No Drought
  misc_feature: MA Experiment ID: 108579 Result: Up-regulated in Transcription
  misc_feature: MA Experiment 108579 PARAMETER Experiment Name: At_4deg_Cold_cDNA_P Parameter: Temperature (deg C) Value: 4 vs. 22
  misc_feature: MA Experiment 108579 PARAMETER Experiment Name: At_4deg_Cold_cDNA_P Parameter: Timepoint (hr) Value: 6
  misc_feature: MA Experiment 108579 PARAMETER Experiment Name: At_4deg_Cold_cDNA_P Parameter: Tissue Value: Aerial
  misc_feature: MA Experiment ID: 20001451 Result: Down-regulated in Transcription
  misc_feature: MA Experiment 20001451 PARAMETER Experiment Name: At_Far-red-induction_P Parameter: Age (day) Value: 7
  misc_feature: MA Experiment 20001451 PARAMETER Experiment Name: At_Far-red-induction_P Parameter: Light Value: Far-red vs. White
  misc_feature: MA Experiment 20001451 PARAMETER Experiment Name: At_Far-red-induction_P Parameter: Organism Value: A. thaliana
  misc_feature: MA Experiment 20001451 PARAMETER Experiment Name: At_Far-red-induction_P Parameter: Plant Line Value: Columbia
  misc_feature: MA Experiment 20001451 PARAMETER Experiment Name: At_Far-red-induction_P Parameter: Timepoint (hr) Value: 24
  misc_feature: MA Experiment 20001451 PARAMETER Experiment Name: At_Far-red-induction_P Parameter: Tissue Value: Whole Plant
acactgtgagattcaagtgtaaagtgctctctccccaatggctaatcaccaccgacttttacgcggcggcggatctccggccataatcggtggcagaatcacactcacagctttcgcttccactatcgcactcttcctcttcactctctccttcttcttcgcttcagattctaacgattctcctgatctccttcttcccggtgttgagtactctaatggagtcggatctagaagatccatgttggatatcaaatcggatccgcttaagccacggttgattcagatccggaaacaagctgatgatcatcggtcattagcattagcttatgcttcttacgcgagaaagcttaagctcgagaattcgaaactcgtcaggatcttcgctgatctttcgaggaattacacggatctgattaacaaaccgacgtatcgagctttgtatgattctgatggagcctcgattgaagaatctgtgcttaggcaatttgagaaagaagttaaggaacggattaaaatgactcgtcaagtgattgctgaagctaaagagtcttttgataatcagttgaagattcagaagctgaaagatacgattttcgctgttaacgaacagttaactaatgctaagaagcaaggtgcgttttcgagtttgatcgctgcgaaatcgattccgaaaggattgcattgtcttgctatgaggctgatggaagagaggattgctcaccctgagaagtatactgatgaagggaaagatagaccgcgggagctcgaggatccgaatctttaccattacgctatattttcggataatgtgattgcggcttcggtggttgtgaactctgctgtgaagaatgctaaggagccgtggaagcatgtttttcacgttgtgactgataagatgaatcttggagctatgcaggttatgtttaaactgaaggagtataaaggagctcatgtagaagttaaagctgttgaggattatacgtttttgaactcttcgtatgtgcctgtgttgaagcagttagaatctgcgaatcttcagaagttttatttcgagaataagctcgagaatgcgacgaaagataccacgaatatgaagttcaggaaccccaagtatttatctatattgaatcacttgaggttttatttacccgagatgtacccgaaactacataggatactgtttttggacgatgatgtggttgtgcagaaggatttaacgggtctgtgggagattgatatggatgggaaagtgaatggagctgtagagacttgttttgggtcgtttcatcggtacgctcaatacatgaatttctcacatcctttgatcaaagagaagtttaatcccaaagcatgtgcgtgggcgtatggaatgaacttctttgatcttgatgcttggagaagagagaagtgcacagaagaatatcactactggcaaaatctgaacgagaacagggctctatggaaactggggacgttaccaccgggactgatcaccttttactcaaccacaaagccgctggacaaatcatggcatgtgcttgggctgggttacaatccgagcattagcatggatgagatccgcaacgctgcagtggtacacttcaacggtaacatgaagccatggcttgacatagctatgaaccagtttcgaccactttggaccaaacacgtcgactatgacctcgagtttgttcaggcttgcaattttggcctctgaactatgaaaattttctttatcatcaaaatctgaaagcatatgttgtttgttacttcagctctacgaagttttaaccttagtttttgtttgtgtttatttatatatttttgggggtttagtagaacacttgtattttgttcatagctatctttgttctatggcaacctataatcaaagcttaattataaagtcacattatgc

SEQ ID NO: 35694 - protein, 559 aa, Arabidopsis thaliana
  peptide (1)..(559): Ceres Seq. ID no. 13487555
  misc_feature (149)..(555): Homolog of NCBI NO: 37533460 NR Description: hypothetical protein [Oryza sativa (japonica
  misc_feature (56)..(556): Homolog of NCBI NO: 30691875 NR Description: glycosyltransferase family 8 [Arabidopsis
  misc_feature (56)..(556): Homolog of NCBI NO: 7485958 NR Description: hypothetical protein F22I13.40 - Arabidopsis
  misc_feature (152)..(556): Homolog of NCBI NO: 38423965 NR Description: putative glycosyltransferase
  misc_feature (152)..(556): Homolog of NCBI NO: 18422837 NR Description: glycosyltransferase family 8 [Arabidopsis
  misc_feature (152)..(556): Homolog of NCBI NO: 10177914 NR Description: emb|CAB71043.1~gene_id:MCA23.10~strong similarity
  misc_feature (97)..(555): Homolog of NCBI NO: 7271113 NR Description: 68 kDa protein [Cicer arietinum]
  misc_feature (111)..(556): Homolog of NCBI NO: 15233046 NR Description: glycosyltransferase family 8 [Arabidopsis
  misc_feature (9)..(559): Homolog of NCBI NO: 18396159 NR Description: glycosyltransferase family 8 [Arabidopsis
  misc_feature (1)..(559): Homolog of NCBI NO: 15230806 NR Description: glycosyltransferase family 8 [Arabidopsis
MANHHRLLRGGGSPAIIGGRITLTAFASTIALFLFTLSFFFASDSNDSPDLLLPGVEYSNGVGSRRSMLDIKSDPLKPRLIQIRKQADDHRSLALAYASYARKLKLENSKLVRIFADLSRNYTDLINKPTYRALYDSDGASIEESVLRQFEKEVKERIKMTRQVIAEAKESFDNQLKIQKLKDTIFAVNEQLTNAKKQGAFSSLIAAKSIPKGLHCLAMRLMEERIAHPEKYTDEGKDRPRELEDPNLYHYAIFSDNVIAASVVVNSAVKNAKEPWKHVFHVVTDKMNLGAMQVMFKLKEYKGAHVEVKAVEDYTFLNSSYVPVLKQLESANLQKFYFENKLENATKDTTNMKFRNPKYLSILNHLRFYLPEMYPKLHRILFLDDDVVVQKDLTGLWEIDMDGKVNGAVETCFGSFHRYAQYMNFSHPLIKEKFNPKACAWAYGMNFFDLDAWRREKCTEEYHYWQNLNENRALWKLGTLPPGLITFYSTTKPLDKSWHVLGLGYNPSISMDEIRNAAVVHFNGNMKPWLDIAMNQFRPLWTKHVDYDLEFVQACNFGL

SEQ ID NO: 35695 - protein, 492 aa, Arabidopsis thaliana
  peptide (1)..(492): Ceres Seq. ID no. 13487556
  misc_feature (82)..(488): Homolog of NCBI NO: 37533460 NR Description: hypothetical protein [Oryza sativa (japonica
  misc_feature (1)..(489): Homolog of NCBI NO: 30691875 NR Description: glycosyltransferase family 8 [Arabidopsis
  misc_feature (1)..(489): Homolog of NCBI NO: 7485958 NR Description: hypothetical protein F22I13.40 - Arabidopsis
  misc_feature (85)..(489): Homolog of NCBI NO: 38423965 NR Description: putative glycosyltransferase
  misc_feature (85)..(489): Homolog of NCBI NO: 18422837 NR Description: glycosyltransferase family 8 [Arabidopsis
  misc_feature (85)..(489): Homolog of NCBI NO: 10177914 NR Description: emb|CAB71043.1~gene_id:MCA23.10~strong similarity
  misc_feature (30)..(488): Homolog of NCBI NO: 7271113 NR Description: 68 kDa protein [Cicer arietinum]
  misc_feature (44)..(489): Homolog of NCBI NO: 15233046 NR Description: glycosyltransferase family 8 [Arabidopsis
  misc_feature (1)..(492): Homolog of NCBI NO: 18396159 NR Description: glycosyltransferase family 8 [Arabidopsis
  misc_feature (1)..(492): Homolog of NCBI NO: 15230806 NR Description: glycosyltransferase family 8 [Arabidopsis
MLDIKSDPLKPRLIQIRKQADDHRSLALAYASYARKLKLENSKLVRIFADLSRNYTDLINKPTYRALYDSDGASIEESVLRQFEKEVKERIKMTRQVIAEAKESFDNQLKIQKLKDTIFAVNEQLTNAKKQGAFSSLIAAKSIPKGLHCLAMRLMEERIAHPEKYTDEGKDRPRELEDPNLYHYAIFSDNVIAASVVVNSAVKNAKEPWKHVFHVVTDKMNLGAMQVMFKLKEYKGAHVEVKAVEDYTFLNSSYVPVLKQLESANLQKFYFENKLENATKDTTNMKFRNPKYLSILNHLRFYLPEMYPKLHRILFLDDDVVVQKDLTGLWEIDMDGKVNGAVETCFGSFHRYAQYMNFSHPLIKEKFNPKACAWAYGMNFFDLDAWRREKCTEEYHYWQNLNENRALWKLGTLPPGLITFYSTTKPLDKSWHVLGLGYNPSISMDEIRNAAVVHFNGNMKPWLDIAMNQFRPLWTKHVDYDLEFVQACNFGL

SEQ ID NO: 35696 - protein, 400 aa, Arabidopsis thaliana
  peptide (1)..(400): Ceres Seq. ID no. 13487557
  misc_feature (1)..(396): Homolog of NCBI NO: 37533460 NR Description: hypothetical protein [Oryza sativa (japonica
  misc_feature (1)..(397): Homolog of NCBI NO: 30691875 NR Description: glycosyltransferase family 8 [Arabidopsis
  misc_feature (1)..(397): Homolog of NCBI NO: 7485958 NR Description: hypothetical protein F22I13.40 - Arabidopsis
  misc_feature (1)..(397): Homolog of NCBI NO: 38423965 NR Description: putative glycosyltransferase
  misc_feature (1)..(397): Homolog of NCBI NO: 18422837 NR Description: glycosyltransferase family 8 [Arabidopsis
  misc_feature (1)..(397): Homolog of NCBI NO: 10177914 NR Description: emb|CAB71043.1~gene_id:MCA23.10~strong similarity
  misc_feature (1)..(396): Homolog of NCBI NO: 7271113 NR Description: 68 kDa protein [Cicer arietinum]
  misc_feature (1)..(397): Homolog of NCBI NO: 15233046 NR Description: glycosyltransferase family 8 [Arabidopsis
  misc_feature (1)..(400): Homolog of NCBI NO: 18396159 NR Description: glycosyltransferase family 8 [Arabidopsis
  misc_feature (1)..(400): Homolog of NCBI NO: 15230806 NR Description: glycosyltransferase family 8 [Arabidopsis
MTRQVIAEAKESFDNQLKIQKLKDTIFAVNEQLTNAKKQGAFSSLIAAKSIPKGLHCLAMRLMEERIAHPEKYTDEGKDRPRELEDPNLYHYAIFSDNVIAASVVVNSAVKNAKEPWKHVFHVVTDKMNLGAMQVMFKLKEYKGAHVEVKAVEDYTFLNSSYVPVLKQLESANLQKFYFENKLENATKDTTNMKFRNPKYLSILNHLRFYLPEMYPKLHRILFLDDDVVVQKDLTGLWEIDMDGKVNGAVETCFGSFHRYAQYMNFSHPLIKEKFNPKACAWAYGMNFFDLDAWRREKCTEEYHYWQNLNENRALWKLGTLPPGLITFYSTTKPLDKSWHVLGLGYNPSISMDEIRNAAVVHFNGNMKPWLDIAMNQFRPLWTKHVDYDLEFVQACNFGL

SEQ ID NO: 35697 - DNA, 1525 bp, Arabidopsis thaliana
  misc_feature (1)..(1525): Ceres Seq. ID no. 12481850
  misc_feature: MA Experiment ID: 108434 Result: Down-regulated in Transcription
  misc_feature: MA Experiment 108434 PARAMETER Experiment Name: At_Root_Tips_cDNA_P Parameter: Tissue Value: Root Tips
  misc_feature: MA Experiment ID: 108435 Result: Down-regulated in Transcription
  misc_feature: MA Experiment 108435 PARAMETER Experiment Name: At_stm_Mutants_cDNA_P Parameter: Plant Line Value: wt Landsburg vs stm
  misc_feature: MA Experiment 108435 PARAMETER Experiment Name: At_stm_Mutants_cDNA_P Parameter: Tissue Value: Shoot Apical Meristem Region
  misc_feature: MA Experiment ID: 108572 Result: Up-regulated in Transcription
  misc_feature: MA Experiment 108572 PARAMETER Experiment Name: At_Drought_cDNA_P Parameter: Timepoint (hr) Value: 1
  misc_feature: MA Experiment 108572 PARAMETER Experiment Name: At_Drought_cDNA_P Parameter: Tissue Value: Aerial
  misc_feature: MA Experiment 108572 PARAMETER Experiment Name: At_Drought_cDNA_P Parameter: Treatment Value: Drought vs. No Drought
  misc_feature: MA Experiment ID: 108577 Result: Down-regulated in Transcription
  misc_feature: MA Experiment 108577 PARAMETER Experiment Name: At_42deg_Heat_cDNA_P Parameter: Temperature (deg C) Value: 42 vs. 22
  misc_feature: MA Experiment 108577 PARAMETER Experiment Name: At_42deg_Heat_cDNA_P Parameter: Timepoint (hr) Value: 6
  misc_feature: MA Experiment 108577 PARAMETER Experiment Name: At_42deg_Heat_cDNA_P Parameter: Tissue Value: Aerial
  misc_feature: MA Experiment ID: 108579 Result: Down-regulated in Transcription
  misc_feature: MA Experiment 108579 PARAMETER Experiment Name: At_4deg_Cold_cDNA_P Parameter: Temperature (deg C) Value: 4 vs. 22
  misc_feature: MA Experiment 108579 PARAMETER Experiment Name: At_4deg_Cold_cDNA_P Parameter: Timepoint (hr) Value: 6
  misc_feature: MA Experiment 108579 PARAMETER Experiment Name: At_4deg_Cold_cDNA_P Parameter: Tissue Value: Aerial
  misc_feature: MA Experiment ID: 108585 Result: Down-regulated in Transcription
  misc_feature: MA Experiment 108585 PARAMETER Experiment Name: At_5mM_NaNP_cDNA_P Parameter: Timepoint (hr) Value: 6
  misc_feature: MA Experiment 108585 PARAMETER Experiment Name: At_5mM_NaNP_cDNA_P Parameter: Tissue Value: Aerial
  misc_feature: MA Experiment 108585 PARAMETER Experiment Name: At_5mM_NaNP_cDNA_P Parameter: Treatment Value: null
  misc_feature: MA Experiment ID: 108595 Result: Down-regulated in Transcription
  misc_feature: MA Experiment 108595 PARAMETER Experiment Name: At_Ler-pi_Ovule_cDNA_P Parameter: Plant Line Value: null
  misc_feature: MA Experiment ID: 108668 Result: Down-regulated in Transcription
  misc_feature: MA Experiment 108668 PARAMETER Experiment Name: At_2mM_SA_cDNA_P Parameter: Plant Line Value: WS
  misc_feature: MA Experiment 108668 PARAMETER Experiment Name: At_2mM_SA_cDNA_P Parameter: Timepoint (hr) Value: 6
  misc_feature: MA Experiment 108668 PARAMETER Experiment Name: At_2mM_SA_cDNA_P Parameter: Treatment Value: 2mM SA vs. No Treatment
  misc_feature: MA Experiment ID: 20000069 Result: Up-regulated in Transcription
  misc_feature: MA Experiment 20000069 PARAMETER Experiment Name: At_100uM_ABA_Mutants_cDNA_P Parameter: Plant Line Value: CS23
  misc_feature: MA Experiment 20000069 PARAMETER Experiment Name: At_100uM_ABA_Mutants_cDNA_P Parameter: Timepoint (hr) Value: 6
  misc_feature: MA Experiment 20000069 PARAMETER Experiment Name: At_100uM_ABA_Mutants_cDNA_P Parameter: Tissue Value: Aerial
  misc_feature: MA Experiment 20000069 PARAMETER Experiment Name: At_100uM_ABA_Mutants_cDNA_P Parameter: Treatment Value: 100uM ABA vs. No Treatment
  misc_feature: MA Experiment ID: 20000070 Result: Up-regulated in Transcription
  misc_feature: MA Experiment 20000070 PARAMETER Experiment Name: At_100uM_ABA_Mutants_cDNA_P Parameter: Plant Line Value: CS24
  misc_feature: MA Experiment 20000070 PARAMETER Experiment Name: At_100uM_ABA_Mutants_cDNA_P Parameter: Timepoint (hr) Value: 6
  misc_feature: MA Experiment 20000070 PARAMETER Experiment Name: At_100uM_ABA_Mutants_cDNA_P Parameter: Tissue Value: Aerial
  misc_feature: MA Experiment 20000070 PARAMETER Experiment Name: At_100uM_ABA_Mutants_cDNA_P Parameter: Treatment Value: 100uM ABA vs. No Treatment
  misc_feature: MA Experiment ID: 20000071 Result: Up-regulated in Transcription
  misc_feature: MA Experiment 20000071 PARAMETER Experiment Name: At_100uM_ABA_Mutants_cDNA_P Parameter: Plant Line Value: CS8104
  misc_feature: MA Experiment 20000071 PARAMETER Experiment Name: At_100uM_ABA_Mutants_cDNA_P Parameter: Timepoint (hr) Value: 6
  misc_feature: MA Experiment 20000071 PARAMETER Experiment Name: At_100uM_ABA_Mutants_cDNA_P Parameter: Tissue Value: Aerial
  misc_feature: MA Experiment 20000071 PARAMETER Experiment Name: At_100uM_ABA_Mutants_cDNA_P Parameter: Treatment Value: 100uM ABA vs. No Treatment
  misc_feature: MA Experiment ID: 20000072 Result: Up-regulated in Transcription
  misc_feature: MA Experiment 20000072 PARAMETER Experiment Name: At_100uM_ABA_Mutants_cDNA_P Parameter: Plant Line Value: CS8105
  misc_feature: MA Experiment 20000072 PARAMETER Experiment Name: At_100uM_ABA_Mutants_cDNA_P Parameter: Timepoint (hr) Value: 6
  misc_feature: MA Experiment 20000072 PARAMETER Experiment Name: At_100uM_ABA_Mutants_cDNA_P Parameter: Tissue Value: Aerial
  misc_feature: MA Experiment 20000072 PARAMETER Experiment Name: At_100uM_ABA_Mutants_cDNA_P Parameter: Treatment Value: 100uM ABA vs. No Treatment
  misc_feature: MA Experiment ID: 20000086 Result: Up-regulated in Transcription
  misc_feature: MA Experiment 20000086 PARAMETER Experiment Name: At_100uM_ABA_Mutants_cDNA_P Parameter: Plant Line Value: CS22
  misc_feature: MA Experiment 20000086 PARAMETER Experiment Name: At_100uM_ABA_Mutants_cDNA_P Parameter: Timepoint (hr) Value: 6
  misc_feature: MA Experiment 20000086 PARAMETER Experiment Name: At_100uM_ABA_Mutants_cDNA_P Parameter: Tissue Value: Aerial
  misc_feature: MA Experiment 20000086 PARAMETER Experiment Name: At_100uM_ABA_Mutants_cDNA_P Parameter: Treatment Value: 100uM ABA vs. No Treatment
  misc_feature: MA Experiment ID: 20000088 Result: Up-regulated in Transcription
  misc_feature: MA Experiment 20000088 PARAMETER Experiment Name: At_100uM_ABA_Mutants_cDNA_P Parameter: Plant Line Value: Landsberg
  misc_feature: MA Experiment 20000088 PARAMETER Experiment Name: At_100uM_ABA_Mutants_cDNA_P Parameter: Timepoint (hr) Value: 6
  misc_feature: MA Experiment 20000088 PARAMETER Experiment Name: At_100uM_ABA_Mutants_cDNA_P Parameter: Tissue Value: Aerial
  misc_feature: MA Experiment 20000088 PARAMETER Experiment Name: At_100uM_ABA_Mutants_cDNA_P Parameter: Treatment Value: 100uM ABA vs. No Treatment
  misc_feature: MA Experiment ID: 20000089 Result: Up-regulated in Transcription
  misc_feature: MA Experiment ID: 20000090 Result: Up-regulated in Transcription
  misc_feature: MA Experiment ID: 20000117 Result: Up-regulated in Transcription
  misc_feature: MA Experiment 20000117 PARAMETER Experiment Name: At_100uM_ABA_Mutants_cDNA_P Parameter: Plant Line Value: Columbia
  misc_feature: MA Experiment 20000117 PARAMETER Experiment Name: At_100uM_ABA_Mutants_cDNA_P Parameter: Timepoint (hr) Value: 6
  misc_feature: MA Experiment 20000117 PARAMETER Experiment Name: At_100uM_ABA_Mutants_cDNA_P Parameter: Tissue Value: Aerial
  misc_feature: MA Experiment 20000117 PARAMETER Experiment Name: At_100uM_ABA_Mutants_cDNA_P Parameter: Treatment Value: 100uM ABA vs. No Treatment
  misc_feature: MA Experiment ID: 20000173 Result: Down-regulated in Transcription
  misc_feature: MA Experiment 20000173 PARAMETER Experiment Name: At_42deg_Heat_P Parameter: Age (day) Value: 14
  misc_feature: MA Experiment 20000173 PARAMETER Experiment Name: At_42deg_Heat_P Parameter: Organism Value: A. thaliana
  misc_feature: MA Experiment 20000173 PARAMETER Experiment Name: At_42deg_Heat_P Parameter: Plant Line Value: WS
  misc_feature: MA Experiment 20000173 PARAMETER Experiment Name: At_42deg_Heat_P Parameter: Temperature (deg C) Value: 42 vs. 22
  misc_feature: MA Experiment 20000173 PARAMETER Experiment Name: At_42deg_Heat_P Parameter: Timepoint (hr) Value: 6
  misc_feature: MA Experiment 20000173 PARAMETER Experiment Name: At_42deg_Heat_P Parameter: Tissue Value: Aerial
  misc_feature: MA Experiment ID: 20000182 Result: Down-regulated in Transcription
  misc_feature: MA Experiment 20000182 PARAMETER Experiment Name: At_2mM_SA_P Parameter: Age (day) Value: 14
  misc_feature: MA Experiment 20000182 PARAMETER Experiment Name: At_2mM_SA_P Parameter: Organism Value: A. thaliana
  misc_feature: MA Experiment 20000182 PARAMETER Experiment Name: At_2mM_SA_P Parameter: Plant Line Value: WS
  misc_feature: MA Experiment 20000182 PARAMETER Experiment Name: At_2mM_SA_P Parameter: Timepoint (hr) Value: 6
  misc_feature: MA Experiment 20000182 PARAMETER Experiment Name: At_2mM_SA_P Parameter: Tissue Value: Aerial
  misc_feature: MA Experiment 20000182 PARAMETER Experiment Name: At_2mM_SA_P Parameter: Treatment Value: 2mM SA vs. No Treatment
  misc_feature: MA Experiment ID: 20000184 Result: Down-regulated in Transcription
  misc_feature: MA Experiment 20000184 PARAMETER Experiment Name: At_Shoots__P Parameter: Age (day) Value: 7
  misc_feature: MA Experiment 20000184 PARAMETER Experiment Name: At_Shoots__P Parameter: Tissue Value: Shoots vs. Whole Plant
  misc_feature: MA Experiment ID: 20000185 Result: Down-regulated in Transcription
  misc_feature: MA Experiment 20000185 PARAMETER Experiment Name: At_Roots__P Parameter: Age (day) Value: 7 vs. 21
  misc_feature: MA Experiment 20000185 PARAMETER Experiment Name: At_Roots__P Parameter: Organism Value: A. thaliana
  misc_feature: MA Experiment 20000185 PARAMETER Experiment Name: At_Roots__P Parameter: Tissue Value: Roots vs. Whole Plant
  misc_feature: MA Experiment ID: 20000439 Result: Down-regulated in Transcription
  misc_feature: MA Experiment 20000439 PARAMETER Experiment Name: At_Roots__P Parameter: Age (day) Value: 14 vs. 21
  misc_feature: MA Experiment 20000439 PARAMETER Experiment Name: At_Roots__P Parameter: Organism Value: A. thaliana
  misc_feature: MA Experiment 20000439 PARAMETER Experiment Name: At_Roots__P Parameter: Tissue Value: Roots vs. Whole Plant
  misc_feature: MA Experiment ID: 20001247 Result: Down-regulated in Transcription
  misc_feature: MA Experiment 20001247 PARAMETER Experiment Name: At_Far-red-induction_P Parameter: Age (day) Value: 7
  misc_feature: MA Experiment 20001247 PARAMETER Experiment Name: At_Far-red-induction_P Parameter: Light Value: Far-red vs. White
  misc_feature: MA Experiment 20001247 PARAMETER Experiment Name: At_Far-red-induction_P Parameter: Organism Value: A. thaliana
  misc_feature: MA Experiment 20001247 PARAMETER Experiment Name: At_Far-red-induction_P Parameter: Plant Line Value: Columbia
  misc_feature: MA Experiment 20001247 PARAMETER Experiment Name: At_Far-red-induction_P Parameter: Timepoint (hr) Value: 1
  misc_feature: MA Experiment 20001247 PARAMETER Experiment Name: At_Far-red-induction_P Parameter: Tissue Value: Whole Plant
  misc_feature: MA Experiment ID: 20001248 Result: Up-regulated in Transcription
  misc_feature: MA Experiment 20001248 PARAMETER Experiment Name: At_Far-red-induction_P Parameter: Age (day) Value: 7
  misc_feature: MA Experiment 20001248 PARAMETER Experiment Name: At_Far-red-induction_P Parameter: Light Value: Far-red vs. White
  misc_feature: MA Experiment 20001248 PARAMETER Experiment Name: At_Far-red-induction_P Parameter: Organism Value: A. thaliana
  misc_feature: MA Experiment 20001248 PARAMETER Experiment Name: At_Far-red-induction_P Parameter: Plant Line Value: Columbia
  misc_feature: MA Experiment 20001248 PARAMETER Experiment Name: At_Far-red-induction_P Parameter: Timepoint (hr) Value: 4
  misc_feature: MA Experiment 20001248 PARAMETER Experiment Name: At_Far-red-induction_P Parameter: Tissue Value: Whole Plant
  misc_feature: MA Experiment ID: 20001557 Result: Down-regulated in Transcription
  misc_feature: MA Experiment 20001557 PARAMETER Experiment Name: At_Drought_Soil_Dry_P Parameter: Age (day) Value: 27
  misc_feature: MA Experiment 20001557 PARAMETER Experiment Name: At_Drought_Soil_Dry_P Parameter: Organism Value: A. thaliana
  misc_feature: MA Experiment 20001557 PARAMETER Experiment Name: At_Drought_Soil_Dry_P Parameter: Plant Line Value: WS
  misc_feature: MA Experiment 20001557 PARAMETER Experiment Name: At_Drought_Soil_Dry_P Parameter: Post Timepoint (hr) Value: 3
  misc_feature: MA Experiment 20001557 PARAMETER Experiment Name: At_Drought_Soil_Dry_P Parameter: Post-Treatment Value: Re-Water vs. No Drought
  misc_feature: MA Experiment 20001557 PARAMETER Experiment Name: At_Drought_Soil_Dry_P Parameter: Timepoint (day) Value: 13
  misc_feature: MA Experiment 20001557 PARAMETER Experiment Name: At_Drought_Soil_Dry_P Parameter: Treatment Value: Drought vs. No Drought
  misc_feature: MA Experiment ID: 20001558 Result: Down-regulated in Transcription
  misc_feature: MA Experiment 20001558 PARAMETER Experiment Name: At_Drought_Soil_Dry_P Parameter: Age (day) Value: 27
  misc_feature: MA Experiment 20001558 PARAMETER Experiment Name: At_Drought_Soil_Dry_P Parameter: Organism Value: A. thaliana
  misc_feature: MA Experiment 20001558 PARAMETER Experiment Name: At_Drought_Soil_Dry_P Parameter: Plant Line Value: WS
  misc_feature: MA Experiment 20001558 PARAMETER Experiment Name: At_Drought_Soil_Dry_P Parameter: Post Timepoint (hr) Value: 6
  misc_feature: MA Experiment 20001558 PARAMETER Experiment Name: At_Drought_Soil_Dry_P Parameter: Post-Treatment Value: Re-Water vs. No Drought
  misc_feature: MA Experiment 20001558 PARAMETER Experiment Name: At_Drought_Soil_Dry_P Parameter: Timepoint (day) Value: 13
  misc_feature: MA Experiment 20001558 PARAMETER Experiment Name: At_Drought_Soil_Dry_P Parameter: Treatment Value: Drought vs. No Drought
aattctttgtaataaatatcttcaattcgtaaatgtcttggcctttgtcgttttcaaacttcaacatcagcatcacgtgattggctaatacaaataaaattttctctttattttattattttgccacaagccgtgaaaagatggagaaaatgaatgtccgttttatgattgtgttgatggtaatgtctctggttctgggtttttcgtcggcagttgatttcagatggaggaaaactgcaggattctcagatagattcaccagagctgtttcttcagtcgtgttcccagttcatggcaacgtttatcctcttgggtactataatgtaaccatcaacataggacaaccaccaagaccttattatcttgatcttgatactggtagtgatctcacttggctccaatgtgatgctccttgtgttcgttgcttggaggcgcctcatccactgtatcagcctagtagtgatcttattccttgcaatgatccactgtgtaaggctttgcatttgaatagtaatcagagatgtgagactccagagcaatgtgactatgaggttgagtatgctgatggaggatcttctctcggtgttcttgttagagatgtcttctctatgaactatacacagggtctccggctcactccccgtcttgctctaggttgtggatacgatcaaatcccaggggcttcgagtcatcatcctctagatggagtattagggcttggtagggggaaagtaagcattctgtcacagcttcatagccaaggttatgtaaagaatgttatcggtcattgcctaagcagtttaggtggaggaattctcttttttggcgacgatctttatgattcttcaagagtctcatggacaccaatgtctcgtgaatactcaaaacactactctcctgcaatgggaggggaacttctattcgggggaagaacaacaggattgaagaatctattaacagtatttgacagtggaagttcttacacatacttcaattccaaggcataccaagccgtaacatatttgctaaagagagaactaagcggaaaaccgttgaaagaagcacgggatgaccacacgctgcctctatgctggcaaggacgtagaccattcatgagcattgaagaagtcaagaagtatttcaagcctctagctcttagcttcaaaacaggctggagatcaaaaactctgtttgagatacccccagaagcttatctaatcatttctatgaaggggaatgtatgtttgggaatcttgaatggcacagaaataggtctccagaacctaaacctcatcggcgatatatcgatgcaagatcagatgataatctacgataacgagaaacaatcaatcgggtggatgccagtggattgcgatgaacttgcttcactaaaagcagctcaagtatatgaatactgagaatgttatatatagttgggacaagcaagagctcatagttgtaattagatatttgtatgtactgattggatcaaatcctatgacaattgagttacatgatgatactt

SEQ ID NO: 35698 - protein, 425 aa, Arabidopsis thaliana
  peptide (1)..(425): Ceres Seq. ID no. 12481851
  misc_feature (42)..(363): Pfam Name: Eukaryotic aspartyl protease Pfam Description: Eukaryotic aspartyl protease
  misc_feature (66)..(415): Homolog of NCBI NO: 21805926 NR Description: nucellin-like aspartic protease [Zea mays]
  misc_feature (1)..(414): Homolog of NCBI NO: 25350204 NR Description: nucellin-like protein, 27671-25467
  misc_feature (1)..(414): Homolog of NCBI NO: 30699263 NR Description: nucellin protein, putative [Arabidopsis thaliana]
  misc_feature (1)..(417): Homolog of NCBI NO: 30699261 NR Description: nucellin protein, putative [Arabidopsis thaliana]
  misc_feature (31)..(414): Homolog of NCBI NO: 15219354 NR Description: nucellin, putative; protein id: At1g44130.1
  misc_feature (1)..(25): Homolog of NCBI NO: 7484812 NR Description: aspartic proteinase homolog F17M5.250 -
  misc_feature (345)..(425): Homolog of NCBI NO: 7484812 NR Description: aspartic proteinase homolog F17M5.250 -
  misc_feature (42)..(363): Homolog of NCBI NO: 7484812 NR Description: aspartic proteinase homolog F17M5.250 -
  misc_feature (13)..(425): Homolog of NCBI NO: 26452545 NR Description: putative nucellin [Arabidopsis thaliana]
  misc_feature (1)..(425): Homolog of NCBI NO: 18418224 NR Description: nucellin -like protein
MEKMNVRFMIVLMVMSLVLGFSSAVDFRWRKTAGFSDRFTRAVSSVVFPVHGNVYPLGYYNVTINIGQPPRPYYLDLDTGSDLTWLQCDAPCVRCLEAPHPLYQPSSDLIPCNDPLCKALHLNSNQRCETPEQCDYEVEYADGGSSLGVLVRDVFSMNYTQGLRLTPRLALGCGYDQIPGASSHHPLDGVLGLGRGKVSILSQLHSQGYVKNVIGHCLSSLGGGILFFGDDLYDSSRVSWTPMSREYSKHYSPAMGGELLFGGRTTGLKNLLTVFDSGSSYTYFNSKAYQAVTYLLKRELSGKPLKEARDDHTLPLCWQGRRPFMSIEEVKKYFKPLALSFKTGWRSKTLFEIPPEAYLIISMKGNVCLGILNGTEIGLQNLNLIGDISMQDQMIIYDNEKQSIGWMPVDCDELASLKAAQVYEY

SEQ ID NO: 35699 - protein, 422 aa, Arabidopsis thaliana
  peptide (1)..(422): Ceres Seq. ID no. 12481852
  misc_feature (39)..(360): Pfam Name: Eukaryotic aspartyl protease Pfam Description: Eukaryotic aspartyl protease
  misc_feature (63)..(412): Homolog of NCBI NO: 21805926 NR Description: nucellin-like aspartic protease [Zea mays]
  misc_feature (1)..(411): Homolog of NCBI NO: 25350204 NR Description: nucellin-like protein, 27671-25467
  misc_feature (1)..(411): Homolog of NCBI NO: 30699263 NR Description: nucellin protein, putative [Arabidopsis thaliana]
  misc_feature (1)..(414): Homolog of NCBI NO: 30699261 NR Description: nucellin protein, putative [Arabidopsis thaliana]
  misc_feature (28)..(411): Homolog of NCBI NO: 15219354 NR Description: nucellin, putative; protein id: At1g44130.1
  misc_feature (1)..(22): Homolog of NCBI NO: 7484812 NR Description: aspartic proteinase homolog F17M5.250 -
  misc_feature (342)..(422): Homolog of NCBI NO: 7484812 NR Description: aspartic proteinase homolog F17M5.250 -
  misc_feature (39)..(360): Homolog of NCBI NO: 7484812 NR Description: aspartic proteinase homolog F17M5.250 -
  misc_feature (10)..(422): Homolog of NCBI NO: 26452545 NR Description: putative nucellin [Arabidopsis thaliana]
  misc_feature (1)..(422): Homolog of NCBI NO: 18418224 NR Description: nucellin -like protein
MNVRFMIVLMVMSLVLGFSSAVDFRWRKTAGFSDRFTRAVSSVVFPVHGNVYPLGYYNVTINIGQPPRPYYLDLDTGSDLTWLQCDAPCVRCLEAPHPLYQPSSDLIPCNDPLCKALHLNSNQRCETPEQCDYEVEYADGGSSLGVLVRDVFSMNYTQGLRLTPRLALGCGYDQIPGASSHHPLDGVLGLGRGKVSILSQLHSQGYVKNVIGHCLSSLGGGILFFGDDLYDSSRVSWTPMSREYSKHYSPAMGGELLFGGRTTGLKNLLTVFDSGSSYTYFNSKAYQAVTYLLKRELSGKPLKEARDDHTLPLCWQGRRPFMSIEEVKKYFKPLALSFKTGWRSKTLFEIPPEAYLIISMKGNVCLGILNGTEIGLQNLNLIGDISMQDQMIIYDNEKQSIGWMPVDCDELASLKAAQVYEY

SEQ ID NO: 35700 - protein, 417 aa, Arabidopsis thaliana
  peptide (1)..(417): Ceres Seq. ID no. 12481853
  misc_feature (34)..(355): Pfam Name: Eukaryotic aspartyl protease Pfam Description: Eukaryotic aspartyl protease
  misc_feature (58)..(407): Homolog of NCBI NO: 21805926 NR Description: nucellin-like aspartic protease [Zea mays]
  misc_feature (1)..(406): Homolog of NCBI NO: 25350204 NR Description: nucellin-like protein, 27671-25467
  misc_feature (1)..(406): Homolog of NCBI NO: 30699263 NR Description: nucellin protein, putative [Arabidopsis thaliana]
  misc_feature (1)..(409): Homolog of NCBI NO: 30699261 NR Description: nucellin protein, putative [Arabidopsis thaliana]
  misc_feature (23)..(406): Homolog of NCBI NO: 15219354 NR Description: nucellin, putative; protein id: At1g44130.1
  misc_feature (1)..(17): Homolog of NCBI NO: 7484812 NR Description: aspartic proteinase homolog F17M5.250 -
  misc_feature (337)..(417): Homolog of NCBI NO: 7484812 NR Description: aspartic proteinase homolog F17M5.250 -
  misc_feature (34)..(355): Homolog of NCBI NO: 7484812 NR Description: aspartic proteinase homolog F17M5.250 -
  misc_feature (5)..(417): Homolog of NCBI NO: 26452545 NR Description: putative nucellin [Arabidopsis thaliana]
  misc_feature (1)..(417): Homolog of NCBI NO: 18418224 NR Description: nucellin -like protein
MIVLMVMSLVLGFSSAVDFRWRKTAGFSDRFTRAVSSVVFPVHGNVYPLGYYNVTINIGQPPRPYYLDLDTGSDLTWLQCDAPCVRCLEAPHPLYQPSSDLIPCNDPLCKALHLNSNQRCETPEQCDYEVEYADGGSSLGVLVRDVFSMNYTQGLRLTPRLALGCGYDQIPGASSHHPLDGVLGLGRGKVSILSQLHSQGYVKNVIGHCLSSLGGGILFFGDDLYDSSRVSWTPMSREYSKHYSPAMGGELLFGGRTTGLKNLLTVFDSGSSYTYFNSKAYQAVTYLLKRELSGKPLKEARDDHTLPLCWQGRRPFMSIEEVKKYFKPLALSFKTGWRSKTLFEIPPEAYLIISMKGNVCLGILNGTEIGLQNLNLIGDISMQDQMIIYDNEKQSIGWMPVDCDELASLKAAQVYEY

SEQ ID NO: 35701 - DNA, 1873 bp, Arabidopsis thaliana
  misc_feature (1)..(1873): Ceres Seq. ID no. 12370436
  misc_feature: MA Experiment ID: 108434 Result: Down-regulated in Transcription
  misc_feature: MA Experiment 108434 PARAMETER Experiment Name: At_Root_Tips_cDNA_P Parameter: Tissue Value: Root Tips
  misc_feature: MA Experiment ID: 108463 Result: Down-regulated in Transcription
  misc_feature: MA Experiment 108463 PARAMETER Experiment Name: At_Germinating_Seeds_cDNA_P Parameter: Age (day) Value: 3 vs. 0
  misc_feature: MA Experiment 108463 PARAMETER Experiment Name: At_Germinating_Seeds_cDNA_P Parameter: Tissue Value: Germinating Seeds
  misc_feature: MA Experiment ID: 108464 Result: Down-regulated in Transcription
  misc_feature: MA Experiment 108464 PARAMETER Experiment Name: At_Germinating_Seeds_cDNA_P Parameter: Age (day) Value: 4 vs. 0
  misc_feature: MA Experiment 108464 PARAMETER Experiment Name: At_Germinating_Seeds_cDNA_P Parameter: Tissue Value: Germinating Seeds
  misc_feature: MA Experiment ID: 20000088 Result: Up-regulated in Transcription
  misc_feature: MA Experiment 20000088 PARAMETER Experiment Name: At_100uM_ABA_Mutants_cDNA_P Parameter: Plant Line Value: Landsberg
  misc_feature: MA Experiment 20000088 PARAMETER Experiment Name: At_100uM_ABA_Mutants_cDNA_P Parameter: Timepoint (hr) Value: 6
  misc_feature: MA Experiment 20000088 PARAMETER Experiment Name: At_100uM_ABA_Mutants_cDNA_P Parameter: Tissue Value: Aerial
  misc_feature: MA Experiment 20000088 PARAMETER Experiment Name: At_100uM_ABA_Mutants_cDNA_P Parameter: Treatment Value: 100uM ABA vs. No Treatment
acatcaaaaccgcctccatttctcattctctctctctctaaaaaaccaaatccagagtcagagaaaatctgtgatggctctttccaacgcctcctctctctccaccagatctatctacggcggtgatctttctcaccgtccaagcaaccgtcaatcatccttcacatttcatccggccgtcaacaccaagcctaaatccgctaacctcgtcacggcggtacacgcggctgagccagctagaaacgctgtttcagtcaaggaatccgttgcgtcttcttcgtctggtgcattgaaatggactccagagagctggaaactgaagaaggctctgcaacttcctgattatcctaacgccaatgagcttgagtctgtgcttaaaacgatagaggcttttcctccgattgttttcgccggagaagctaggaatcttgaagagagattggctgatgctgctgttggtaaagcttttcttctccaaggaggtgattgtgctgagagtttcaaggagttcaatgctactaatatcagagacaccttcagggttctgcttcagatgagtattgttcttacattcggtggccaggttccggtcattaaggttgggaggatggctggtcaatttgcaaagcctagatctgatgcatttgaggagaaggatggagtgaaattaccaagctacaagggagataacatcaatggtgatacttttgatgagaaatccaggattcctgatcctaataggatgattcgagcttacactcaatctgcagctactttgaatcttcttagagcctttgccactggaggttacgctgctattcaaagagttactcaatggaaccttgattttgttgaacaaagtgagcaagctgacaggtaccaggaattagctaatagggttgatgaggccttggggttcatgtctgcatgtggacttggcacggatcatccacttatgactacaactgatttctacacatcccatgagtgtttgcttctgccttatgaacagtcccttacaaggttggattcaacttctggtctctactatgattgttctgcacacatggtctggtgcggagagcgtaccagacaattggatggcgctcatgtcgagtttctcagggggattgctaatcctctgggcattaaggtgagcaacaaaatggatcccaatgagctggttaagctagtagaaatcctgaatcctaataacaagcctggaagaatcactgtaattgtgagaatgggtgctgagaacatgagagttaagcttccccacctgatcagagcagtccgcagatcaggccagattgtgacatgggtctgcgatccaatgcatggaaacaccatcaaagcaccttgcggtcttaaaacacgtgcctttgactcaatactggctgaagtccgagcattccttgatgtgcacgagcaagaaggaagccacgcgggcggtatccatctcgagatgacaggtcagaacgtgacagaatgcattggagggtcccgcactgtgacctacgatgacctcagttctcgctaccacacacactgtgacccaaggctgaacgcgtcacagtctcttgaacttgccttcattgttgcagaacggctcaggaagagaagaacgggtagccagcgtgtgtcttgagtccggttcttcccttttatacactttttgattccaaacaactcttttctctttgtcctgtgactgtgagttggtgtctttatgacctaagttaaaagccccaaaagcctctctaggaggagtaaacctgtttctgctgtggacagaccatgtcatgtcattgttctttatgttaactttaatgtcaaaccgtgtcacttacactagtgtatatttcttttc

SEQ ID NO: 35702 - protein, 549 aa, Arabidopsis thaliana
  peptide (1)..(549): Ceres Seq. ID no. 12370437
  misc_feature (98)..(535): Pfam Name: Class-II DAHP synthetase family Pfam Description: Class-II DAHP synthetase family
  misc_feature (3)..(548): Homolog of NCBI NO: 7488957 NR Description: probable 2-dehydro-3-deoxy-phosphoheptonate
  misc_feature (25)..(548): Homolog of NCBI NO: 114193 NR Description: Phospho-2-dehydro-3-deoxyheptonate aldolase 1, precursor (Phospho-2-keto-3-deoxyheptonate aldolase 1) (DAHP
  misc_feature (25)..(547): Homolog of NCBI NO: 2398679 NR Description: 3-deoxy-D-arabino-heptulosonate 7-phosphate
  misc_feature (25)..(547): Homolog of NCBI NO: 15219878 NR Description: 3-deoxy-D-arabino-heptulosonate 7-phosphate,
  misc_feature (25)..(548): Homolog of NCBI NO: 584776 NR Description: Phospho-2-dehydro-3-deoxyheptonate aldolase 1, precursor (Phospho-2-keto-3-deoxyheptonate aldolase 1) (DAHP
  misc_feature (25)..(548): Homolog of NCBI NO: 584779 NR Description: Phospho-2-dehydro-3-deoxyheptonate aldolase 2, precursor (Phospho-2-keto-3-deoxyheptonate aldolase 2) (DAHP
  misc_feature (25)..(547): Homolog of NCBI NO: 2546988 NR Description: 2-dehydro-3-deoxyphosphoheptonate aldolase
  misc_feature (25)..(549): Homolog of NCBI NO: 99742 NR Description: 2-dehydro-3-deoxy-phosphoheptonate aldolase (EC
  misc_feature (25)..(549): Homolog of NCBI NO: 166688 NR Description: 3-deoxy-D-arabino-heptulosonate y-phosphate
  misc_feature (25)..(549): Homolog of NCBI NO: 15236093 NR Description: 2-dehydro-3-deoxyphosphoheptonate aldolase
HQNRLHFSFSLSLKNQIQSQRKSVMALSNASSLSTRSIYGGDLSHRPSNRQSSFTFHPAVNTKPKSANLVTAVHAAEPARNAVSVKESVASSSSGALKWTPESWKLKKALQLPDYPNANELESVLKTIEAFPPIVFAGEARNLEERLADAAVGKAFLLQGGDCAESFKEFNATNIRDTFRVLLQMSIVLTFGGQVPVIKVGRMAGQFAKPRSDAFEEKDGVKLPSYKGDNINGDTFDEKSRIPDPNRMIRAYTQSAATLNLLRAFATGGYAAIQRVTQWNLDFVEQSEQADRYQELANRVDEALGFMSACGLGTDHPLMTTTDFYTSHECLLLPYEQSLTRLDSTSGLYYDCSAHMVWCGERTRQLDGAHVEFLRGIANPLGIKVSNKMDPNELVKLVEILNPNNKPGRITVIVRMGAENMRVKLPHLIRAVRRSGQIVTWVCDPMHGNTIKAPCGLKTRAFDSILAEVRAFLDVHEQEGSHAGGIHLEMTGQNVTECIGGSRTVTYDDLSSRYHTHCDPRLNASQSLELAFIVAERLRKRRTGSQRVS

SEQ ID NO: 35703 - protein, 525 aa, Arabidopsis thaliana
  peptide (1)..(525): Ceres Seq. ID no. 12370438
  misc_feature (74)..(511): Pfam Name: Class-II DAHP synthetase family Pfam Description: Class-II DAHP synthetase family
  misc_feature (1)..(524): Homolog of NCBI NO: 7488957 NR Description: probable 2-dehydro-3-deoxy-phosphoheptonate
  misc_feature (1)..(524): Homolog of NCBI NO: 114193 NR Description: Phospho-2-dehydro-3-deoxyheptonate aldolase 1, precursor (Phospho-2-keto-3-deoxyheptonate aldolase 1) (DAHP
  misc_feature (1)..(523): Homolog of NCBI NO: 2398679 NR Description: 3-deoxy-D-arabino-heptulosonate 7-phosphate
  misc_feature (1)..(523): Homolog of NCBI NO: 15219878 NR Description: 3-deoxy-D-arabino-heptulosonate 7-phosphate,
  misc_feature (1)..(524): Homolog of NCBI NO: 584776 NR Description: Phospho-2-dehydro-3-deoxyheptonate aldolase 1, precursor (Phospho-2-keto-3-deoxyheptonate aldolase 1) (DAHP
  misc_feature (1)..(524): Homolog of NCBI NO: 584779 NR Description: Phospho-2-dehydro-3-deoxyheptonate aldolase 2, precursor (Phospho-2-keto-3-deoxyheptonate aldolase 2) (DAHP
  misc_feature (1)..(523): Homolog of NCBI NO: 2546988 NR Description: 2-dehydro-3-deoxyphosphoheptonate aldolase
  misc_feature (1)..(525): Homolog of NCBI NO: 99742 NR Description: 2-dehydro-3-deoxy-phosphoheptonate aldolase (EC
  misc_feature (1)..(525): Homolog of NCBI NO: 166688 NR Description: 3-deoxy-D-arabino-heptulosonate y-phosphate
  misc_feature (1)..(525): Homolog of NCBI NO: 15236093 NR Description: 2-dehydro-3-deoxyphosphoheptonate aldolase
MALSNASSLSTRSIYGGDLSHRPSNRQSSFTFHPAVNTKPKSANLVTAVHAAEPARNAVSVKESVASSSSGALKWTPESWKLKKALQLPDYPNANELESVLKTIEAFPPIVFAGEARNLEERLADAAVGKAFLLQGGDCAESFKEFNATNIRDTFRVLLQMSIVLTFGGQVPVIKVGRMAGQFAKPRSDAFEEKDGVKLPSYKGDNINGDTFDEKSRIPDPNRMIRAYTQSAATLNLLRAFATGGYAAIQRVTQWNLDFVEQSEQADRYQELANRVDEALGFMSACGLGTDHPLMTTTDFYTSHECLLLPYEQSLTRLDSTSGLYYDCSAHMVWCGERTRQLDGAHVEFLRGIANPLGIKVSNKMDPNELVKLVEILNPNNKPGRITVIVRMGAENMRVKLPHLIRAVRRSGQIVTWVCDPMHGNTIKAPCGLKTRAFDSILAEVRAFLDVHEQEGSHAGGIHLEMTGQNVTECIGGSRTVTYDDLSSRYHTHCDPRLNASQSLELAFIVAERLRKRRTGSQRVS

SEQ ID NO: 35704 - protein, 365 aa, Arabidopsis thaliana
  peptide (1)..(365): Ceres Seq. ID no. 12370439
  misc_feature (1)..(351): Pfam Name: Class-II DAHP synthetase family Pfam Description: Class-II DAHP synthetase family
  misc_feature (1)..(364): Homolog of NCBI NO: 7488957 NR Description: probable 2-dehydro-3-deoxy-phosphoheptonate
  misc_feature (1)..(364): Homolog of NCBI NO: 114193 NR Description: Phospho-2-dehydro-3-deoxyheptonate aldolase 1, precursor (Phospho-2-keto-3-deoxyheptonate aldolase 1) (DAHP
  misc_feature (1)..(363): Homolog of NCBI NO: 2398679 NR Description: 3-deoxy-D-arabino-heptulosonate 7-phosphate
  misc_feature (1)..(363): Homolog of NCBI NO: 15219878 NR Description: 3-deoxy-D-arabino-heptulosonate 7-phosphate,
  misc_feature (1)..(364): Homolog of NCBI NO: 584776 NR Description: Phospho-2-dehydro-3-deoxyheptonate aldolase 1, precursor (Phospho-2-keto-3-deoxyheptonate aldolase 1) (DAHP
  misc_feature (1)..(364): Homolog of NCBI NO: 584779 NR Description: Phospho-2-dehydro-3-deoxyheptonate aldolase 2, precursor (Phospho-2-keto-3-deoxyheptonate aldolase 2) (DAHP
  misc_feature (1)..(363): Homolog of NCBI NO: 2546988 NR Description: 2-dehydro-3-deoxyphosphoheptonate aldolase
  misc_feature (1)..(365): Homolog of NCBI NO: 99742 NR Description: 2-dehydro-3-deoxy-phosphoheptonate aldolase (EC
  misc_feature (1)..(365): Homolog of NCBI NO: 166688 NR Description: 3-deoxy-D-arabino-heptulosonate y-phosphate
  misc_feature (1)..(365): Homolog of NCBI NO: 15236093 NR Description: 2-dehydro-3-deoxyphosphoheptonate aldolase
MSIVLTFGGQVPVIKVGRMAGQFAKPRSDAFEEKDGVKLPSYKGDNINGDTFDEKSRIPDPNRMIRAYTQSAATLNLLRAFATGGYAAIQRVTQWNLDFVEQSEQADRYQELANRVDEALGFMSACGLGTDHPLMTTTDFYTSHECLLLPYEQSLTRLDSTSGLYYDCSAHMVWCGERTRQLDGAHVEFLRGIANPLGIKVSNKMDPNELVKLVEILNPNNKPGRITVIVRMGAENMRVKLPHLIRAVRRSGQIVTWVCDPMHGNTIKAPCGLKTRAFDSILAEVRAFLDVHEQEGSHAGGIHLEMTGQNVTECIGGSRTVTYDDLSSRYHTHCDPRLNASQSLELAFIVAERLRKRRTGSQRVS

SEQ ID NO: 35705 - DNA, 1235 bp, Arabidopsis thaliana
  misc_feature (1)..(1235): Ceres Seq. ID no. 12328499
  misc_feature: MA Experiment ID: 108461 Result: Down-regulated in Transcription
  misc_feature: MA Experiment 108461 PARAMETER Experiment Name: At_Germinating_Seeds_cDNA_P Parameter: Age (day) Value: 1 vs. 0
  misc_feature: MA Experiment 108461 PARAMETER Experiment Name: At_Germinating_Seeds_cDNA_P Parameter: Tissue Value: Germinating Seeds
  misc_feature: MA Experiment ID: 108462 Result: Down-regulated in Transcription
  misc_feature: MA Experiment 108462 PARAMETER Experiment Name: At_Germinating_Seeds_cDNA_P Parameter: Age (day) Value: 2 vs. 0
  misc_feature: MA Experiment 108462 PARAMETER Experiment Name: At_Germinating_Seeds_cDNA_P Parameter: Tissue Value: Germinating Seeds
  misc_feature: MA Experiment ID: 108463 Result: Down-regulated in Transcription
  misc_feature: MA Experiment 108463 PARAMETER Experiment Name: At_Germinating_Seeds_cDNA_P Parameter: Age (day) Value: 3 vs. 0
  misc_feature: MA Experiment 108463 PARAMETER Experiment Name: At_Germinating_Seeds_cDNA_P Parameter: Tissue Value: Germinating Seeds
  misc_feature: MA Experiment ID: 108464 Result: Down-regulated in Transcription
  misc_feature: MA Experiment 108464 PARAMETER Experiment Name: At_Germinating_Seeds_cDNA_P Parameter: Age (day) Value: 4 vs. 0
  misc_feature: MA Experiment 108464 PARAMETER Experiment Name: At_Germinating_Seeds_cDNA_P Parameter: Tissue Value: Germinating Seeds
  misc_feature: MA Experiment ID: 20000112 Result: Up-regulated in Transcription
  misc_feature: MA Experiment 20000112 PARAMETER Experiment Name: At_42deg_Heat_cDNA_P Parameter: Temperature (deg C) Value: 42 vs. 22
  misc_feature: MA Experiment 20000112 PARAMETER Experiment Name: At_42deg_Heat_cDNA_P Parameter: Timepoint (hr) Value: 2
  misc_feature: MA Experiment 20000112 PARAMETER Experiment Name: At_42deg_Heat_cDNA_P Parameter: Tissue Value: Aerial
  misc_feature: MA Experiment ID: 20000224 Result: Down-regulated in Transcription
aatttagggttttcattttacccatttcctctctttgtacgaacaaagtgcttcgagtttttgttaacctttttctctgatctaatggcgatggaagatcaatcggcggcgagatctatcggaaaagttagttggtttagcgatggaaaaggctacggtttcattactcccgatgatggcggcgaagagctttttgttcatcaatcctcaattgtctccgatggattccgtagcttgactcttggtgaatcggttgaatacgaaatcgcgcttggaagcgacggaaagactaaggccattgaagttactgctcccggcggcggttcacttaataagaaggaaaacagctcccgtggatccggaggtaattgttttaattgcggtgaggttggtcatatggctaaggattgtgacggtggaagtggtgggaaaagctttggaggtggtggtggtcgtagatctggcggcgaaggtgaatgttacatgtgtggtgatgtgggacacttcgctagggattgtaggcaaagcggtggtggaaacagcggcggaggaggaggaggtggtcgtccgtgttacagttgcggtgaggttggtcatttggcaaaggattgtcgtggtggttctggtggaaacagatacggaggaggtggtggtcgtggatctggcggtgatggatgctacatgtgtggtggtgtgggacatttcgctagggattgtaggcaaaacggcggtggaaacgttggaggtggtggaagcacttgttatacctgtggcggagttggccacattgcgaaagtttgcaccagcaagataccttctggtggtggtggtggtggtcgtgcttgttacgaatgtggaggaactggccatttggctcgtgactgtgatcggagaggaagtggaagcagcggaggtggcggtggcagtaacaagtgcttcatctgcggcaaggaaggtcactttgcgagggaatgtacttcggttgcttaacaaaaagatgcaaagaagaagagtaatgttcataaacctcttttgttttctattaaaatctacctaatgctcctttttggtgactataatgtgattgctaaagtcgtttaggatgtttaagaatggttgttttgggagtttttgatctctctatattactcttttgactggtttatgcaacctgttcgttcactgcttttgttgatgccataagtttgagatcttgaatgatatgtgtgcttgcg

SEQ ID NO: 35706 - protein, 329 aa, Arabidopsis thaliana
  peptide (1)..(329): Ceres Seq. ID no. 12328500
  misc_feature (38)..(105): Pfam Name: 'Cold-shock' DNA-binding domain Pfam Description: 'Cold-shock' DNA-binding domain
  misc_feature (114)..(325): Homolog of NCBI NO: 729704 NR Description: DNA-binding protein HEXBP (Hexamer-binding
  misc_feature (35)..(239): Homolog of NCBI NO: 29467522 NR Description: P0582D05.12 [Oryza sativa (japonica
  misc_feature (108)..(327): Homolog of NCBI NO: 729704 NR Description: DNA-binding protein HEXBP (Hexamer-binding
  misc_feature (29)..(243): Homolog of NCBI NO: 15234010 NR Description: glycine-rich protein 2 (GRP2)
  misc_feature (41)..(239): Homolog of NCBI NO: 40363759 NR Description: putative glycine-rich protein [Triticum aestivum]
  misc_feature (31)..(243): Homolog of NCBI NO: 121631 NR Description: Glycine-rich protein 2
  misc_feature (41)..(270): Homolog of NCBI NO: 21322752 NR Description: cold shock protein-1 [Triticum aestivum]
  misc_feature (29)..(329): Homolog of NCBI NO: 15233440 NR Description: glycine-rich protein
  misc_feature (31)..(329): Homolog of NCBI NO: 7442089 NR Description: glycine-rich protein T13L16.11 - Arabidopsis
  misc_feature (29)..(329): Homolog of NCBI NO: 18398546 NR Description: putative glycine-rich, zinc-finger DNA-binding
NLGFSFYPFPLFVRTKCFEFLLTFFSDLMAMEDQSAARSIGKVSWFSDGKGYGFITPDDGGEELFVHQSSIVSDGFRSLTLGESVEYEIALGSDGKTKAIEVTAPGGGSLNKKENSSRGSGGNCFNCGEVGHMAKDCDGGSGGKSFGGGGGRRSGGEGECYMCGDVGHFARDCRQSGGGNSGGGGGGGRPCYSCGEVGHLAKDCRGGSGGNRYGGGGGRGSGGDGCYMCGGVGHFARDCRQNGGGNVGGGGSTCYTCGGVGHIAKVCTSKIPSGGGGGGRACYECGGTGHLARDCDRRGSGSSGGGGGSNKCFICGKEGHFARECTSVA

SEQ ID NO: 35707 - protein, 301 aa, Arabidopsis thaliana
  peptide (1)..(301): Ceres Seq. ID no. 12328501
  misc_feature (10)..(77): Pfam Name: 'Cold-shock' DNA-binding domain Pfam Description: 'Cold-shock' DNA-binding domain
  misc_feature (86)..(297): Homolog of NCBI NO: 729704 NR Description: DNA-binding protein HEXBP (Hexamer-binding
  misc_feature (7)..(211): Homolog of NCBI NO: 29467522 NR Description: P0582D05.12 [Oryza sativa (japonica
  misc_feature (80)..(299): Homolog of NCBI NO: 729704 NR Description: DNA-binding protein HEXBP (Hexamer-binding
  misc_feature (1)..(215): Homolog of NCBI NO: 15234010 NR Description: glycine-rich protein 2 (GRP2)
  misc_feature (13)..(211): Homolog of NCBI NO: 40363759 NR Description: putative glycine-rich protein [Triticum aestivum]
  misc_feature (3)..(215): Homolog of NCBI NO: 121631 NR Description: Glycine-rich protein 2
  misc_feature (13)..(242): Homolog of NCBI NO: 21322752 NR Description: cold shock protein-1 [Triticum aestivum]
  misc_feature (1)..(301): Homolog of NCBI NO: 15233440 NR Description: glycine-rich protein
  misc_feature (3)..(301): Homolog of NCBI NO: 7442089 NR Description: glycine-rich protein T13L16.11 - Arabidopsis
  misc_feature (1)..(301): Homolog of NCBI NO: 18398546 NR Description: putative glycine-rich, zinc-finger DNA-binding
MAMEDQSAARSIGKVSWFSDGKGYGFITPDDGGEELFVHQSSIVSDGFRSLTLGESVEYEIALGSDGKTKAIEVTAPGGGSLNKKENSSRGSGGNCFNCGEVGHMAKDCDGGSGGKSFGGGGGRRSGGEGECYMCGDVGHFARDCRQSGGGNSGGGGGGGRPCYSCGEVGHLAKDCRGGSGGNRYGGGGGRGSGGDGCYMCGGVGHFARDCRQNGGGNVGGGGSTCYTCGGVGHIAKVCTSKIPSGGGGGGRACYECGGTGHLARDCDRRGSGSSGGGGGSNKCFICGKEGHFARECTSVA

SEQ ID NO: 35708 - protein, 299 aa, Arabidopsis thaliana
  peptide (1)..(299): Ceres Seq. ID no. 12328502
  misc_feature (8)..(75): Pfam Name: 'Cold-shock' DNA-binding domain Pfam Description: 'Cold-shock' DNA-binding domain
  misc_feature (84)..(295): Homolog of NCBI NO: 729704 NR Description: DNA-binding protein HEXBP (Hexamer-binding
  misc_feature (5)..(209): Homolog of NCBI NO: 29467522 NR Description: P0582D05.12 [Oryza sativa (japonica
  misc_feature (78)..(297): Homolog of NCBI NO: 729704 NR Description: DNA-binding protein HEXBP (Hexamer-binding
  misc_feature (1)..(213): Homolog of NCBI NO: 15234010 NR Description: glycine-rich protein 2 (GRP2)
  misc_feature (11)..(209): Homolog of NCBI NO: 40363759 NR Description: putative glycine-rich protein [Triticum aestivum]
  misc_feature (1)..(213): Homolog of NCBI NO: 121631 NR Description: Glycine-rich protein 2
  misc_feature (11)..(240): Homolog of NCBI NO: 21322752 NR Description: cold shock protein-1 [Triticum aestivum]
  misc_feature (1)..(299): Homolog of NCBI NO: 15233440 NR Description: glycine-rich protein
  misc_feature (1)..(299): Homolog of NCBI NO: 7442089 NR Description: glycine-rich protein T13L16.11 - Arabidopsis
  misc_feature (1)..(299): Homolog of NCBI NO: 18398546 NR Description: putative glycine-rich, zinc-finger DNA-binding
MEDQSAARSIGKVSWFSDGKGYGFITPDDGGEELFVHQSSIVSDGFRSLTLGESVEYEIALGSDGKTKAIEVTAPGGGSLNKKENSSRGSGGNCFNCGEVGHMAKDCDGGSGGKSFGGGGGRRSGGEGECYMCGDVGHFARDCRQSGGGNSGGGGGGGRPCYSCGEVGHLAKDCRGGSGGNRYGGGGGRGSGGDGCYMCGGVGHFARDCRQNGGGNVGGGGSTCYTCGGVGHIAKVCTSKIPSGGGGGGRACYECGGTGHLARDCDRRGSGSSGGGGGSNKCFICGKEGHFARECTSVA

SEQ ID NO: 35709 - DNA, 1335 bp, Arabidopsis thaliana
  misc_feature (1)..(1335): Ceres Seq. ID no. 13490502
  misc_feature: MA Experiment ID: 108572 Result: Up-regulated in Transcription
  misc_feature: MA Experiment 108572 PARAMETER Experiment Name: At_Drought_cDNA_P Parameter: Timepoint (hr) Value: 1
  misc_feature: MA Experiment 108572 PARAMETER Experiment Name: At_Drought_cDNA_P Parameter: Tissue Value: Aerial
  misc_feature: MA Experiment 108572 PARAMETER Experiment Name: At_Drought_cDNA_P Parameter: Treatment Value: Drought vs. No Drought
  misc_feature: MA Experiment ID: 108573 Result: Up-regulated in Transcription
  misc_feature: MA Experiment 108573 PARAMETER Experiment Name: At_Drought_cDNA_P Parameter: Timepoint (hr) Value: 6
  misc_feature: MA Experiment 108573 PARAMETER Experiment Name: At_Drought_cDNA_P Parameter: Tissue Value: Aerial
  misc_feature: MA Experiment 108573 PARAMETER Experiment Name: At_Drought_cDNA_P Parameter: Treatment Value: Drought vs. No Drought
  misc_feature: MA Experiment ID: 108574 Result: Up-regulated in Transcription
  misc_feature: MA Experiment 108574 PARAMETER Experiment Name: At_Wounding__cDNA_P Parameter: Timepoint (hr) Value: 1
  misc_feature: MA Experiment 108574 PARAMETER Experiment Name: At_Wounding__cDNA_P Parameter: Tissue Value: Aerial
  misc_feature: MA Experiment 108574 PARAMETER Experiment Name: At_Wounding__cDNA_P Parameter: Treatment Value: Wounding vs. No Wounding
  misc_feature: MA Experiment ID: 108594 Result: Down-regulated in Transcription
  misc_feature: MA Experiment 108594 PARAMETER Experiment Name: At_Ler-rhl_Root_cDNA_P Parameter: Plant Line Value: null
  misc_feature: MA Experiment ID: 108605 Result: Up-regulated in Transcription
  misc_feature: MA Experiment 108605 PARAMETER Experiment Name: At_100uM_ABA_cDNA_P Parameter: Timepoint (hr) Value: 6
  misc_feature: MA Experiment 108605 PARAMETER Experiment Name: At_100uM_ABA_cDNA_P Parameter: Tissue Value: Aerial
  misc_feature: MA Experiment 108605 PARAMETER Experiment Name: At_100uM_ABA_cDNA_P Parameter: Treatment Value: 100uM ABA vs. No Treatment
  misc_feature: MA Experiment ID: 108607 Result: Up-regulated in Transcription
  misc_feature: MA Experiment 108607 PARAMETER Experiment Name: At_100uM_ABA_cDNA_P Parameter: Timepoint (hr) Value: 4
  misc_feature: MA Experiment 108607 PARAMETER Experiment Name: At_100uM_ABA_cDNA_P Parameter: Tissue Value: Aerial
  misc_feature: MA Experiment 108607 PARAMETER Experiment Name: At_100uM_ABA_cDNA_P Parameter: Treatment Value: 100uM ABA vs. No Treatment
  misc_feature: MA Experiment ID: 108608 Result: Up-regulated in Transcription
  misc_feature: MA Experiment 108608 PARAMETER Experiment Name: At_100uM_ABA_cDNA_P Parameter: Timepoint (hr) Value: 1
  misc_feature: MA Experiment 108608 PARAMETER Experiment Name: At_100uM_ABA_cDNA_P Parameter: Tissue Value: Aerial
  misc_feature: MA Experiment 108608 PARAMETER Experiment Name: At_100uM_ABA_cDNA_P Parameter: Treatment Value: 100uM ABA vs. No Treatment
  misc_feature: MA Experiment ID: 20000089 Result: Down-regulated in Transcription
  misc_feature: MA Experiment ID: 20000090 Result: Down-regulated in Transcription
  misc_feature: MA Experiment ID: 20000112 Result: Down-regulated in Transcription
  misc_feature: MA Experiment 20000112 PARAMETER Experiment Name: At_42deg_Heat_cDNA_P Parameter: Temperature (deg C) Value: 42 vs. 22
  misc_feature: MA Experiment 20000112 PARAMETER Experiment Name: At_42deg_Heat_cDNA_P Parameter: Timepoint (hr) Value: 2
  misc_feature: MA Experiment 20000112 PARAMETER Experiment Name: At_42deg_Heat_cDNA_P Parameter: Tissue Value: Aerial
  misc_feature: MA Experiment ID: 20000264 Result: Up-regulated in Transcription
  misc_feature: MA Experiment 20000264 PARAMETER Experiment Name: At_Open_Flower_P Parameter: Age (day) Value: 21
  misc_feature: MA Experiment 20000264 PARAMETER Experiment Name: At_Open_Flower_P Parameter: Plant Line Value: WS
  misc_feature: MA Experiment 20000264 PARAMETER Experiment Name: At_Open_Flower_P Parameter: Tissue Value: Open Flower vs. Whole Plant
  misc_feature: MA Experiment ID: 20000794 Result: Up-regulated in Transcription
  misc_feature: MA Experiment 20000794 PARAMETER Experiment Name: At_Petals_P Parameter: Age (day) Value: 23-25 days
  misc_feature: MA Experiment 20000794 PARAMETER Experiment Name: At_Petals_P Parameter: Plant Line Value: WS
  misc_feature: MA Experiment 20000794 PARAMETER Experiment Name: At_Petals_P Parameter: Tissue Value: Petals vs. Whole plant
  misc_feature: MA Experiment ID: 20001248 Result: Down-regulated in Transcription
  misc_feature: MA Experiment 20001248 PARAMETER Experiment Name: At_Far-red-induction_P Parameter: Age (day) Value: 7
  misc_feature: MA Experiment 20001248 PARAMETER Experiment Name: At_Far-red-induction_P Parameter: Light Value: Far-red vs. White
  misc_feature: MA Experiment 20001248 PARAMETER Experiment Name: At_Far-red-induction_P Parameter: Organism Value: A. thaliana
  misc_feature: MA Experiment 20001248 PARAMETER Experiment Name: At_Far-red-induction_P Parameter: Plant Line Value: Columbia
  misc_feature: MA Experiment 20001248 PARAMETER Experiment Name: At_Far-red-induction_P Parameter: Timepoint (hr) Value: 4
  misc_feature: MA Experiment 20001248 PARAMETER Experiment Name: At_Far-red-induction_P Parameter: Tissue Value: Whole Plant
  misc_feature: MA Experiment ID: 20001558 Result: Up-regulated in Transcription
  misc_feature: MA Experiment 20001558 PARAMETER Experiment Name: At_Drought_Soil_Dry_P Parameter: Age (day) Value: 27
  misc_feature: MA Experiment 20001558 PARAMETER Experiment Name: At_Drought_Soil_Dry_P Parameter: Organism Value: A. thaliana
  misc_feature: MA Experiment 20001558 PARAMETER Experiment Name: At_Drought_Soil_Dry_P Parameter: Plant Line Value: WS
  misc_feature: MA Experiment 20001558 PARAMETER Experiment Name: At_Drought_Soil_Dry_P Parameter: Post Timepoint (hr) Value: 6
  misc_feature: MA Experiment 20001558 PARAMETER Experiment Name: At_Drought_Soil_Dry_P Parameter: Post-Treatment Value: Re-Water vs. No Drought
  misc_feature: MA Experiment 20001558 PARAMETER Experiment Name: At_Drought_Soil_Dry_P Parameter: Timepoint (day) Value: 13
  misc_feature: MA Experiment 20001558 PARAMETER Experiment Name: At_Drought_Soil_Dry_P Parameter: Treatment Value: Drought vs. No Drought
  misc_feature: MA Experiment ID: 20001560 Result: Up-regulated in Transcription
  misc_feature: MA Experiment 20001560 PARAMETER Experiment Name: At_Drought_Soil_Dry_P Parameter: Age (day) Value: 28
  misc_feature: MA Experiment 20001560 PARAMETER Experiment Name: At_Drought_Soil_Dry_P Parameter: Organism Value: A. thaliana
  misc_feature: MA Experiment 20001560 PARAMETER Experiment Name: At_Drought_Soil_Dry_P Parameter: Plant Line Value: WS
  misc_feature: MA Experiment 20001560 PARAMETER Experiment Name: At_Drought_Soil_Dry_P Parameter: Post Timepoint (hr) Value: None
  misc_feature: MA Experiment 20001560 PARAMETER Experiment Name: At_Drought_Soil_Dry_P Parameter: Post-Treatment Value: None
  misc_feature: MA Experiment 20001560 PARAMETER Experiment Name: At_Drought_Soil_Dry_P Parameter: Timepoint (day) Value: 14
  misc_feature: MA Experiment 20001560 PARAMETER Experiment Name: At_Drought_Soil_Dry_P Parameter: Treatment Value: Drought vs. No Drought
  misc_feature: MA Experiment ID: 20001911 Result: Down-regulated in Transcription
  misc_feature: MA Experiment 20001911 PARAMETER Experiment Name: At_Drought_Reproduction_P Parameter: Age (day) Value: 40
  misc_feature: MA Experiment 20001911 PARAMETER Experiment Name: At_Drought_Reproduction_P Parameter: Organism Value: A. thaliana
  misc_feature: MA Experiment 20001911 PARAMETER Experiment Name: At_Drought_Reproduction_P Parameter: Plant Line Value: WS
  misc_feature: MA Experiment 20001911 PARAMETER Experiment Name: At_Drought_Reproduction_P Parameter: Timepoint (day) Value: 10
  misc_feature: MA Experiment 20001911 PARAMETER Experiment Name: At_Drought_Reproduction_P Parameter: Tissue Value: Flowers
  misc_feature: MA Experiment 20001911 PARAMETER Experiment Name: At_Drought_Reproduction_P Parameter: Treatment Value: Drought vs. No Drought
acatcttccttgtttcttctctctctctctctcccctcaaacttaaattcacattttaatacttgttacttcaactataataataataataatctttcttcattatatattttcctctcctctcagatcttctctctcaccatcttctcttgagatcaagattgagtattcttgtctcaagaatcgatactcgagagctcttatggaccaaaatggtcataacgacgaagcagaaacagtttcatgcggcaacggcaactgcaaaagcaagatcgtgcctggagatgatcacggtggagatgagagtagtggtaccaagagaaggaagaagagaaaaacgcaacaaaagacaatgaaacgacgtgaattaatgtcgtattgtgagctaccggagtacatgaaagacaacgaatacatattgaattattacagagctgattggtccattagagatgctttcttcagcgtatttagtttccacaatgagtccctcaatgtttggacacatttgattggttttatcttctttgtggcactaaccgtcgccaatattattcatcacgacggattcttccccgtggatgcaaagagtccagggaatgtaacaagatggcccttcttcgttttcttaggaggctcaatgttctgcctactcgcaagcagcatttgtcacctcttctgttgccactcaaaagagcttaatgtcttccttctccgaatagactatgccggtatcaccgccatgatcatcacttccttcttcccaccaatcttctacatcttccagtgcactcctcggtggtacttcatctacctcgcaggcatcacatccatgggaatcttcacaatcatcacacttttcaccccatcactttccgctcccaagtaccgagctttccgcgctttgctctttgcctccatggggctgtttgggattgtcccagctgcccacgcgctagtggtcaattggggaaacccgcaaaggaacgtgacgctcgtgtacgagttgcttatggcagtgttctatcttgttggaacaggattctacgtagggagagtgccagaaaggcttaaaccgggatggtttgatcgtgtgggacatagtcatcagatcttccatgtgttcgttttgttgggtgctttgtctcactatgcagctgctctcttgttcttggactggcgtgaccacgttggttgttaaaccatatatttgtaattcttttaaatataatattattaatttgttgtatcgtggtgaacaaaattgtaataacccatttgttttaaattgaattgtaattcaacttgtgttaattgttatgtttgttgaatacg

SEQ ID NO: 35710 - protein, 332 aa, Arabidopsis thaliana
  peptide (1)..(332): Ceres Seq. ID no. 13490503
  misc_feature (90)..(321): Pfam Name: Uncharacterised protein family (Hly-III / UPF0073) Pfam Description: Uncharacterised protein family (Hly-III /
  misc_feature (43)..(114): Homolog of NCBI NO: 20330770 NR Description: Hypothetical protein [Oryza sativa (japonica
  misc_feature (134)..(278): Homolog of NCBI NO: 20330770 NR Description: Hypothetical protein [Oryza sativa (japonica
  misc_feature (134)..(327): Homolog of NCBI NO: 30688829 NR Description: expressed protein [Arabidopsis thaliana]
  misc_feature (134)..(327): Homolog of NCBI NO: 18377749 NR Description: unknown protein [Arabidopsis thaliana]
  misc_feature (48)..(326): Homolog of NCBI NO: 25309925 NR Description: hypothetical protein At2g24150 [imported] -
  misc_feature (29)..(114): Homolog of NCBI NO: 15233813 NR Description: expressed protein [Arabidopsis thaliana]
  misc_feature (134)..(321): Homolog of NCBI NO: 15233813 NR Description: expressed protein [Arabidopsis thaliana]
  misc_feature (29)..(114): Homolog of NCBI NO: 15235657 NR Description: expressed protein [Arabidopsis thaliana]
  misc_feature (134)..(332): Homolog of NCBI NO: 15235657 NR Description: expressed protein [Arabidopsis thaliana]
  misc_feature (1)..(332): Homolog of NCBI NO: 15241302 NR Description: expressed protein [Arabidopsis thaliana]
MDQNGHNDEAETVSCGNGNCKSKIVPGDDHGGDESSGTKRRKKRKTQQKTMKRRELMSYCELPEYMKDNEYILNYYRADWSIRDAFFSVFSFHNESLNVWTHLIGFIFFVALTVANIIHHDGFFPVDAKSPGNVTRWPFFVFLGGSMFCLLASSICHLFCCHSKELNVFLLRIDYAGITAMIITSFFPPIFYIFQCTPRWYFIYLAGITSMGIFTIITLFTPSLSAPKYRAFRALLFASMGLFGIVPAAHALVVNWGNPQRNVTLVYELLMAVFYLVGTGFYVGRVPERLKPGWFDRVGHSHQIFHVFVLLGALSHYAAALLFLDWRDHVGC

SEQ ID NO: 35711 - protein, 282 aa, Arabidopsis thaliana
  peptide (1)..(282): Ceres Seq. ID no. 13490504
  misc_feature (40)..(271): Pfam Name: Uncharacterised protein family (Hly-III / UPF0073) Pfam Description: Uncharacterised protein family (Hly-III /
  misc_feature (1)..(64): Homolog of NCBI NO: 20330770 NR Description: Hypothetical protein [Oryza sativa (japonica
  misc_feature (84)..(228): Homolog of NCBI NO: 20330770 NR Description: Hypothetical protein [Oryza sativa (japonica
  misc_feature (84)..(277): Homolog of NCBI NO: 30688829 NR Description: expressed protein [Arabidopsis thaliana]
  misc_feature (84)..(277): Homolog of NCBI NO: 18377749 NR Description: unknown protein [Arabidopsis thaliana]
  misc_feature (1)..(276): Homolog of NCBI NO: 25309925 NR Description: hypothetical protein At2g24150 [imported] -
  misc_feature (1)..(64): Homolog of NCBI NO: 15233813 NR Description: expressed protein [Arabidopsis thaliana]
  misc_feature (84)..(271): Homolog of NCBI NO: 15233813 NR Description: expressed protein [Arabidopsis thaliana]
  misc_feature (1)..(64): Homolog of NCBI NO: 15235657 NR Description: expressed protein [Arabidopsis thaliana]
  misc_feature (84)..(282): Homolog of NCBI NO: 15235657 NR Description: expressed protein [Arabidopsis thaliana]
  misc_feature (1)..(282): Homolog of NCBI NO: 15241302 NR Description: expressed protein [Arabidopsis thaliana]
MKRRELMSYCELPEYMKDNEYILNYYRADWSIRDAFFSVFSFHNESLNVWTHLIGFIFFVALTVANIIHHDGFFPVDAKSPGNVTRWPFFVFLGGSMFCLLASSICHLFCCHSKELNVFLLRIDYAGITAMIITSFFPPIFYIFQCTPRWYFIYLAGITSMGIFTIITLFTPSLSAPKYRAFRALLFASMGLFGIVPAAHALVVNWGNPQRNVTLVYELLMAVFYLVGTGFYVGRVPERLKPGWFDRVGHSHQIFHVFVLLGALSHYAAALLFLDWRDHVGC

SEQ ID NO: 35712 - protein, 276 aa, Arabidopsis thaliana
  peptide (1)..(276): Ceres Seq. ID no. 13490505
  misc_feature (34)..(265): Pfam Name: Uncharacterised protein family (Hly-III / UPF0073) Pfam Description: Uncharacterised protein family (Hly-III /
  misc_feature (1)..(58): Homolog of NCBI NO: 20330770 NR Description: Hypothetical protein [Oryza sativa (japonica
  misc_feature (78)..(222): Homolog of NCBI NO: 20330770 NR Description: Hypothetical protein [Oryza sativa (japonica
  misc_feature (78)..(271): Homolog of NCBI NO: 30688829 NR Description: expressed protein [Arabidopsis thaliana]
  misc_feature (78)..(271): Homolog of NCBI NO: 18377749 NR Description: unknown protein [Arabidopsis thaliana]
  misc_feature (1)..(270): Homolog of NCBI NO: 25309925 NR Description: hypothetical protein At2g24150 [imported] -
  misc_feature (1)..(58): Homolog of NCBI NO: 15233813 NR Description: expressed protein [Arabidopsis thaliana]
  misc_feature (78)..(265): Homolog of NCBI NO: 15233813 NR Description: expressed protein [Arabidopsis thaliana]
  misc_feature (1)..(58): Homolog of NCBI NO: 15235657 NR Description: expressed protein [Arabidopsis thaliana]
  misc_feature (78)..(276): Homolog of NCBI NO: 15235657 NR Description: expressed protein [Arabidopsis thaliana]
  misc_feature (1)..(276): Homolog of NCBI NO: 15241302 NR Description: expressed protein [Arabidopsis thaliana]
MSYCELPEYMKDNEYILNYYRADWSIRDAFFSVFSFHNESLNVWTHLIGFIFFVALTVANIIHHDGFFPVDAKSPGNVTRWPFFVFLGGSMFCLLASSICHLFCCHSKELNVFLLRIDYAGITAMIITSFFPPIFYIFQCTPRWYFIYLAGITSMGIFTIITLFTPSLSAPKYRAFRALLFASMGLFGIVPAAHALVVNWGNPQRNVTLVYELLMAVFYLVGTGFYVGRVPERLKPGWFDRVGHSHQIFHVFVLLGALSHYAAALLFLDWRDHVGC

SEQ ID NO: 35713 - DNA, 1217 bp, Arabidopsis thaliana
  misc_feature (1)..(1217): Ceres Seq. ID no. 12338444
  misc_feature: MA Experiment ID: 108501 Result: Down-regulated in Transcription
  misc_feature: MA Experiment 108501 PARAMETER Experiment Name: At_ap2_floral_buds_cDNA_P Parameter: Plant Line Value: ap2 (Ler.)
  misc_feature: MA Experiment 108501 PARAMETER Experiment Name: At_ap2_floral_buds_cDNA_P Parameter: Tissue Value: Closed Flower
  misc_feature: MA Experiment ID: 108595 Result: Up-regulated in Transcription
  misc_feature: MA Experiment 108595 PARAMETER Experiment Name: At_Ler-pi_Ovule_cDNA_P Parameter: Plant Line Value: null
  misc_feature: MA Experiment ID: 20000171 Result: Up-regulated in Transcription
  misc_feature: MA Experiment 20000171 PARAMETER Experiment Name: At_42deg_Heat_P Parameter: Age (day) Value: 14
  misc_feature: MA Experiment 20000171 PARAMETER Experiment Name: At_42deg_Heat_P Parameter: Organism Value: A. thaliana
  misc_feature: MA Experiment 20000171 PARAMETER Experiment Name: At_42deg_Heat_P Parameter: Plant Line Value: WS
  misc_feature: MA Experiment 20000171 PARAMETER Experiment Name: At_42deg_Heat_P Parameter: Temperature (deg C) Value: 42 vs. 22
  misc_feature: MA Experiment 20000171 PARAMETER Experiment Name: At_42deg_Heat_P Parameter: Timepoint (hr) Value: 1
  misc_feature: MA Experiment 20000171 PARAMETER Experiment Name: At_42deg_Heat_P Parameter: Tissue Value: Aerial
  misc_feature: MA Experiment ID: 20001911 Result: Up-regulated in Transcription
  misc_feature: MA Experiment 20001911 PARAMETER Experiment Name: At_Drought_Reproduction_P Parameter: Age (day) Value: 40
  misc_feature: MA Experiment 20001911 PARAMETER Experiment Name: At_Drought_Reproduction_P Parameter: Organism Value: A. thaliana
  misc_feature: MA Experiment 20001911 PARAMETER Experiment Name: At_Drought_Reproduction_P Parameter: Plant Line Value: WS
  misc_feature: MA Experiment 20001911 PARAMETER Experiment Name: At_Drought_Reproduction_P Parameter: Timepoint (day) Value: 10
  misc_feature: MA Experiment 20001911 PARAMETER Experiment Name: At_Drought_Reproduction_P Parameter: Tissue Value: Flowers
  misc_feature: MA Experiment 20001911 PARAMETER Experiment Name: At_Drought_Reproduction_P Parameter: Treatment Value: Drought vs. No Drought
attatatccaaaacaaaatctctttaactctctctattttgctcaatcttaatcgtccaatcaaaacactccgactaaaaatggctgcatctaacggcgagaaaagcttgatcgtgagcttcggtgaaatgctcatcgatttcgtcccaaccgtctccggtgtatccctcgccgatgctcctggcttcatcaaagcccctggtggtgcacctgccaacgttgccatcgccatttcccgtcttggcggtcgtgccgctttcgttggaaaactcggtgacgacgagttcggtcacatgctcgccggaatcttgaaacagaacggtgtctctgctgaaggtatcaatttcgacaccggagccaggactgcacttgcgttcgtgacactaagatctgatggagaacgtgagttcatgttctaccggaaccctagtgccgatatgctcctccgtcccgacgagctcaatcttgatgtcatcagatctgctaaggtgttccactacggatccataagcttgatcgttgagccatgtcgatctgctcacttgaaagccatggaggtggctaaggaagctggtgcgttgctttcatatgatccgaacttgaggcttcctttgtggccctcgaaggaggaggctcagaagcagattcttagcatctgggacaaagctgaagtgatcaaagtcagcgatgaagagcttatgttcttgactggatctgataaggttgatgatgagactgctttgtctctgtggcactctaatctgaaacttctcttggtcactctaggtgaaaagggttgtagttactacaccaagagcttccgtggatctgttgatcccttccatgtggatgcagtagatacaactggtgctggtgattcatttgttggtgcattgctttgcaagattgttgatgaccgtgctgtgcttgaggacgaagctcgtctgagagaagtgcttaggtttgcgaatgcttgtggagccatcacaacaacaaagaaaggagctattccagctctccctacagagtctgaagttcagagcctcctgaaaggaaactgatttcacaatgtctggatttttaggatttcaagttttaccttttcttggctttgttttttattttcccctgcttttggctctgtgttcttgtagaaccgttctattctgttatgaatctcgttttattccaattgcaaggttttttgtcgtttgagc

SEQ ID NO: 35714 - protein, 352 aa, Arabidopsis thaliana
  peptide (1)..(352): Ceres Seq. ID no. 12338445
  misc_feature (34)..(342): Pfam Name: pfkB family carbohydrate kinase Pfam Description: pfkB family carbohydrate kinase
  misc_feature (29)..(351): Homolog of NCBI NO: 585973 NR Description: FRUCTOKINASE
  misc_feature (30)..(352): Homolog of NCBI NO: 7434223 NR Description: fructokinase (EC 2.7.1.4) - beet
  misc_feature (27)..(350): Homolog of NCBI NO: 15221365 NR Description: fructokinase, putative
  misc_feature (29)..(351): Homolog of NCBI NO: 32765547 NR Description: fructokinase 2 [Lycopersicon hirsutum]
  misc_feature (29)..(351): Homolog of NCBI NO: 1915974 NR Description: fructokinase [Lycopersicon esculentum]
  misc_feature (27)..(350): Homolog of NCBI NO: 15221364 NR Description: fructokinase, putative; protein id: At1g06020.1
  misc_feature (29)..(350): Homolog of NCBI NO: 14423528 NR Description: putative fructokinase [Arabidopsis thaliana]
  misc_feature (29)..(350): Homolog of NCBI NO: 15224669 NR Description: putative fructokinase
  misc_feature (27)..(352): Homolog of NCBI NO: 15231692 NR Description: fructokinase-like protein
  misc_feature (27)..(352): Homolog of NCBI NO: 21592495 NR Description: fructokinase-like protein [Arabidopsis thaliana]
YIQNKISLTLSILLNLNRPIKTLRLKMAASNGEKSLIVSFGEMLIDFVPTVSGVSLADAPGFIKAPGGAPANVAIAISRLGGRAAFVGKLGDDEFGHMLAGILKQNGVSAEGINFDTGARTALAFVTLRSDGEREFMFYRNPSADMLLRPDELNLDVIRSAKVFHYGSISLIVEPCRSAHLKAMEVAKEAGALLSYDPNLRLPLWPSKEEAQKQILSIWDKAEVIKVSDEELMFLTGSDKVDDETALSLWHSNLKLLLVTLGEKGCSYYTKSFRGSVDPFHVDAVDTTGAGDSFVGALLCKIVDDRAVLEDEARLREVLRFANACGAITTTKKGAIPALPTESEVQSLLKGN

SEQ ID NO: 35715 - protein, 326 aa, Arabidopsis thaliana
  peptide (1)..(326): Ceres Seq. ID no. 12338447
  misc_feature (8)..(316): Pfam Name: pfkB family carbohydrate kinase Pfam Description: pfkB family carbohydrate kinase
  misc_feature (3)..(325): Homolog of NCBI NO: 585973 NR Description: FRUCTOKINASE
  misc_feature (4)..(326): Homolog of NCBI NO: 7434223 NR Description: fructokinase (EC 2.7.1.4) - beet
  misc_feature (1)..(324): Homolog of NCBI NO: 15221365 NR Description: fructokinase, putative
  misc_feature (3)..(325): Homolog of NCBI NO: 32765547 NR Description: fructokinase 2 [Lycopersicon hirsutum]
  misc_feature (3)..(325): Homolog of NCBI NO: 1915974 NR Description: fructokinase [Lycopersicon esculentum]
  misc_feature (1)..(324): Homolog of NCBI NO: 15221364 NR Description: fructokinase, putative; protein id: At1g06020.1
  misc_feature (3)..(324): Homolog of NCBI NO: 14423528 NR Description: putative fructokinase [Arabidopsis thaliana]
  misc_feature (3)..(324): Homolog of NCBI NO: 15224669 NR Description: putative fructokinase
  misc_feature (1)..(326): Homolog of NCBI NO: 15231692 NR Description: fructokinase-like protein
  misc_feature (1)..(326): Homolog of NCBI NO: 21592495 NR Description: fructokinase-like protein [Arabidopsis thaliana]
MAASNGEKSLIVSFGEMLIDFVPTVSGVSLADAPGFIKAPGGAPANVAIAISRLGGRAAFVGKLGDDEFGHMLAGILKQNGVSAEGINFDTGARTALAFVTLRSDGEREFMFYRNPSADMLLRPDELNLDVIRSAKVFHYGSISLIVEPCRSAHLKAMEVAKEAGALLSYDPNLRLPLWPSKEEAQKQILSIWDKAEVIKVSDEELMFLTGSDKVDDETALSLWHSNLKLLLVTLGEKGCSYYTKSFRGSVDPFHVDAVDTTGAGDSFVGALLCKIVDDRAVLEDEARLREVLRFANACGAITTTKKGAIPALPTESEVQSLLKGN

SEQ ID NO: 35716 - protein, 310 aa, Arabidopsis thaliana
  peptide (1)..(310): Ceres Seq. ID no. 12338448
  misc_feature (1)..(300): Pfam Name: pfkB family carbohydrate kinase Pfam Description: pfkB family carbohydrate kinase
  misc_feature (1)..(309): Homolog of NCBI NO: 585973 NR Description: FRUCTOKINASE
  misc_feature (1)..(310): Homolog of NCBI NO: 7434223 NR Description: fructokinase (EC 2.7.1.4) - beet
  misc_feature (1)..(308): Homolog of NCBI NO: 15221365 NR Description: fructokinase, putative
  misc_feature (1)..(309): Homolog of NCBI NO: 32765547 NR Description: fructokinase 2 [Lycopersicon hirsutum]
  misc_feature (1)..(309): Homolog of NCBI NO: 1915974 NR Description: fructokinase [Lycopersicon esculentum]
  misc_feature (1)..(308): Homolog of NCBI NO: 15221364 NR Description: fructokinase, putative; protein id: At1g06020.1
  misc_feature (1)..(308): Homolog of NCBI NO: 14423528 NR Description: putative fructokinase [Arabidopsis thaliana]
  misc_feature (1)..(308): Homolog of NCBI NO: 15224669 NR Description: putative fructokinase
  misc_feature (1)..(310): Homolog of NCBI NO: 15231692 NR Description: fructokinase-like protein
  misc_feature (1)..(310): Homolog of NCBI NO: 21592495 NR Description: fructokinase-like protein [Arabidopsis thaliana]
MLIDFVPTVSGVSLADAPGFIKAPGGAPANVAIAISRLGGRAAFVGKLGDDEFGHMLAGILKQNGVSAEGINFDTGARTALAFVTLRSDGEREFMFYRNPSADMLLRPDELNLDVIRSAKVFHYGSISLIVEPCRSAHLKAMEVAKEAGALLSYDPNLRLPLWPSKEEAQKQILSIWDKAEVIKVSDEELMFLTGSDKVDDETALSLWHSNLKLLLVTLGEKGCSYYTKSFRGSVDPFHVDAVDTTGAGDSFVGALLCKIVDDRAVLEDEARLREVLRFANACGAITTTKKGAIPALPTESEVQSLLKGN

SEQ ID NO: 35717 - DNA, 1100 bp, Arabidopsis thaliana
  misc_feature (1)..(1100): Ceres Seq. ID no. 12394844
  misc_feature: MA Experiment ID: 108434 Result: Down-regulated in Transcription
  misc_feature: MA Experiment 108434 PARAMETER Experiment Name: At_Root_Tips_cDNA_P Parameter: Tissue Value: Root Tips
  misc_feature: MA Experiment ID: 108572 Result: Up-regulated in Transcription
  misc_feature: MA Experiment 108572 PARAMETER Experiment Name: At_Drought_cDNA_P Parameter: Timepoint (hr) Value: 1
  misc_feature: MA Experiment 108572 PARAMETER Experiment Name: At_Drought_cDNA_P Parameter: Tissue Value: Aerial
  misc_feature: MA Experiment 108572 PARAMETER Experiment Name: At_Drought_cDNA_P Parameter: Treatment Value: Drought vs. No Drought
  misc_feature: MA Experiment ID: 108574 Result: Up-regulated in Transcription
  misc_feature: MA Experiment 108574 PARAMETER Experiment Name: At_Wounding__cDNA_P Parameter: Timepoint (hr) Value: 1
  misc_feature: MA Experiment 108574 PARAMETER Experiment Name: At_Wounding__cDNA_P Parameter: Tissue Value: Aerial
  misc_feature: MA Experiment 108574 PARAMETER Experiment Name: At_Wounding__cDNA_P Parameter: Treatment Value: Wounding vs. No Wounding
  misc_feature: MA Experiment ID: 108577 Result: Down-regulated in Transcription
  misc_feature: MA Experiment 108577 PARAMETER Experiment Name: At_42deg_Heat_cDNA_P Parameter: Temperature (deg C) Value: 42 vs. 22
  misc_feature: MA Experiment 108577 PARAMETER Experiment Name: At_42deg_Heat_cDNA_P Parameter: Timepoint (hr) Value: 6
  misc_feature: MA Experiment 108577 PARAMETER Experiment Name: At_42deg_Heat_cDNA_P Parameter: Tissue Value: Aerial
  misc_feature: MA Experiment ID: 108579 Result: Up-regulated in Transcription
  misc_feature: MA Experiment 108579 PARAMETER Experiment Name: At_4deg_Cold_cDNA_P Parameter: Temperature (deg C) Value: 4 vs. 22
  misc_feature: MA Experiment 108579 PARAMETER Experiment Name: At_4deg_Cold_cDNA_P Parameter: Timepoint (hr) Value: 6
  misc_feature: MA Experiment 108579 PARAMETER Experiment Name: At_4deg_Cold_cDNA_P Parameter: Tissue Value: Aerial
  misc_feature: MA Experiment ID: 108605 Result: Up-regulated in Transcription
  misc_feature: MA Experiment 108605 PARAMETER Experiment Name: At_100uM_ABA_cDNA_P Parameter: Timepoint (hr) Value: 6
  misc_feature: MA Experiment 108605 PARAMETER Experiment Name: At_100uM_ABA_cDNA_P Parameter: Tissue Value: Aerial
  misc_feature: MA Experiment 108605 PARAMETER Experiment Name: At_100uM_ABA_cDNA_P Parameter: Treatment Value: 100uM ABA vs. No Treatment
  misc_feature: MA Experiment ID: 108607 Result: Up-regulated in Transcription
  misc_feature: MA Experiment 108607 PARAMETER Experiment Name: At_100uM_ABA_cDNA_P Parameter: Timepoint (hr) Value: 4
  misc_feature: MA Experiment 108607 PARAMETER Experiment Name: At_100uM_ABA_cDNA_P Parameter: Tissue Value: Aerial
  misc_feature: MA Experiment 108607 PARAMETER Experiment Name: At_100uM_ABA_cDNA_P Parameter: Treatment Value: 100uM ABA vs. No Treatment
  misc_feature: MA Experiment ID: 20000069 Result: Up-regulated in Transcription
  misc_feature: MA Experiment 20000069 PARAMETER Experiment Name: At_100uM_ABA_Mutants_cDNA_P Parameter: Plant Line Value: CS23
  misc_feature: MA Experiment 20000069 PARAMETER Experiment Name: At_100uM_ABA_Mutants_cDNA_P Parameter: Timepoint (hr) Value: 6
  misc_feature: MA Experiment 20000069 PARAMETER Experiment Name: At_100uM_ABA_Mutants_cDNA_P Parameter: Tissue Value: Aerial
  misc_feature: MA Experiment 20000069 PARAMETER Experiment Name: At_100uM_ABA_Mutants_cDNA_P Parameter: Treatment Value: 100uM ABA vs. No Treatment
  misc_feature: MA Experiment ID: 20000072 Result: Up-regulated in Transcription
  misc_feature: MA Experiment 20000072 PARAMETER Experiment Name: At_100uM_ABA_Mutants_cDNA_P Parameter: Plant Line Value: CS8105
  misc_feature: MA Experiment 20000072 PARAMETER Experiment Name: At_100uM_ABA_Mutants_cDNA_P Parameter: Timepoint (hr) Value: 6
  misc_feature: MA Experiment 20000072 PARAMETER Experiment Name: At_100uM_ABA_Mutants_cDNA_P Parameter: Tissue Value: Aerial
  misc_feature: MA Experiment 20000072 PARAMETER Experiment Name: At_100uM_ABA_Mutants_cDNA_P Parameter: Treatment Value: 100uM ABA vs. No Treatment
  misc_feature: MA Experiment ID: 20000086 Result: Up-regulated in Transcription
  misc_feature: MA Experiment 20000086 PARAMETER Experiment Name: At_100uM_ABA_Mutants_cDNA_P Parameter: Plant Line Value: CS22
  misc_feature: MA Experiment 20000086 PARAMETER Experiment Name: At_100uM_ABA_Mutants_cDNA_P Parameter: Timepoint (hr) Value: 6
  misc_feature: MA Experiment 20000086 PARAMETER Experiment Name: At_100uM_ABA_Mutants_cDNA_P Parameter: Tissue Value: Aerial
  misc_feature: MA Experiment 20000086 PARAMETER Experiment Name: At_100uM_ABA_Mutants_cDNA_P Parameter: Treatment Value: 100uM ABA vs. No Treatment
  misc_feature: MA Experiment ID: 20000087 Result: Up-regulated in Transcription
  misc_feature: MA Experiment 20000087 PARAMETER Experiment Name: At_100uM_ABA_Mutants_cDNA_P Parameter: Plant Line Value: WS
  misc_feature: MA Experiment 20000087 PARAMETER Experiment Name: At_100uM_ABA_Mutants_cDNA_P Parameter: Timepoint (hr) Value: 6
  misc_feature: MA Experiment 20000087 PARAMETER Experiment Name: At_100uM_ABA_Mutants_cDNA_P Parameter: Tissue Value: Aerial
  misc_feature: MA Experiment 20000087 PARAMETER Experiment Name: At_100uM_ABA_Mutants_cDNA_P Parameter: Treatment Value: 100uM ABA vs. No Treatment
  misc_feature: MA Experiment ID: 20000090 Result: Up-regulated in Transcription
  misc_feature: MA Experiment ID: 20000093 Result: Down-regulated in Transcription
  misc_feature: MA Experiment 20000093 PARAMETER Experiment Name: At_42deg_Heat_cDNA_P Parameter: Temperature (deg C) Value: 42 vs. 22
  misc_feature: MA Experiment 20000093 PARAMETER Experiment Name: At_42deg_Heat_cDNA_P Parameter: Timepoint (hr) Value: 0.5
  misc_feature: MA Experiment 20000093 PARAMETER Experiment Name: At_42deg_Heat_cDNA_P Parameter: Tissue Value: Aerial
  misc_feature: MA Experiment ID: 20000113 Result: Down-regulated in Transcription
  misc_feature: MA Experiment 20000113 PARAMETER Experiment Name: At_42deg_Heat_cDNA_P Parameter: Temperature (deg C) Value: 42 vs. 22
  misc_feature: MA Experiment 20000113 PARAMETER Experiment Name: At_42deg_Heat_cDNA_P Parameter: Timepoint (hr) Value: 8
  misc_feature: MA Experiment 20000113 PARAMETER Experiment Name: At_42deg_Heat_cDNA_P Parameter: Tissue Value: Aerial
  misc_feature: MA Experiment ID: 20000144 Result: Down-regulated in Transcription
  misc_feature: MA Experiment 20000144 PARAMETER Experiment Name: At_42deg_Heat_cDNA_P Parameter: Temperature (deg C) Value: 42 vs. 22
  misc_feature: MA Experiment 20000144 PARAMETER Experiment Name: At_42deg_Heat_cDNA_P Parameter: Timepoint (hr) Value: 1
  misc_feature: MA Experiment 20000144 PARAMETER Experiment Name: At_42deg_Heat_cDNA_P Parameter: Tissue Value: Aerial
  misc_feature: MA Experiment ID: 20000171 Result: Down-regulated in Transcription
  misc_feature: MA Experiment 20000171 PARAMETER Experiment Name: At_42deg_Heat_P Parameter: Age (day) Value: 14
  misc_feature: MA Experiment 20000171 PARAMETER Experiment Name: At_42deg_Heat_P Parameter: Organism Value: A. thaliana
  misc_feature: MA Experiment 20000171 PARAMETER Experiment Name: At_42deg_Heat_P Parameter: Plant Line Value: WS
  misc_feature: MA Experiment 20000171 PARAMETER Experiment Name: At_42deg_Heat_P Parameter: Temperature (deg C) Value: 42 vs. 22
  misc_feature: MA Experiment 20000171 PARAMETER Experiment Name: At_42deg_Heat_P Parameter: Timepoint (hr) Value: 1
  misc_feature: MA Experiment 20000171 PARAMETER Experiment Name: At_42deg_Heat_P Parameter: Tissue Value: Aerial
  misc_feature: MA Experiment ID: 20000173 Result: Down-regulated in Transcription
  misc_feature: MA Experiment 20000173 PARAMETER Experiment Name: At_42deg_Heat_P Parameter: Age (day) Value: 14
  misc_feature: MA Experiment 20000173 PARAMETER Experiment Name: At_42deg_Heat_P Parameter: Organism Value: A. thaliana
  misc_feature: MA Experiment 20000173 PARAMETER Experiment Name: At_42deg_Heat_P Parameter: Plant Line Value: WS
  misc_feature: MA Experiment 20000173 PARAMETER Experiment Name: At_42deg_Heat_P Parameter: Temperature (deg C) Value: 42 vs. 22
  misc_feature: MA Experiment 20000173 PARAMETER Experiment Name: At_42deg_Heat_P Parameter: Timepoint (hr) Value: 6
  misc_feature: MA Experiment 20000173 PARAMETER Experiment Name: At_42deg_Heat_P Parameter: Tissue Value: Aerial
  misc_feature: MA Experiment ID: 20000185 Result: Down-regulated in Transcription
  misc_feature: MA Experiment 20000185 PARAMETER Experiment Name: At_Roots__P Parameter: Age (day) Value: 7 vs. 21
  misc_feature: MA Experiment 20000185 PARAMETER Experiment Name: At_Roots__P Parameter: Organism Value: A. thaliana
  misc_feature: MA Experiment 20000185 PARAMETER Experiment Name: At_Roots__P Parameter: Tissue Value: Roots vs. Whole Plant
  misc_feature: MA Experiment ID: 20000234 Result: Up-regulated in Transcription
  misc_feature: MA Experiment 20000234 PARAMETER Experiment Name: At_Siliques_P Parameter: Age (day) Value: 21
  misc_feature: MA Experiment 20000234 PARAMETER Experiment Name: At_Siliques_P Parameter: Organism Value: A. thaliana
  misc_feature: MA Experiment 20000234 PARAMETER Experiment Name: At_Siliques_P Parameter: Plant Line Value: WS
  misc_feature: MA Experiment 20000234 PARAMETER Experiment Name: At_Siliques_P Parameter: Tissue Value: Less Than 5mm Siliques vs. Whole Plant
  misc_feature: MA Experiment ID: 20000264 Result: Up-regulated in Transcription
  misc_feature: MA Experiment 20000264 PARAMETER Experiment Name: At_Open_Flower_P Parameter: Age (day) Value: 21
  misc_feature: MA Experiment 20000264 PARAMETER Experiment Name: At_Open_Flower_P Parameter: Plant Line Value: WS
  misc_feature: MA Experiment 20000264 PARAMETER Experiment Name: At_Open_Flower_P Parameter: Tissue Value: Open Flower vs. Whole Plant
  misc_feature: MA Experiment ID: 20000265 Result: Up-regulated in Transcription
  misc_feature: MA Experiment 20000265 PARAMETER Experiment Name: At_Open_Flower_P Parameter: Age (day) Value: 21
  misc_feature: MA Experiment 20000265 PARAMETER Experiment Name: At_Open_Flower_P Parameter: Plant Line Value: WS
  misc_feature: MA Experiment 20000265 PARAMETER Experiment Name: At_Open_Flower_P Parameter: Tissue Value: Closed Flower vs. Whole Plant
  misc_feature: MA Experiment ID: 20000286 Result: Up-regulated in Transcription
  misc_feature: MA Experiment 20000286 PARAMETER Experiment Name: At_Open_Flower_P Parameter: Age (day) Value: 21
  misc_feature: MA Experiment 20000286 PARAMETER Experiment Name: At_Open_Flower_P Parameter: Plant Line Value: WS
  misc_feature: MA Experiment 20000286 PARAMETER Experiment Name: At_Open_Flower_P Parameter: Tissue Value: Half Open vs. Whole Plant
  misc_feature: MA Experiment ID: 20000439 Result: Down-regulated in Transcription
  misc_feature: MA Experiment 20000439 PARAMETER Experiment Name: At_Roots__P Parameter: Age (day) Value: 14 vs. 21
  misc_feature: MA Experiment 20000439 PARAMETER Experiment Name: At_Roots__P Parameter: Organism Value: A. thaliana
  misc_feature: MA Experiment 20000439 PARAMETER Experiment Name: At_Roots__P Parameter: Tissue Value: Roots vs. Whole Plant
  misc_feature: MA Experiment ID: 20000441 Result: Down-regulated in Transcription
  misc_feature: MA Experiment 20000441 PARAMETER Experiment Name: At_1uM_BR-BRZ__P Parameter: Tissue Value: Shoot Apices
  misc_feature: MA Experiment 20000441 PARAMETER Experiment Name: At_1uM_BR-BRZ__P Parameter: Treatment Value: 1uM BR vs. No Treatment
  misc_feature: MA Experiment ID: 20000443 Result: Down-regulated in Transcription
  misc_feature: MA Experiment 20000443 PARAMETER Experiment Name: At_1uM_BR-BRZ__P Parameter: Tissue Value: Shoot Apices
  misc_feature: MA Experiment 20000443 PARAMETER Experiment Name: At_1uM_BR-BRZ__P Parameter: Treatment Value: 1uM BRZ vs. No Treatment
  misc_feature: MA Experiment ID: 20001905 Result: Down-regulated in Transcription
  misc_feature: MA Experiment 20001905 PARAMETER Experiment Name: At_Drought_Reproduction_P Parameter: Age (day) Value: 40
  misc_feature: MA Experiment 20001905 PARAMETER Experiment Name: At_Drought_Reproduction_P Parameter: Organism Value: A. thaliana
  misc_feature: MA Experiment 20001905 PARAMETER Experiment Name: At_Drought_Reproduction_P Parameter: Plant Line Value: WS
  misc_feature: MA Experiment 20001905 PARAMETER Experiment Name: At_Drought_Reproduction_P Parameter: Timepoint (day) Value: 10
  misc_feature: MA Experiment 20001905 PARAMETER Experiment Name: At_Drought_Reproduction_P Parameter: Tissue Value: Rosettes
  misc_feature: MA Experiment 20001905 PARAMETER Experiment Name: At_Drought_Reproduction_P Parameter: Treatment Value: Drought vs. No Drought
  misc_feature: MA Experiment ID: 20001911 Result: Down-regulated in Transcription
  misc_feature: MA Experiment 20001911 PARAMETER Experiment Name: At_Drought_Reproduction_P Parameter: Age (day) Value: 40
  misc_feature: MA Experiment 20001911 PARAMETER Experiment Name: At_Drought_Reproduction_P Parameter: Organism Value: A. thaliana
  misc_feature: MA Experiment 20001911 PARAMETER Experiment Name: At_Drought_Reproduction_P Parameter: Plant Line Value: WS
  misc_feature: MA Experiment 20001911 PARAMETER Experiment Name: At_Drought_Reproduction_P Parameter: Timepoint (day) Value: 10
  misc_feature: MA Experiment 20001911 PARAMETER Experiment Name: At_Drought_Reproduction_P Parameter: Tissue Value: Flowers
  misc_feature: MA Experiment 20001911 PARAMETER Experiment Name: At_Drought_Reproduction_P Parameter: Treatment Value: Drought vs. No Drought
aaacacaacacaacacaatatctttcaactcaaaatctttttcatttctctgtatcctcctcatatttttattcttttgtaatgacaggttgctttagcttgtctgaagcattagaacgaacttacaaatccgggttcaaaagatccggtctacgacccgtaaccatcgacttgaaagatggaaccgtagtcaacttttgggtatccaaaaccaaacccgaatccaaacccaaacctaatctcctcctcatccacggcctcggagctactgccatctggcaatggtacgacgtagctcgccgtctctcacgttatttcaacctctacatccccgacctagtcttcttcggcggatcttccacgacccgacccgaaagatccgatattttccaagcccaaacactcatgcgggccttagaagcccaatccgtcaaaaagtttagcctcgtcggtcttagctacggcggattcgttggttatcgaatggcgtcgatgtacgcagacgcggtggagaaggtggtgatatgctgcgccgccgtgtgcgtggaggagaaagatatgaaagccggtgttttcaaggtgtcggatcttgatgaagcttcgaagattcttgtgccggagtctgtgaaaaagctccgggaacttatgggttacatattttacaaaccggcgttggcaagactggttcctacttgtcttctccatgatttcatcgaacatgctttgacaagagataatatggaagagaagagagaactgatcaaagccataccaaaagacagaataatctcagagattccaaagctcaaacagccaacattgataatatggggagagcatgatcaagtgttcccattggagatgggcaagagacttgagaagcatgtaggagataatgggaaactcgttatcatcaagagaactggtcatatctttaacttcgagaaacctaaaaagtttatcaaacttctcaaatcttttcttctagagactagtaaaccacagattcctgtctctaatgtttgattcttagtcatcgttttgaagatcctctcataagtaatttccaaggattaataacatatatatcattttcacat

SEQ ID NO: 35718 - protein, 341 aa, Arabidopsis thaliana
  peptide (1)..(341): Ceres Seq. ID no. 12394845
  misc_feature (106)..(326): Pfam Name: alpha/beta hydrolase fold Pfam Description: alpha/beta hydrolase fold
  misc_feature (106)..(326): Pfam Name: alpha/beta hydrolase fold Pfam Description: alpha/beta hydrolase fold
  misc_feature (48)..(243): Homolog of NCBI NO: 27436747 NR Description: Hypothetical protein [Oryza sativa (japonica
  misc_feature (47)..(328): Homolog of NCBI NO: 18398716 NR Description: expressed protein
  misc_feature (33)..(332): Homolog of NCBI NO: 22326938 NR Description: similar to putative hydrolase; protein id:
  misc_feature (37)..(332): Homolog of NCBI NO: 37533664 NR Description: putative hydrolase [Oryza sativa (japonica
  misc_feature (33)..(330): Homolog of NCBI NO: 33146617 NR Description: hydrolase-like protein [Oryza sativa (japonica
  misc_feature (48)..(243): Homolog of NCBI NO: 27436747 NR Description: Hypothetical protein [Oryza sativa (japonica
  misc_feature (33)..(332): Homolog of NCBI NO: 22326938 NR Description: similar to putative hydrolase; protein id:
  misc_feature (33)..(330): Homolog of NCBI NO: 33146617 NR Description: hydrolase-like protein [Oryza sativa (japonica
  misc_feature (28)..(341): Homolog of NCBI NO: 18411865 NR Description: hypothetical protein
  misc_feature (28)..(240): Homolog of NCBI NO: 25406548 NR Description: hypothetical protein T11I11.15 [imported] -
  misc_feature (31)..(331): Homolog of NCBI NO: 15242419 NR Description: putative hydrolase; protein id: At5g09430.1
  misc_feature (28)..(328): Homolog of NCBI NO: 18420566 NR Description: Expressed protein
  misc_feature (28)..(328): Homolog of NCBI NO: 21536873 NR Description: putative hydrolase [Arabidopsis thaliana]
  misc_feature (37)..(332): Homolog of NCBI NO: 37533664 NR Description: putative hydrolase [Oryza sativa (japonica
  misc_feature (47)..(328): Homolog of NCBI NO: 18398716 NR Description: expressed protein
  misc_feature (28)..(328): Homolog of NCBI NO: 21536873 NR Description: putative hydrolase [Arabidopsis thaliana]
  misc_feature (28)..(328): Homolog of NCBI NO: 18420566 NR Description: Expressed protein
  misc_feature (31)..(331): Homolog of NCBI NO: 15242419 NR Description: putative hydrolase; protein id: At5g09430.1
  misc_feature (28)..(240): Homolog of NCBI NO: 25406548 NR Description: hypothetical protein T11I11.15 [imported] -
  misc_feature (28)..(341): Homolog of NCBI NO: 18411865 NR Description: hypothetical protein
KHNTTQYLSTQNLFHFSVSSSYFYSFVMTGCFSLSEALERTYKSGFKRSGLRPVTIDLKDGTVVNFWVSKTKPESKPKPNLLLIHGLGATAIWQWYDVARRLSRYFNLYIPDLVFFGGSSTTRPERSDIFQAQTLMRALEAQSVKKFSLVGLSYGGFVGYRMASMYADAVEKVVICCAAVCVEEKDMKAGVFKVSDLDEASKILVPESVKKLRELMGYIFYKPALARLVPTCLLHDFIEHALTRDNMEEKRELIKAIPKDRIISEIPKLKQPTLIIWGEHDQVFPLEMGKRLEKHVGDNGKLVIIKRTGHIFNFEKPKKFIKLLKSFLLETSKPQIPVSNV

SEQ ID NO: 35719 - protein, 314 aa, Arabidopsis thaliana
  peptide (1)..(314): Ceres Seq. ID no. 12394846
  misc_feature (79)..(299): Pfam Name: alpha/beta hydrolase fold Pfam Description: alpha/beta hydrolase fold
  misc_feature (79)..(299): Pfam Name: alpha/beta hydrolase fold Pfam Description: alpha/beta hydrolase fold
  misc_feature (21)..(216): Homolog of NCBI NO: 27436747 NR Description: Hypothetical protein [Oryza sativa (japonica
  misc_feature (20)..(301): Homolog of NCBI NO: 18398716 NR Description: expressed protein
  misc_feature (6)..(305): Homolog of NCBI NO: 22326938 NR Description: similar to putative hydrolase; protein id:
  misc_feature (10)..(305): Homolog of NCBI NO: 37533664 NR Description: putative hydrolase [Oryza sativa (japonica
  misc_feature (6)..(303): Homolog of NCBI NO: 33146617 NR Description: hydrolase-like protein [Oryza sativa (japonica
  misc_feature (21)..(216): Homolog of NCBI NO: 27436747 NR Description: Hypothetical protein [Oryza sativa (japonica
  misc_feature (6)..(305): Homolog of NCBI NO: 22326938 NR Description: similar to putative hydrolase; protein id:
  misc_feature (6)..(303): Homolog of NCBI NO: 33146617 NR Description: hydrolase-like protein [Oryza sativa (japonica
  misc_feature (1)..(314): Homolog of NCBI NO: 18411865 NR Description: hypothetical protein
  misc_feature (1)..(213): Homolog of NCBI NO: 25406548 NR Description: hypothetical protein T11I11.15 [imported] -
  misc_feature (4)..(304): Homolog of NCBI NO: 15242419 NR Description: putative hydrolase; protein id: At5g09430.1
  misc_feature (1)..(301): Homolog of NCBI NO: 18420566 NR Description: Expressed protein
  misc_feature (1)..(301): Homolog of NCBI NO: 21536873 NR Description: putative hydrolase [Arabidopsis thaliana]
  misc_feature (10)..(305): Homolog of NCBI NO: 37533664 NR Description: putative hydrolase [Oryza sativa (japonica
  misc_feature (20)..(301): Homolog of NCBI NO: 18398716 NR Description: expressed protein
  misc_feature (1)..(301): Homolog of NCBI NO: 21536873 NR Description: putative hydrolase [Arabidopsis thaliana]
  misc_feature (1)..(301): Homolog of NCBI NO: 18420566 NR Description: Expressed protein
  misc_feature (4)..(304): Homolog of NCBI NO: 15242419 NR Description: putative hydrolase; protein id: At5g09430.1
  misc_feature (1)..(213): Homolog of NCBI NO: 25406548 NR Description: hypothetical protein T11I11.15 [imported] -
  misc_feature (1)..(314): Homolog of NCBI NO: 18411865 NR Description: hypothetical protein
MTGCFSLSEALERTYKSGFKRSGLRPVTIDLKDGTVVNFWVSKTKPESKPKPNLLLIHGLGATAIWQWYDVARRLSRYFNLYIPDLVFFGGSSTTRPERSDIFQAQTLMRALEAQSVKKFSLVGLSYGGFVGYRMASMYADAVEKVVICCAAVCVEEKDMKAGVFKVSDLDEASKILVPESVKKLRELMGYIFYKPALARLVPTCLLHDFIEHALTRDNMEEKRELIKAIPKDRIISEIPKLKQPTLIIWGEHDQVFPLEMGKRLEKHVGDNGKLVIIKRTGHIFNFEKPKKFIKLLKSFLLETSKPQIPVSNV

SEQ ID NO: 35720 - protein, 206 aa, Arabidopsis thaliana
  peptide (1)..(206): Ceres Seq. ID no. 12394847
  misc_feature (1)..(191): Pfam Name: alpha/beta hydrolase fold Pfam Description: alpha/beta hydrolase fold
  misc_feature (1)..(191): Pfam Name: alpha/beta hydrolase fold Pfam Description: alpha/beta hydrolase fold
  misc_feature (1)..(108): Homolog of NCBI NO: 27436747 NR Description: Hypothetical protein [Oryza sativa (japonica
  misc_feature (1)..(193): Homolog of NCBI NO: 18398716 NR Description: expressed protein
  misc_feature (1)..(197): Homolog of NCBI NO: 22326938 NR Description: similar to putative hydrolase; protein id:
  misc_feature (1)..(197): Homolog of NCBI NO: 37533664 NR Description: putative hydrolase [Oryza sativa (japonica
  misc_feature (1)..(195): Homolog of NCBI NO: 33146617 NR Description: hydrolase-like protein [Oryza sativa (japonica
  misc_feature (1)..(108): Homolog of NCBI NO: 27436747 NR Description: Hypothetical protein [Oryza sativa (japonica
  misc_feature (1)..(197): Homolog of NCBI NO: 22326938 NR Description: similar to putative hydrolase; protein id:
  misc_feature (1)..(195): Homolog of NCBI NO: 33146617 NR Description: hydrolase-like protein [Oryza sativa (japonica
  misc_feature (1)..(206): Homolog of NCBI NO: 18411865 NR Description: hypothetical protein
  misc_feature (1)..(105): Homolog of NCBI NO: 25406548 NR Description: hypothetical protein T11I11.15 [imported] -
  misc_feature (1)..(196): Homolog of NCBI NO: 15242419 NR Description: putative hydrolase; protein id: At5g09430.1
  misc_feature (1)..(193): Homolog of NCBI NO: 18420566 NR Description: Expressed protein
  misc_feature (1)..(193): Homolog of NCBI NO: 21536873 NR Description: putative hydrolase [Arabidopsis thaliana]
  misc_feature (1)..(197): Homolog of NCBI NO: 37533664 NR Description: putative hydrolase [Oryza sativa (japonica
  misc_feature (1)..(193): Homolog of NCBI NO: 18398716 NR Description: expressed protein
  misc_feature (1)..(193): Homolog of NCBI NO: 21536873 NR Description: putative hydrolase [Arabidopsis thaliana]
  misc_feature (1)..(193): Homolog of NCBI NO: 18420566 NR Description: Expressed protein
  misc_feature (1)..(196): Homolog of NCBI NO: 15242419 NR Description: putative hydrolase; protein id: At5g09430.1
  misc_feature (1)..(105): Homolog of NCBI NO: 25406548 NR Description: hypothetical protein T11I11.15 [imported] -
  misc_feature (1)..(206): Homolog of NCBI NO: 18411865 NR Description: hypothetical protein
MRALEAQSVKKFSLVGLSYGGFVGYRMASMYADAVEKVVICCAAVCVEEKDMKAGVFKVSDLDEASKILVPESVKKLRELMGYIFYKPALARLVPTCLLHDFIEHALTRDNMEEKRELIKAIPKDRIISEIPKLKQPTLIIWGEHDQVFPLEMGKRLEKHVGDNGKLVIIKRTGHIFNFEKPKKFIKLLKSFLLETSKPQIPVSNV

SEQ ID NO: 35721 - DNA, 802 bp, Arabidopsis thaliana
  misc_feature (1)..(802): Ceres Seq. ID no. 12393581
  misc_feature: MA Experiment ID: 108488 Result: Down-regulated in Transcription
  misc_feature: MA Experiment ID: 108595 Result: Down-regulated in Transcription
  misc_feature: MA Experiment 108595 PARAMETER Experiment Name: At_Ler-pi_Ovule_cDNA_P Parameter: Plant Line Value: null
  misc_feature: MA Experiment ID: 20000069 Result: Up-regulated in Transcription
  misc_feature: MA Experiment 20000069 PARAMETER Experiment Name: At_100uM_ABA_Mutants_cDNA_P Parameter: Plant Line Value: CS23
  misc_feature: MA Experiment 20000069 PARAMETER Experiment Name: At_100uM_ABA_Mutants_cDNA_P Parameter: Timepoint (hr) Value: 6
  misc_feature: MA Experiment 20000069 PARAMETER Experiment Name: At_100uM_ABA_Mutants_cDNA_P Parameter: Tissue Value: Aerial
  misc_feature: MA Experiment 20000069 PARAMETER Experiment Name: At_100uM_ABA_Mutants_cDNA_P Parameter: Treatment Value: 100uM ABA vs. No Treatment
  misc_feature: MA Experiment ID: 20000071 Result: Up-regulated in Transcription
  misc_feature: MA Experiment 20000071 PARAMETER Experiment Name: At_100uM_ABA_Mutants_cDNA_P Parameter: Plant Line Value: CS8104
  misc_feature: MA Experiment 20000071 PARAMETER Experiment Name: At_100uM_ABA_Mutants_cDNA_P Parameter: Timepoint (hr) Value: 6
  misc_feature: MA Experiment 20000071 PARAMETER Experiment Name: At_100uM_ABA_Mutants_cDNA_P Parameter: Tissue Value: Aerial
  misc_feature: MA Experiment 20000071 PARAMETER Experiment Name: At_100uM_ABA_Mutants_cDNA_P Parameter: Treatment Value: 100uM ABA vs. No Treatment
  misc_feature: MA Experiment ID: 20000087 Result: Up-regulated in Transcription
  misc_feature: MA Experiment 20000087 PARAMETER Experiment Name: At_100uM_ABA_Mutants_cDNA_P Parameter: Plant Line Value: WS
  misc_feature: MA Experiment 20000087 PARAMETER Experiment Name: At_100uM_ABA_Mutants_cDNA_P Parameter: Timepoint (hr) Value: 6
  misc_feature: MA Experiment 20000087 PARAMETER Experiment Name: At_100uM_ABA_Mutants_cDNA_P Parameter: Tissue Value: Aerial
  misc_feature: MA Experiment 20000087 PARAMETER Experiment Name: At_100uM_ABA_Mutants_cDNA_P Parameter: Treatment Value: 100uM ABA vs. No Treatment
  misc_feature: MA Experiment ID: 20000113 Result: Up-regulated in Transcription
  misc_feature: MA Experiment 20000113 PARAMETER Experiment Name: At_42deg_Heat_cDNA_P Parameter: Temperature (deg C) Value: 42 vs. 22
  misc_feature: MA Experiment 20000113 PARAMETER Experiment Name: At_42deg_Heat_cDNA_P Parameter: Timepoint (hr) Value: 8
  misc_feature: MA Experiment 20000113 PARAMETER Experiment Name: At_42deg_Heat_cDNA_P Parameter: Tissue Value: Aerial
  misc_feature: MA Experiment ID: 20000117 Result: Up-regulated in Transcription
  misc_feature: MA Experiment 20000117 PARAMETER Experiment Name: At_100uM_ABA_Mutants_cDNA_P Parameter: Plant Line Value: Columbia
  misc_feature: MA Experiment 20000117 PARAMETER Experiment Name: At_100uM_ABA_Mutants_cDNA_P Parameter: Timepoint (hr) Value: 6
  misc_feature: MA Experiment 20000117 PARAMETER Experiment Name: At_100uM_ABA_Mutants_cDNA_P Parameter: Tissue Value: Aerial
  misc_feature: MA Experiment 20000117 PARAMETER Experiment Name: At_100uM_ABA_Mutants_cDNA_P Parameter: Treatment Value: 100uM ABA vs. No Treatment
  misc_feature: MA Experiment ID: 20000234 Result: Down-regulated in Transcription
  misc_feature: MA Experiment 20000234 PARAMETER Experiment Name: At_Siliques_P Parameter: Age (day) Value: 21
  misc_feature: MA Experiment 20000234 PARAMETER Experiment Name: At_Siliques_P Parameter: Organism Value: A. thaliana
  misc_feature: MA Experiment 20000234 PARAMETER Experiment Name: At_Siliques_P Parameter: Plant Line Value: WS
  misc_feature: MA Experiment 20000234 PARAMETER Experiment Name: At_Siliques_P Parameter: Tissue Value: Less Than 5mm Siliques vs. Whole Plant
  misc_feature: MA Experiment ID: 20000437 Result: Up-regulated in Transcription
  misc_feature: MA Experiment 20000437 PARAMETER Experiment Name: At_Drought_P Parameter: Age (day) Value: 8
  misc_feature: MA Experiment 20000437 PARAMETER Experiment Name: At_Drought_P Parameter: Organism Value: A. thaliana
  misc_feature: MA Experiment 20000437 PARAMETER Experiment Name: At_Drought_P Parameter: Plant Line Value: WS
  misc_feature: MA Experiment 20000437 PARAMETER Experiment Name: At_Drought_P Parameter: Timepoint (hr) Value: 24
  misc_feature: MA Experiment 20000437 PARAMETER Experiment Name: At_Drought_P Parameter: Tissue Value: Whole Plant
  misc_feature: MA Experiment 20000437 PARAMETER Experiment Name: At_Drought_P Parameter: Treatment Value: Drought vs. No Drought
  misc_feature: MA Experiment ID: 20001911 Result: Up-regulated in Transcription
  misc_feature: MA Experiment 20001911 PARAMETER Experiment Name: At_Drought_Reproduction_P Parameter: Age (day) Value: 40
  misc_feature: MA Experiment 20001911 PARAMETER Experiment Name: At_Drought_Reproduction_P Parameter: Organism Value: A. thaliana
  misc_feature: MA Experiment 20001911 PARAMETER Experiment Name: At_Drought_Reproduction_P Parameter: Plant Line Value: WS
  misc_feature: MA Experiment 20001911 PARAMETER Experiment Name: At_Drought_Reproduction_P Parameter: Timepoint (day) Value: 10
  misc_feature: MA Experiment 20001911 PARAMETER Experiment Name: At_Drought_Reproduction_P Parameter: Tissue Value: Flowers
  misc_feature: MA Experiment 20001911 PARAMETER Experiment Name: At_Drought_Reproduction_P Parameter: Treatment Value: Drought vs. No Drought
aagcatcactatgctcgaaaatctctctttgttcgctttgtggggaacgaactatggccgagagatggaggaacacggctctactcgtcatcgacatgcagaacgatttcatagaggaaggtgctgtgacgcaagtgaaaggaggaaaatctatagttcctaatgttatcagagtcgtcgaactcgcgaggcagcgtggtattctcgtaatttgggttgttcgagaacatgatcgtcaaggaagagatgttgaattattcaggcgccataactacagttctgagaaagtcgggccagttattaaaggcaccgtaggagcagaattggttgatggattgatgatcaacgaagaagatgactataagattgtgaaaactcgtttcagtgctttctttagtaccaatcttcattccttcttgcaaacttcaggggttaccaagttagtgattgctggtgtgcaaacgccgaactgtatccggcaaacggtgtttgatgcagtggcgctggattatcccaatgtgactgttattacagatgccacagctgctgcaacaccagagatccatactgcgaatattcttgacatgaagaatattggagtcaagactcctacattacacgagtggtccgaagaacttgcttgacaaagaccatcttaagcccttcttttatcttgttttcttgtttgtacatgtaataaagaaaatgttaatcttgttgttgtaagttacaaaatctccacctattgttgtatacttttcttgtaatcccgtccaaaaaaataaaatgtattacgtttaat

SEQ ID NO: 35722 - protein, 213 aa, Arabidopsis thaliana
  peptide (1)..(213): Ceres Seq. ID no. 12393582
  misc_feature (23)..(210): Pfam Name: Isochorismatase family Pfam Description: Isochorismatase family
  misc_feature (26)..(182): Homolog of NCBI NO: 16081574 NR Description: N-carbamoylsarcosine amidase related protein
  misc_feature (27)..(182): Homolog of NCBI NO: 13541602 NR Description: Amidase (nicotinamidase-related) [Thermoplasma
  misc_feature (23)..(186): Homolog of NCBI NO: 26247033 NR Description: Hypothetical isochorismatase family protein ycdL
  misc_feature (2)..(184): Homolog of NCBI NO: 15899200 NR Description: Isochorismatase, putative (entB-like2)
  misc_feature (23)..(185): Homolog of NCBI NO: 6681419 NR Description: ORF [Thermus thermophilus]
  misc_feature (26)..(198): Homolog of NCBI NO: 15643241 NR Description: pyrazinamidase/nicotinamidase-related protein
  misc_feature (6)..(184): Homolog of NCBI NO: 15920799 NR Description: 200aa long hypothetical isochorismatase
  misc_feature (26)..(198): Homolog of NCBI NO: 11499734 NR Description: isochorismatase (entB) [Archaeoglobus fulgidus]
  misc_feature (26)..(201): Homolog of NCBI NO: 20093942 NR Description: Amidase related to nicotinamidase [Methanopyrus
  misc_feature (18)..(213): Homolog of NCBI NO: 18401044 NR Description: putative hydrolase
ASLCSKISLCSLCGERTMAERWRNTALLVIDMQNDFIEEGAVTQVKGGKSIVPNVIRVVELARQRGILVIWVVREHDRQGRDVELFRRHNYSSEKVGPVIKGTVGAELVDGLMINEEDDYKIVKTRFSAFFSTNLHSFLQTSGVTKLVIAGVQTPNCIRQTVFDAVALDYPNVTVITDATAAATPEIHTANILDMKNIGVKTPTLHEWSEELA

SEQ ID NO: 35723 - protein, 196 aa, Arabidopsis thaliana
  peptide (1)..(196): Ceres Seq. ID no. 12393583
  misc_feature (6)..(193): Pfam Name: Isochorismatase family Pfam Description: Isochorismatase family
  misc_feature (9)..(165): Homolog of NCBI NO: 16081574 NR Description: N-carbamoylsarcosine amidase related protein
  misc_feature (10)..(165): Homolog of NCBI NO: 13541602 NR Description: Amidase (nicotinamidase-related) [Thermoplasma
  misc_feature (6)..(169): Homolog of NCBI NO: 26247033 NR Description: Hypothetical isochorismatase family protein ycdL
  misc_feature (1)..(167): Homolog of NCBI NO: 15899200 NR Description: Isochorismatase, putative (entB-like2)
  misc_feature (6)..(168): Homolog of NCBI NO: 6681419 NR Description: ORF [Thermus thermophilus]
  misc_feature (9)..(181): Homolog of NCBI NO: 15643241 NR Description: pyrazinamidase/nicotinamidase-related protein
  misc_feature (1)..(167): Homolog of NCBI NO: 15920799 NR Description: 200aa long hypothetical isochorismatase
  misc_feature (9)..(181): Homolog of NCBI NO: 11499734 NR Description: isochorismatase (entB) [Archaeoglobus fulgidus]
  misc_feature (9)..(184): Homolog of NCBI NO: 20093942 NR Description: Amidase related to nicotinamidase [Methanopyrus
  misc_feature (1)..(196): Homolog of NCBI NO: 18401044 NR Description: putative hydrolase
MAERWRNTALLVIDMQNDFIEEGAVTQVKGGKSIVPNVIRVVELARQRGILVIWVVREHDRQGRDVELFRRHNYSSEKVGPVIKGTVGAELVDGLMINEEDDYKIVKTRFSAFFSTNLHSFLQTSGVTKLVIAGVQTPNCIRQTVFDAVALDYPNVTVITDATAAATPEIHTANILDMKNIGVKTPTLHEWSEELA

SEQ ID NO: 35724 - protein, 182 aa, Arabidopsis thaliana
  peptide (1)..(182): Ceres Seq. ID no. 12393584
  misc_feature (1)..(179): Pfam Name: Isochorismatase family Pfam Description: Isochorismatase family
  misc_feature (1)..(151): Homolog of NCBI NO: 16081574 NR Description: N-carbamoylsarcosine amidase related protein
  misc_feature (1)..(151): Homolog of NCBI NO: 13541602 NR Description: Amidase (nicotinamidase-related) [Thermoplasma
  misc_feature (1)..(155): Homolog of NCBI NO: 26247033 NR Description: Hypothetical isochorismatase family protein ycdL
  misc_feature (1)..(153): Homolog of NCBI NO: 15899200 NR Description: Isochorismatase, putative (entB-like2)
  misc_feature (1)..(154): Homolog of NCBI NO: 6681419 NR Description: ORF [Thermus thermophilus]
  misc_feature (1)..(167): Homolog of NCBI NO: 15643241 NR Description: pyrazinamidase/nicotinamidase-related protein
  misc_feature (1)..(153): Homolog of NCBI NO: 15920799 NR Description: 200aa long hypothetical isochorismatase
  misc_feature (1)..(167): Homolog of NCBI NO: 11499734 NR Description: isochorismatase (entB) [Archaeoglobus fulgidus]
  misc_feature (1)..(170): Homolog of NCBI NO: 20093942 NR Description: Amidase related to nicotinamidase [Methanopyrus
  misc_feature (1)..(182): Homolog of NCBI NO: 18401044 NR Description: putative hydrolase
MQNDFIEEGAVTQVKGGKSIVPNVIRVVELARQRGILVIWVVREHDRQGRDVELFRRHNYSSEKVGPVIKGTVGAELVDGLMINEEDDYKIVKTRFSAFFSTNLHSFLQTSGVTKLVIAGVQTPNCIRQTVFDAVALDYPNVTVITDATAAATPEIHTANILDMKNIGVKTPTLHEWSEELA

SEQ ID NO: 35725 - DNA, 815 bp, Arabidopsis thaliana
  misc_feature (1)..(815): Ceres Seq. ID no. 12337498
  misc_feature: MA Experiment ID: 108461 Result: Up-regulated in Transcription
  misc_feature: MA Experiment 108461 PARAMETER Experiment Name: At_Germinating_Seeds_cDNA_P Parameter: Age (day) Value: 1 vs. 0
  misc_feature: MA Experiment 108461 PARAMETER Experiment Name: At_Germinating_Seeds_cDNA_P Parameter: Tissue Value: Germinating Seeds
  misc_feature: MA Experiment ID: 108462 Result: Up-regulated in Transcription
  misc_feature: MA Experiment 108462 PARAMETER Experiment Name: At_Germinating_Seeds_cDNA_P Parameter: Age (day) Value: 2 vs. 0
  misc_feature: MA Experiment 108462 PARAMETER Experiment Name: At_Germinating_Seeds_cDNA_P Parameter: Tissue Value: Germinating Seeds
  misc_feature: MA Experiment ID: 108463 Result: Up-regulated in Transcription
  misc_feature: MA Experiment 108463 PARAMETER Experiment Name: At_Germinating_Seeds_cDNA_P Parameter: Age (day) Value: 3 vs. 0
  misc_feature: MA Experiment 108463 PARAMETER Experiment Name: At_Germinating_Seeds_cDNA_P Parameter: Tissue Value: Germinating Seeds
  misc_feature: MA Experiment ID: 108464 Result: Up-regulated in Transcription
  misc_feature: MA Experiment 108464 PARAMETER Experiment Name: At_Germinating_Seeds_cDNA_P Parameter: Age (day) Value: 4 vs. 0
  misc_feature: MA Experiment 108464 PARAMETER Experiment Name: At_Germinating_Seeds_cDNA_P Parameter: Tissue Value: Germinating Seeds
  misc_feature: MA Experiment ID: 20000224 Result: Down-regulated in Transcription
  misc_feature: MA Experiment ID: 20000307 Result: Up-regulated in Transcription
  misc_feature: MA Experiment 20000307 PARAMETER Experiment Name: At_Germinating_Seeds_Sub_P Parameter: Age (hr) Value: 24 vs. 0
  misc_feature: MA Experiment 20000307 PARAMETER Experiment Name: At_Germinating_Seeds_Sub_P Parameter: Organism Value: A. thaliana
  misc_feature: MA Experiment 20000307 PARAMETER Experiment Name: At_Germinating_Seeds_Sub_P Parameter: Plant Line Value: WS
  misc_feature: MA Experiment 20000307 PARAMETER Experiment Name: At_Germinating_Seeds_Sub_P Parameter: Tissue Value: Germinating Seeds
  misc_feature: MA Experiment ID: 20000315 Result: Down-regulated in Transcription
  misc_feature: MA Experiment 20000315 PARAMETER Experiment Name: At_14day_Shoots-Roots_Sub_P Parameter: Age (day) Value: 14
  misc_feature: MA Experiment 20000315 PARAMETER Experiment Name: At_14day_Shoots-Roots_Sub_P Parameter: Organism Value: A. thaliana
  misc_feature: MA Experiment 20000315 PARAMETER Experiment Name: At_14day_Shoots-Roots_Sub_P Parameter: Plant Line Value: WS
  misc_feature: MA Experiment 20000315 PARAMETER Experiment Name: At_14day_Shoots-Roots_Sub_P Parameter: Tissue Value: Shoots vs. Whole Plant
  misc_feature: MA Experiment ID: 20001807 Result: Up-regulated in Transcription
  misc_feature: MA Experiment 20001807 PARAMETER Experiment Name: At_50mM_NH4NO3_L-to-H_Sub_P Parameter: Timepoint (hr) Value: 6
  misc_feature: MA Experiment 20001807 PARAMETER Experiment Name: At_50mM_NH4NO3_L-to-H_Sub_P Parameter: Tissue Value: Leaf
  misc_feature: MA Experiment 20001807 PARAMETER Experiment Name: At_50mM_NH4NO3_L-to-H_Sub_P Parameter: Treatment Value: 50mM NH4NO3 vs 100mM Mannitol
aaagaagagaagaagaactctctctctatctctatctctcttctccttcttcttcagtttcgatcattcttgaatctgattcttctcgagaaaaaagcgtttcaatttcagaaatttcgactacgattgttgctttgttcaattagaagaggcgaaaaaggatggcgacggttaatgggtacacagggaatactccggcggcgactacaccggcagccaccggatcaaagcaatctgctcctccgactaagaccgtcgatagccactccgttctaaaaaggctgcaatctgaactaatgggattgatgatgggagctgatccggggatatctgcgtttccagaggaagacaacatattttgctggaaaggaacaattacaggaagcaaagatactgtgttcgaaggaactgagtacagactctcactcactttctctaacgattatccttttaagtctcccaaagttaagtttgagacatgctgcttccaccccaatgtggatctctatggcaatatttgcttggacattcttcaggataaatggtcatctgcttatgatgtgaggacgatattactctcaattcaaagccttctcggaaccgaacatcagctcaccattgaacaatcaagcggctcagctttggagcaatcaagaagagtacaggaagatggttgagaagctctacaagcctttaaacgcatgattctcaaaaatcactgtaactgattttaaaatctcaactgtattggatcatatctcttttacttttataatctcaatttgagccaatattagcaatcaaactctaccttt

SEQ ID NO: 35726 - protein, 171 aa, Arabidopsis thaliana
  peptide (1)..(171): Ceres Seq. ID no. 12337499
  misc_feature (13)..(171): Homolog of NCBI NO: 6097072 NR Description: cyclin-selective ubiquitin carrier protein E2-C
  misc_feature (29)..(146): Homolog of NCBI NO: 4388942 NR Description: E2-C, An Ubiquitin Conjugating Enzyme Required
  misc_feature (21)..(146): Homolog of NCBI NO: 24663332 NR Description: vihar CG10682-PA
  misc_feature (17)..(146): Homolog of NCBI NO: 3915196 NR Description: Ubiquitin-conjugating enzyme E2-C
  misc_feature (8)..(146): Homolog of NCBI NO: 34903234 NR Description: unnamed protein product [Oryza sativa (japonica
  misc_feature (37)..(146): Homolog of NCBI NO: 9454557 NR Description: Putative ubiquitin carrier protein [Arabidopsis
  misc_feature (1)..(146): Homolog of NCBI NO: 25293673 NR Description: hypothetical protein F17J6.3 [imported] -
  misc_feature (1)..(146): Homolog of NCBI NO: 21618179 NR Description: E2, ubiquitin-conjugating enzyme, putative
  misc_feature (1)..(146): Homolog of NCBI NO: 18403097 NR Description: E2, ubiquitin-conjugating enzyme, putative
  misc_feature (1)..(146): Homolog of NCBI NO: 18402475 NR Description: E2, ubiquitin-conjugating enzyme, putative
MATVNGYTGNTPAATTPAATGSKQSAPPTKTVDSHSVLKRLQSELMGLMMGADPGISAFPEEDNIFCWKGTITGSKDTVFEGTEYRLSLTFSNDYPFKSPKVKFETCCFHPNVDLYGNICLDILQDKWSSAYDVRTILLSIQSLLGTEHQLTIEQSSGSALEQSRRVQEDG

SEQ ID NO: 35727 - protein, 126 aa, Arabidopsis thaliana
  peptide (1)..(126): Ceres Seq. ID no. 12337500
  misc_feature (1)..(126): Homolog of NCBI NO: 6097072 NR Description: cyclin-selective ubiquitin carrier protein E2-C
  misc_feature (1)..(101): Homolog of NCBI NO: 4388942 NR Description: E2-C, An Ubiquitin Conjugating Enzyme Required
  misc_feature (1)..(101): Homolog of NCBI NO: 24663332 NR Description: vihar CG10682-PA
  misc_feature (1)..(101): Homolog of NCBI NO: 3915196 NR Description: Ubiquitin-conjugating enzyme E2-C
  misc_feature (1)..(101): Homolog of NCBI NO: 34903234 NR Description: unnamed protein product [Oryza sativa (japonica
  misc_feature (1)..(101): Homolog of NCBI NO: 9454557 NR Description: Putative ubiquitin carrier protein [Arabidopsis
  misc_feature (1)..(101): Homolog of NCBI NO: 25293673 NR Description: hypothetical protein F17J6.3 [imported] -
  misc_feature (1)..(101): Homolog of NCBI NO: 21618179 NR Description: E2, ubiquitin-conjugating enzyme, putative
  misc_feature (1)..(101): Homolog of NCBI NO: 18403097 NR Description: E2, ubiquitin-conjugating enzyme, putative
  misc_feature (1)..(101): Homolog of NCBI NO: 18402475 NR Description: E2, ubiquitin-conjugating enzyme, putative
MGLMMGADPGISAFPEEDNIFCWKGTITGSKDTVFEGTEYRLSLTFSNDYPFKSPKVKFETCCFHPNVDLYGNICLDILQDKWSSAYDVRTILLSIQSLLGTEHQLTIEQSSGSALEQSRRVQEDG

SEQ ID NO: 35728 - protein, 123 aa, Arabidopsis thaliana
  peptide (1)..(123): Ceres Seq. ID no. 12337501
  misc_feature (1)..(123): Homolog of NCBI NO: 6097072 NR Description: cyclin-selective ubiquitin carrier protein E2-C
  misc_feature (1)..(98): Homolog of NCBI NO: 4388942 NR Description: E2-C, An Ubiquitin Conjugating Enzyme Required
  misc_feature (1)..(98): Homolog of NCBI NO: 24663332 NR Description: vihar CG10682-PA
  misc_feature (1)..(98): Homolog of NCBI NO: 3915196 NR Description: Ubiquitin-conjugating enzyme E2-C
  misc_feature (1)..(98): Homolog of NCBI NO: 34903234 NR Description: unnamed protein product [Oryza sativa (japonica
  misc_feature (1)..(98): Homolog of NCBI NO: 9454557 NR Description: Putative ubiquitin carrier protein [Arabidopsis
  misc_feature (1)..(98): Homolog of NCBI NO: 25293673 NR Description: hypothetical protein F17J6.3 [imported] -
  misc_feature (1)..(98): Homolog of NCBI NO: 21618179 NR Description: E2, ubiquitin-conjugating enzyme, putative
  misc_feature (1)..(98): Homolog of NCBI NO: 18403097 NR Description: E2, ubiquitin-conjugating enzyme, putative
  misc_feature (1)..(98): Homolog of NCBI NO: 18402475 NR Description: E2, ubiquitin-conjugating enzyme, putative
MMGADPGISAFPEEDNIFCWKGTITGSKDTVFEGTEYRLSLTFSNDYPFKSPKVKFETCCFHPNVDLYGNICLDILQDKWSSAYDVRTILLSIQSLLGTEHQLTIEQSSGSALEQSRRVQEDG

SEQ ID NO: 35729 - DNA, 590 bp, Arabidopsis thaliana
  misc_feature (1)..(590): Ceres Seq. ID no. 12420569
  misc_feature: MA Experiment ID: 108434 Result: Down-regulated in Transcription
  misc_feature: MA Experiment 108434 PARAMETER Experiment Name: At_Root_Tips_cDNA_P Parameter: Tissue Value: Root Tips
  misc_feature: MA Experiment ID: 108435 Result: Up-regulated in Transcription
  misc_feature: MA Experiment 108435 PARAMETER Experiment Name: At_stm_Mutants_cDNA_P Parameter: Plant Line Value: wt Landsburg vs stm
  misc_feature: MA Experiment 108435 PARAMETER Experiment Name: At_stm_Mutants_cDNA_P Parameter: Tissue Value: Shoot Apical Meristem Region
  misc_feature: MA Experiment ID: 108569 Result: Up-regulated in Transcription
  misc_feature: MA Experiment 108569 PARAMETER Experiment Name: At_0.001%_MeJA__cDNA_P Parameter: Timepoint (hr) Value: 6
  misc_feature: MA Experiment 108569 PARAMETER Experiment Name: At_0.001%_MeJA__cDNA_P Parameter: Tissue Value: Aerial
  misc_feature: MA Experiment 108569 PARAMETER Experiment Name: At_0.001%_MeJA__cDNA_P Parameter: Treatment Value: 0.001% MeJA vs. No Treatment
  misc_feature: MA Experiment ID: 108576 Result: Up-regulated in Transcription
  misc_feature: MA Experiment 108576 PARAMETER Experiment Name: At_42deg_Heat_cDNA_P Parameter: Temperature (deg C) Value: 42 vs. 22
  misc_feature: MA Experiment 108576 PARAMETER Experiment Name: At_42deg_Heat_cDNA_P Parameter: Timepoint (hr) Value: 1
  misc_feature: MA Experiment 108576 PARAMETER Experiment Name: At_42deg_Heat_cDNA_P Parameter: Tissue Value: Aerial
  misc_feature: MA Experiment ID: 108585 Result: Up-regulated in Transcription
  misc_feature: MA Experiment 108585 PARAMETER Experiment Name: At_5mM_NaNP_cDNA_P Parameter: Timepoint (hr) Value: 6
  misc_feature: MA Experiment 108585 PARAMETER Experiment Name: At_5mM_NaNP_cDNA_P Parameter: Tissue Value: Aerial
  misc_feature: MA Experiment 108585 PARAMETER Experiment Name: At_5mM_NaNP_cDNA_P Parameter: Treatment Value: null
  misc_feature: MA Experiment ID: 108594 Result: Down-regulated in Transcription
  misc_feature: MA Experiment 108594 PARAMETER Experiment Name: At_Ler-rhl_Root_cDNA_P Parameter: Plant Line Value: null
  misc_feature: MA Experiment ID: 108609 Result: Up-regulated in Transcription
  misc_feature: MA Experiment 108609 PARAMETER Experiment Name: At_100uM_ABA_cDNA_P Parameter: Timepoint (hr) Value: 24
  misc_feature: MA Experiment 108609 PARAMETER Experiment Name: At_100uM_ABA_cDNA_P Parameter: Tissue Value: Aerial
  misc_feature: MA Experiment 108609 PARAMETER Experiment Name: At_100uM_ABA_cDNA_P Parameter: Treatment Value: 100uM ABA vs. No Treatment
  misc_feature: MA Experiment ID: 20000090 Result: Up-regulated in Transcription
  misc_feature: MA Experiment ID: 20000112 Result: Up-regulated in Transcription
  misc_feature: MA Experiment 20000112 PARAMETER Experiment Name: At_42deg_Heat_cDNA_P Parameter: Temperature (deg C) Value: 42 vs. 22
  misc_feature: MA Experiment 20000112 PARAMETER Experiment Name: At_42deg_Heat_cDNA_P Parameter: Timepoint (hr) Value: 2
  misc_feature: MA Experiment 20000112 PARAMETER Experiment Name: At_42deg_Heat_cDNA_P Parameter: Tissue Value: Aerial
aactcatcacttacttaacatactaagagagttattagaacttgcaaaaaatggcttccaaggctttgattctgttaggtctcttctcagttcttctcgtcgtctccgaagtgtctgccgcaaggcaatcgggcatggtgaagccagagagtgaggaaactgtgcaacctgaaggttatggcggtggccacggaggacatggtggtcacggagggggaggaggccacggacatggaggacacaacggaggagggggccacggacttgacggatacggaggaggtggaggacactatggaggaggtggaggacactacggaggaggtggaggacactacggaggaggtggaggacactacggaggaggtggtggaggacacggaggtggaggacactacggaggtggtggaggaggatacggaggtggaggaggacaccacggaggaggaggccacgggctaaacgaacctgttcagactaagccgggtgtttaaaactatataatatcttcactaccatgcatgattgcatatatatatatacgcttatgtattatctatatgcctataaataaaccatggtgagtttgt

SEQ ID NO: 35730 - protein, 147 aa, Arabidopsis thaliana
  peptide (1)..(147): Ceres Seq. ID no. 12420570
  misc_feature (38)..(146): Pfam Name: Herpesvirus latent membrane protein 1 (LMP1) Pfam Description: Herpesvirus latent membrane protein 1 (LMP1)
  misc_feature (1)..(146): Homolog of NCBI NO: 81625 NR Description: glycine-rich protein 3 precursor - Arabidopsis
  misc_feature (29)..(136): Homolog of NCBI NO: 33239465 NR Description: RNA-binding protein, RRM domain
  misc_feature (1)..(146): Homolog of NCBI NO: 15224548 NR Description: putative glycine-rich protein
  misc_feature (42)..(136): Homolog of NCBI NO: 33239465 NR Description: RNA-binding protein, RRM domain
  misc_feature (3)..(136): Homolog of NCBI NO: 121644 NR Description: Glycine-rich cell wall structural protein
  misc_feature (1)..(147): Homolog of NCBI NO: 9957568 NR Description: antimicrobial peptide shep-GRP [Capsella
  misc_feature (1)..(147): Homolog of NCBI NO: 15224547 NR Description: putative glycine-rich protein; protein id:
  misc_feature (1)..(147): Homolog of NCBI NO: 21536606 NR Description: putative glycine-rich protein [Arabidopsis
  misc_feature (1)..(147): Homolog of NCBI NO: 15224540 NR Description: putative glycine-rich protein
  misc_feature (1)..(147): Homolog of NCBI NO: 30678191 NR Description: glycine-rich protein [Arabidopsis thaliana]
MASKALILLGLFSVLLVVSEVSAARQSGMVKPESEETVQPEGYGGGHGGHGGHGGGGGHGHGGHNGGGGHGLDGYGGGGGHYGGGGGHYGGGGGHYGGGGGHYGGGGGGHGGGGHYGGGGGGYGGGGGHHGGGGHGLNEPVQTKPGV

SEQ ID NO: 35731 - protein, 119 aa, Arabidopsis thaliana
  peptide (1)..(119): Ceres Seq. ID no. 12420571
  misc_feature (10)..(118): Pfam Name: Herpesvirus latent membrane protein 1 (LMP1) Pfam Description: Herpesvirus latent membrane protein 1 (LMP1)
  misc_feature (1)..(118): Homolog of NCBI NO: 81625 NR Description: glycine-rich protein 3 precursor - Arabidopsis
  misc_feature (1)..(108): Homolog of NCBI NO: 33239465 NR Description: RNA-binding protein, RRM domain
  misc_feature (1)..(118): Homolog of NCBI NO: 15224548 NR Description: putative glycine-rich protein
  misc_feature (14)..(108): Homolog of NCBI NO: 33239465 NR Description: RNA-binding protein, RRM domain
  misc_feature (1)..(108): Homolog of NCBI NO: 121644 NR Description: Glycine-rich cell wall structural protein
  misc_feature (1)..(119): Homolog of NCBI NO: 9957568 NR Description: antimicrobial peptide shep-GRP [Capsella
  misc_feature (1)..(119): Homolog of NCBI NO: 15224547 NR Description: putative glycine-rich protein; protein id:
  misc_feature (1)..(119): Homolog of NCBI NO: 21536606 NR Description: putative glycine-rich protein [Arabidopsis
  misc_feature (1)..(119): Homolog of NCBI NO: 15224540 NR Description: putative glycine-rich protein
  misc_feature (1)..(119): Homolog of NCBI NO: 30678191 NR Description: glycine-rich protein [Arabidopsis thaliana]
MVKPESEETVQPEGYGGGHGGHGGHGGGGGHGHGGHNGGGGHGLDGYGGGGGHYGGGGGHYGGGGGHYGGGGGHYGGGGGGHGGGGHYGGGGGGYGGGGGHHGGGGHGLNEPVQTKPGV

SEQ ID NO: 35732 - protein, 94 aa, Arabidopsis thaliana
  peptide (1)..(94): Ceres Seq. ID no. 12420572
  misc_feature (1)..(75): Pfam Name: Transferrin binding protein-like solute binding protein Pfam Description: Transferrin binding protein-like solute binding
MAVATEDMVVTEGEEATDMEDTTEEGATDLTDTEEVEDTMEEVEDTTEEVEDTTEEVEDTTEEVVEDTEVEDTTEVVEEDTEVEEDTTEEEATG

SEQ ID NO: 35733 - DNA, 1527 bp, Arabidopsis thaliana
  misc_feature (1)..(1527): Ceres Seq. ID no. 13496848
  misc_feature: MA Experiment ID: 20000495 Result: Up-regulated in Transcription
  misc_feature: MA Experiment 20000495 PARAMETER Experiment Name: At_Guard_Cells_P Parameter: Harvest Date Value: 8/2/2002
  misc_feature: MA Experiment 20000495 PARAMETER Experiment Name: At_Guard_Cells_P Parameter: Organism Value: A. thaliana
  misc_feature: MA Experiment 20000495 PARAMETER Experiment Name: At_Guard_Cells_P Parameter: Tissue Value: Guard Cells vs. Leaves
atgtcaaagctaatgaccagaaccagcggatcatcaagccccaacacgattccagaccaaatcgaatcaccaacaagctcaagatcggtgacgcagacgacaaacggatcgcaccaattcgtgatacaaggatacagtttagctaaaggaattggtgtagggaaacacatagcaagtgataatttctccgtaggaggttatcaatggactatcttcgtctaccctgacggtaaaaatccagaggataactcttcttacgtctctgtgttcatcgttttggctagtgaatgtactgaagttagagcgctttttgagctttctcttgttgatcaaagtggtaaagggaagcataaggttcatagccattttaatcgttcacttgatggtggtccttatacgcttaagtacagaggaagtatgtggggatacaagcgtttcttcagacggtccttgcttgagacatctgactatcttaaagacgattgcttgaaaattaattgtacagttggagttgtcgtttcagaaatgcattgcccacggttactctcgattcatgtcccagactcagaacttggatcacattttggaaagttgctggatactttacaaggctcggatgtcacatttgacgttgccggtgagaagtttcaagctcataaattggttttggctgcacgatctcagtttttcagatcaatgttttacaatactctagcagagaacaacagcgacgtagtgatcagcgatttggaacctaaggttttcaaggccttgttacacttcatgtataaagattccctcccaggagatgtggaaccattaacggctcattcatttgacctattaaggccgtccgaaatagatgatacactgattgtaaagcttctggcagctgcggaaatgtacaatctgagtaggctcagattattgtgtgaatctcacatctgcaaaggcatatctatcagctccgtgtccaagatcttagctttatccgacaaatataatgcatccgaactaaaaagcgtttccttaaaattcactgcagaaaacctagcagctgttctgcagacaaaagcatatgaagatctgaaggatgactgtccaaacctccagtctgagctactaaaggcggtcgctggttatgacgacacaagtagcagcggaggaggaaagtctcagagtgtttgggctcaactctctaacggtggtgagaccagtagccgaagggtcaggcagcgaaccacttagaagagcttcttcacatgttgttaacaaactacttttgcttaccactcgtaaacagattaaccggtttatctagtatgtaccgaatgaaagggaagcggagccagaaatcttgtaccacaagagaagagctatgcggctgtgcactagtgattaaccggtgcttcacctttcagttccttcacgtctctgtggatttttgttgttgagtctttttttcaaattcttttcccagcttcaaattactagaaacttatgatgatataatagaaagagttaact

SEQ ID NO: 35734 - protein, 415 aa, Arabidopsis thaliana
  peptide (1)..(415): Ceres Seq. ID no. 13496849
  misc_feature (195)..(319): Pfam Name: BTB/POZ domain Pfam Description: BTB/POZ domain
  misc_feature (9)..(413): Homolog of NCBI NO: 23617108 NR Description: contains ESTs
  misc_feature (19)..(413): Homolog of NCBI NO: 28269444 NR Description: unknown protein [Oryza sativa (japonica
  misc_feature (19)..(414): Homolog of NCBI NO: 34900034 NR Description: OJ1641_C04.24 [Oryza sativa (japonica
  misc_feature (25)..(411): Homolog of NCBI NO: 21536509 NR Description: unknown [Arabidopsis thaliana]
  misc_feature (20)..(411): Homolog of NCBI NO: 30678912 NR Description: expressed protein [Arabidopsis thaliana]
  misc_feature (18)..(392): Homolog of NCBI NO: 14596183 NR Description: Unknown protein [Arabidopsis thaliana]
  misc_feature (18)..(415): Homolog of NCBI NO: 21536843 NR Description: unknown [Arabidopsis thaliana]
  misc_feature (18)..(415): Homolog of NCBI NO: 15242126 NR Description: expressed protein [Arabidopsis thaliana]
  misc_feature (5)..(415): Homolog of NCBI NO: 11282376 NR Description: hypothetical protein F23N14.80 - Arabidopsis
  misc_feature (1)..(415): Homolog of NCBI NO: 30691638 NR Description: expressed protein [Arabidopsis thaliana]
MSKLMTRTSGSSSPNTIPDQIESPTSSRSVTQTTNGSHQFVIQGYSLAKGIGVGKHIASDNFSVGGYQWTIFVYPDGKNPEDNSSYVSVFIVLASECTEVRALFELSLVDQSGKGKHKVHSHFNRSLDGGPYTLKYRGSMWGYKRFFRRSLLETSDYLKDDCLKINCTVGVVVSEMHCPRLLSIHVPDSELGSHFGKLLDTLQGSDVTFDVAGEKFQAHKLVLAARSQFFRSMFYNTLAENNSDVVISDLEPKVFKALLHFMYKDSLPGDVEPLTAHSFDLLRPSEIDDTLIVKLLAAAEMYNLSRLRLLCESHICKGISISSVSKILALSDKYNASELKSVSLKFTAENLAAVLQTKAYEDLKDDCPNLQSELLKAVAGYDDTSSSGGGKSQSVWAQLSNGGETSSRRVRQRTT

SEQ ID NO: 35735 - protein, 411 aa, Arabidopsis thaliana
  peptide (1)..(411): Ceres Seq. ID no. 13496850
  misc_feature (191)..(315): Pfam Name: BTB/POZ domain Pfam Description: BTB/POZ domain
  misc_feature (5)..(409): Homolog of NCBI NO: 23617108 NR Description: contains ESTs
  misc_feature (15)..(409): Homolog of NCBI NO: 28269444 NR Description: unknown protein [Oryza sativa (japonica
  misc_feature (15)..(410): Homolog of NCBI NO: 34900034 NR Description: OJ1641_C04.24 [Oryza sativa (japonica
  misc_feature (21)..(407): Homolog of NCBI NO: 21536509 NR Description: unknown [Arabidopsis thaliana]
  misc_feature (16)..(407): Homolog of NCBI NO: 30678912 NR Description: expressed protein [Arabidopsis thaliana]
  misc_feature (14)..(388): Homolog of NCBI NO: 14596183 NR Description: Unknown protein [Arabidopsis thaliana]
  misc_feature (14)..(411): Homolog of NCBI NO: 21536843 NR Description: unknown [Arabidopsis thaliana]
  misc_feature (14)..(411): Homolog of NCBI NO: 15242126 NR Description: expressed protein [Arabidopsis thaliana]
  misc_feature (1)..(411): Homolog of NCBI NO: 11282376 NR Description: hypothetical protein F23N14.80 - Arabidopsis
  misc_feature (1)..(411): Homolog of NCBI NO: 30691638 NR Description: expressed protein [Arabidopsis thaliana]
MTRTSGSSSPNTIPDQIESPTSSRSVTQTTNGSHQFVIQGYSLAKGIGVGKHIASDNFSVGGYQWTIFVYPDGKNPEDNSSYVSVFIVLASECTEVRALFELSLVDQSGKGKHKVHSHFNRSLDGGPYTLKYRGSMWGYKRFFRRSLLETSDYLKDDCLKINCTVGVVVSEMHCPRLLSIHVPDSELGSHFGKLLDTLQGSDVTFDVAGEKFQAHKLVLAARSQFFRSMFYNTLAENNSDVVISDLEPKVFKALLHFMYKDSLPGDVEPLTAHSFDLLRPSEIDDTLIVKLLAAAEMYNLSRLRLLCESHICKGISISSVSKILALSDKYNASELKSVSLKFTAENLAAVLQTKAYEDLKDDCPNLQSELLKAVAGYDDTSSSGGGKSQSVWAQLSNGGETSSRRVRQRTT

SEQ ID NO: 35736 - protein, 276 aa, Arabidopsis thaliana
  peptide (1)..(276): Ceres Seq. ID no. 13496851
  misc_feature (56)..(180): Pfam Name: BTB/POZ domain Pfam Description: BTB/POZ domain
  misc_feature (1)..(274): Homolog of NCBI NO: 23617108 NR Description: contains ESTs
  misc_feature (1)..(274): Homolog of NCBI NO: 28269444 NR Description: unknown protein [Oryza sativa (japonica
  misc_feature (1)..(275): Homolog of NCBI NO: 34900034 NR Description: OJ1641_C04.24 [Oryza sativa (japonica
  misc_feature (1)..(272): Homolog of NCBI NO: 21536509 NR Description: unknown [Arabidopsis thaliana]
  misc_feature (1)..(272): Homolog of NCBI NO: 30678912 NR Description: expressed protein [Arabidopsis thaliana]
  misc_feature (1)..(253): Homolog of NCBI NO: 14596183 NR Description: Unknown protein [Arabidopsis thaliana]
  misc_feature (1)..(276): Homolog of NCBI NO: 21536843 NR Description: unknown [Arabidopsis thaliana]
  misc_feature (1)..(276): Homolog of NCBI NO: 15242126 NR Description: expressed protein [Arabidopsis thaliana]
  misc_feature (1)..(276): Homolog of NCBI NO: 11282376 NR Description: hypothetical protein F23N14.80 - Arabidopsis
  misc_feature (1)..(276): Homolog of NCBI NO: 30691638 NR Description: expressed protein [Arabidopsis thaliana]
MWGYKRFFRRSLLETSDYLKDDCLKINCTVGVVVSEMHCPRLLSIHVPDSELGSHFGKLLDTLQGSDVTFDVAGEKFQAHKLVLAARSQFFRSMFYNTLAENNSDVVISDLEPKVFKALLHFMYKDSLPGDVEPLTAHSFDLLRPSEIDDTLIVKLLAAAEMYNLSRLRLLCESHICKGISISSVSKILALSDKYNASELKSVSLKFTAENLAAVLQTKAYEDLKDDCPNLQSELLKAVAGYDDTSSSGGGKSQSVWAQLSNGGETSSRRVRQRTT

SEQ ID NO: 35737 - DNA, 1191 bp, Arabidopsis thaliana
  misc_feature (1)..(1191): Ceres Seq. ID no. 12328954
  misc_feature: MA Experiment ID: 20000184 Result: Down-regulated in Transcription
  misc_feature: MA Experiment 20000184 PARAMETER Experiment Name: At_Shoots__P Parameter: Age (day) Value: 7
  misc_feature: MA Experiment 20000184 PARAMETER Experiment Name: At_Shoots__P Parameter: Tissue Value: Shoots vs. Whole Plant
  misc_feature: MA Experiment ID: 20000438 Result: Down-regulated in Transcription
  misc_feature: MA Experiment 20000438 PARAMETER Experiment Name: At_Shoots__P Parameter: Age (day) Value: 14
  misc_feature: MA Experiment 20000438 PARAMETER Experiment Name: At_Shoots__P Parameter: Tissue Value: Shoots vs. Whole Plant
ccgaaagagagaaatcaatttgaccaatcaaataattgcggtggtgaaaatggctcgaaacgactcgcgatctaggtcgccgtctcaccgccgacggtactctcgctcgcctgtgactcatcgtagcagccgtcgtaccaggcgcgaccgcagccgctcaccctacacatcaaggcataagaagagcagatctcctgcaccaaggcaacaccaaagggatagaagtagttcattgtctccttccgagcatagaattgcgattgaagtgaagaaagaacaggaagacaaggcaagattgcagcatgaggcggagctcaagcgactagaagaagagactgcacagcggattgaggaagcagtaaggaaaaatgtagaggaaaggatgaaaaccgaagaagttaaagaagaaattgaaagacggacaaaggaagcttatgagaagatgtttcttgacgtggaaatacagctgaagaaagaaaaagaagctgctctaaacgaggcaagaagaaaagaagaacaagctaggagagaaagagaagagctggataagatgttagaagaaaatagtaggagggttgaagaatctcaaaggcgagaagcaatggaacttcaacgtaaagaagaggaaaggtatcgagaattggagctcctgcagagacagaaggaggaggctgcaaggagaaagaagctggaagaagaagaagagattagaaactccagcaagctatcaaatggaaacagatcacgatccaagctgcatttcggcatgggtttataattaaagaaacattgatgaaggcaaagtctgaagaaacttttgacttcttgtatcagagaataggaagatacagttgaggagttgactcatccaagtaagcacagacaacattctctagctgacccttcatagagcttgttgcttcactatgttagttaatctttggaaagaagcatctatcagtttggtaaagtttgataatagctctggcgggctttgggctggcgggttgggccggacctgatcaaaagcctgttttaacatgtgaggaataattgtaatttcttttttttgttagtttacttagaaaaagttgcatgttgttaaaaatctgataatatgatttgttttatcgatttttttgttttataataccagaagtttagaaaatgcacagtatatatactttctag

SEQ ID NO: 35738 - protein, 258 aa, Arabidopsis thaliana
  peptide (1)..(258): Ceres Seq. ID no. 12328955
  misc_feature (57)..(245): Pfam Name: Caldesmon Pfam Description: Caldesmon
  misc_feature (57)..(245): Pfam Name: Caldesmon Pfam Description: Caldesmon
  misc_feature (16)..(256): Homolog of NCBI NO: 27881860 NR Description: Unknown (protein for MGC:55375) [Danio rerio]
  misc_feature (16)..(256): Homolog of NCBI NO: 38541231 NR Description: Unknown (protein for MGC:77695) [Danio rerio]
  misc_feature (16)..(256): Homolog of NCBI NO: 28278343 NR Description: Unknown (protein for MGC:55548) [Danio rerio]
  misc_feature (19)..(256): Homolog of NCBI NO: 17862050 NR Description: LD06138p [Drosophila melanogaster]
  misc_feature (16)..(256): Homolog of NCBI NO: 34879649 NR Description: similar to hypothetical protein FLJ10154 [Rattus
  misc_feature (16)..(256): Homolog of NCBI NO: 27881860 NR Description: Unknown (protein for MGC:55375) [Danio rerio]
  misc_feature (16)..(256): Homolog of NCBI NO: 28278343 NR Description: Unknown (protein for MGC:55548) [Danio rerio]
  misc_feature (16)..(256): Homolog of NCBI NO: 34879649 NR Description: similar to hypothetical protein FLJ10154 [Rattus
  misc_feature (17)..(258): Homolog of NCBI NO: 15240607 NR Description: putative protein; protein id: At5g13340.1
  misc_feature (31)..(256): Homolog of NCBI NO: 15220234 NR Description: unknown protein; protein id: At1g10890.1
  misc_feature (98)..(246): Homolog of NCBI NO: 37532486 NR Description: hypothetical protein [Oryza sativa (japonica
  misc_feature (16)..(256): Homolog of NCBI NO: 39795605 NR Description: Unknown (protein for MGC:76303) [Silurana
  misc_feature (16)..(256): Homolog of NCBI NO: 8922259 NR Description: hypothetical protein FLJ10154 [Homo sapiens]
  misc_feature (19)..(256): Homolog of NCBI NO: 17862050 NR Description: LD06138p [Drosophila melanogaster]
  misc_feature (16)..(256): Homolog of NCBI NO: 38541231 NR Description: Unknown (protein for MGC:77695) [Danio rerio]
  misc_feature (16)..(256): Homolog of NCBI NO: 8922259 NR Description: hypothetical protein FLJ10154 [Homo sapiens]
  misc_feature (16)..(256): Homolog of NCBI NO: 39795605 NR Description: Unknown (protein for MGC:76303) [Silurana
  misc_feature (98)..(246): Homolog of NCBI NO: 37532486 NR Description: hypothetical protein [Oryza sativa (japonica
  misc_feature (31)..(256): Homolog of NCBI NO: 15220234 NR Description: unknown protein; protein id: At1g10890.1
  misc_feature (17)..(258): Homolog of NCBI NO: 15240607 NR Description: putative protein; protein id: At5g13340.1
RKREINLTNQIIAVVKMARNDSRSRSPSHRRRYSRSPVTHRSSRRTRRDRSRSPYTSRHKKSRSPAPRQHQRDRSSSLSPSEHRIAIEVKKEQEDKARLQHEAELKRLEEETAQRIEEAVRKNVEERMKTEEVKEEIERRTKEAYEKMFLDVEIQLKKEKEAALNEARRKEEQARREREELDKMLEENSRRVEESQRREAMELQRKEEERYRELELLQRQKEEAARRKKLEEEEEIRNSSKLSNGNRSRSKLHFGMGL

SEQ ID NO: 35739 - protein, 242 aa, Arabidopsis thaliana
  peptide (1)..(242): Ceres Seq. ID no. 12328956
  misc_feature (41)..(229): Pfam Name: Caldesmon Pfam Description: Caldesmon
  misc_feature (41)..(229): Pfam Name: Caldesmon Pfam Description: Caldesmon
  misc_feature (1)..(240): Homolog of NCBI NO: 27881860 NR Description: Unknown (protein for MGC:55375) [Danio rerio]
  misc_feature (1)..(240): Homolog of NCBI NO: 38541231 NR Description: Unknown (protein for MGC:77695) [Danio rerio]
  misc_feature (1)..(240): Homolog of NCBI NO: 28278343 NR Description: Unknown (protein for MGC:55548) [Danio rerio]
  misc_feature (3)..(240): Homolog of NCBI NO: 17862050 NR Description: LD06138p [Drosophila melanogaster]
  misc_feature (1)..(240): Homolog of NCBI NO: 34879649 NR Description: similar to hypothetical protein FLJ10154 [Rattus
  misc_feature (1)..(240): Homolog of NCBI NO: 27881860 NR Description: Unknown (protein for MGC:55375) [Danio rerio]
  misc_feature (1)..(240): Homolog of NCBI NO: 28278343 NR Description: Unknown (protein for MGC:55548) [Danio rerio]
  misc_feature (1)..(240): Homolog of NCBI NO: 34879649 NR Description: similar to hypothetical protein FLJ10154 [Rattus
  misc_feature (1)..(242): Homolog of NCBI NO: 15240607 NR Description: putative protein; protein id: At5g13340.1
  misc_feature (15)..(240): Homolog of NCBI NO: 15220234 NR Description: unknown protein; protein id: At1g10890.1
  misc_feature (82)..(230): Homolog of NCBI NO: 37532486 NR Description: hypothetical protein [Oryza sativa (japonica
  misc_feature (1)..(240): Homolog of NCBI NO: 39795605 NR Description: Unknown (protein for MGC:76303) [Silurana
  misc_feature (1)..(240): Homolog of NCBI NO: 8922259 NR Description: hypothetical protein FLJ10154 [Homo sapiens]
  misc_feature (3)..(240): Homolog of NCBI NO: 17862050 NR Description: LD06138p [Drosophila melanogaster]
  misc_feature (1)..(240): Homolog of NCBI NO: 38541231 NR Description: Unknown (protein for MGC:77695) [Danio rerio]
  misc_feature (1)..(240): Homolog of NCBI NO: 8922259 NR Description: hypothetical protein FLJ10154 [Homo sapiens]
  misc_feature (1)..(240): Homolog of NCBI NO: 39795605 NR Description: Unknown (protein for MGC:76303) [Silurana
  misc_feature (82)..(230): Homolog of NCBI NO: 37532486 NR Description: hypothetical protein [Oryza sativa (japonica
  misc_feature (15)..(240): Homolog of NCBI NO: 15220234 NR Description: unknown protein; protein id: At1g10890.1
  misc_feature (1)..(242): Homolog of NCBI NO: 15240607 NR Description: putative protein; protein id: At5g13340.1
MARNDSRSRSPSHRRRYSRSPVTHRSSRRTRRDRSRSPYTSRHKKSRSPAPRQHQRDRSSSLSPSEHRIAIEVKKEQEDKARLQHEAELKRLEEETAQRIEEAVRKNVEERMKTEEVKEEIERRTKEAYEKMFLDVEIQLKKEKEAALNEARRKEEQARREREELDKMLEENSRRVEESQRREAMELQRKEEERYRELELLQRQKEEAARRKKLEEEEEIRNSSKLSNGNRSRSKLHFGMGL

SEQ ID NO: 35740 - protein, 131 aa, Arabidopsis thaliana
  peptide (1)..(131): Ceres Seq. ID no. 12328957
  misc_feature (1)..(118): Pfam Name: Caldesmon Pfam Description: Caldesmon
  misc_feature (1)..(118): Pfam Name: Caldesmon Pfam Description: Caldesmon
  misc_feature (1)..(129): Homolog of NCBI NO: 27881860 NR Description: Unknown (protein for MGC:55375) [Danio rerio]
  misc_feature (1)..(129): Homolog of NCBI NO: 38541231 NR Description: Unknown (protein for MGC:77695) [Danio rerio]
  misc_feature (1)..(129): Homolog of NCBI NO: 28278343 NR Description: Unknown (protein for MGC:55548) [Danio rerio]
  misc_feature (1)..(129): Homolog of NCBI NO: 17862050 NR Description: LD06138p [Drosophila melanogaster]
  misc_feature (1)..(129): Homolog of NCBI NO: 34879649 NR Description: similar to hypothetical protein FLJ10154 [Rattus
  misc_feature (1)..(129): Homolog of NCBI NO: 27881860 NR Description: Unknown (protein for MGC:55375) [Danio rerio]
  misc_feature (1)..(129): Homolog of NCBI NO: 28278343 NR Description: Unknown (protein for MGC:55548) [Danio rerio]
  misc_feature (1)..(129): Homolog of NCBI NO: 34879649 NR Description: similar to hypothetical protein FLJ10154 [Rattus
  misc_feature (1)..(131): Homolog of NCBI NO: 15240607 NR Description: putative protein; protein id: At5g13340.1
  misc_feature (1)..(129): Homolog of NCBI NO: 15220234 NR Description: unknown protein; protein id: At1g10890.1
  misc_feature (1)..(119): Homolog of NCBI NO: 37532486 NR Description: hypothetical protein [Oryza sativa (japonica
  misc_feature (1)..(129): Homolog of NCBI NO: 39795605 NR Description: Unknown (protein for MGC:76303) [Silurana
  misc_feature (1)..(129): Homolog of NCBI NO: 8922259 NR Description: hypothetical protein FLJ10154 [Homo sapiens]
  misc_feature (1)..(129): Homolog of NCBI NO: 17862050 NR Description: LD06138p [Drosophila melanogaster]
  misc_feature (1)..(129): Homolog of NCBI NO: 38541231 NR Description: Unknown (protein for MGC:77695) [Danio rerio]
  misc_feature (1)..(129): Homolog of NCBI NO: 8922259 NR Description: hypothetical protein FLJ10154 [Homo sapiens]
  misc_feature (1)..(129): Homolog of NCBI NO: 39795605 NR Description: Unknown (protein for MGC:76303) [Silurana
  misc_feature (1)..(119): Homolog of NCBI NO: 37532486 NR Description: hypothetical protein [Oryza sativa (japonica
  misc_feature (1)..(129): Homolog of NCBI NO: 15220234 NR Description: unknown protein; protein id: At1g10890.1
  misc_feature (1)..(131): Homolog of NCBI NO: 15240607 NR Description: putative protein; protein id: At5g13340.1
MKTEEVKEEIERRTKEAYEKMFLDVEIQLKKEKEAALNEARRKEEQARREREELDKMLEENSRRVEESQRREAMELQRKEEERYRELELLQRQKEEAARRKKLEEEEEIRNSSKLSNGNRSRSKLHFGMGL

SEQ ID NO: 35741 - DNA, 865 bp, Arabidopsis thaliana
  misc_feature (1)..(865): Ceres Seq. ID no. 12559367
  misc_feature: MA Experiment ID: 20000495 Result: Down-regulated in Transcription
  misc_feature: MA Experiment 20000495 PARAMETER Experiment Name: At_Guard_Cells_P Parameter: Harvest Date Value: 8/2/2002
  misc_feature: MA Experiment 20000495 PARAMETER Experiment Name: At_Guard_Cells_P Parameter: Organism Value: A. thaliana
  misc_feature: MA Experiment 20000495 PARAMETER Experiment Name: At_Guard_Cells_P Parameter: Tissue Value: Guard Cells vs. Leaves
  misc_feature: MA Experiment ID: 20001451 Result: Down-regulated in Transcription
  misc_feature: MA Experiment 20001451 PARAMETER Experiment Name: At_Far-red-induction_P Parameter: Age (day) Value: 7
  misc_feature: MA Experiment 20001451 PARAMETER Experiment Name: At_Far-red-induction_P Parameter: Light Value: Far-red vs. White
  misc_feature: MA Experiment 20001451 PARAMETER Experiment Name: At_Far-red-induction_P Parameter: Organism Value: A. thaliana
  misc_feature: MA Experiment 20001451 PARAMETER Experiment Name: At_Far-red-induction_P Parameter: Plant Line Value: Columbia
  misc_feature: MA Experiment 20001451 PARAMETER Experiment Name: At_Far-red-induction_P Parameter: Timepoint (hr) Value: 24
  misc_feature: MA Experiment 20001451 PARAMETER Experiment Name: At_Far-red-induction_P Parameter: Tissue Value: Whole Plant
atagagattggagagcgagcgagacaaatcagaagagagagatttagatattgtagagtgagattctaaagagagagagagagagagatatggctagtggaatcgctcgtggtcgtttagctgaagagaggaaatcgtggaggaagaatcatcctcatggttttgtggcaaagccggagacggggcaggatggaactgtgaatctaatggtgtggcattgcactatacctggtaaagctgggactgattgggaaggtggattctttccattaacgatgcacttcagtgaggattatccgagcaaacctccgaaatgtaaatttccacaagggtttttccaccctaatgtctatccatctggaactgtctgtctctctatccttaacgaggattatggatggagaccagccatcaccgtgaagcagattcttgttggtattcaggatttacttgacacaccgaatcccgctgaccctgcacagacagatggttatcatctcttctgtcaggatccagttgagtacaagaaaagggtgaagctgcagtccaagcagtatcctgctcttgtctaaaacctcaaaaaagagaacgcaccaaaactgatgacaagctctgaatattttctcgtcttgtgtcattatgtttagatgtcattgggtgattgaaaactcctcattttggcaccttaagacactggaatctatttattttcgaaaaaaaactcttctttctctatttaactgttaatattcttggtactgattcagttggtgttgcttctatataatacataattatgttctctggtcgttcatgagtgttgtccaaattctactaagtgaaatatgaagtcttcattccatag

SEQ ID NO: 35742 - protein, 160 aa, Arabidopsis thaliana
  peptide (1)..(160): Ceres Seq. ID no. 12559368
  misc_feature (3)..(156): Homolog of NCBI NO: 3212324 NR Description: Human Ubc9
  misc_feature (3)..(156): Homolog of NCBI NO: 2194010 NR Description: Chain A, Human Ubiquitin-Conjugating Enzyme Ubc9
  misc_feature (3)..(159): Homolog of NCBI NO: 30584109 NR Description: Homo sapiens ubiquitin-conjugating enzyme E2I
  misc_feature (3)..(157): Homolog of NCBI NO: 7621708 NR Description: putative E2 enzyme Ubc9 [Dictyostelium discoideum]
  misc_feature (1)..(158): Homolog of NCBI NO: 38345867 NR Description: OSJNBa0064M23.9 [Oryza sativa (japonica
  misc_feature (35)..(160): Homolog of NCBI NO: 11272348 NR Description: ubiquitin-conjugating enzyme
  misc_feature (1)..(160): Homolog of NCBI NO: 37536440 NR Description: putative ubiquitin-conjugating enzyme
  misc_feature (1)..(160): Homolog of NCBI NO: 20975734 NR Description: putative ubiquitin-conjugating enzyme [Populus
  misc_feature (1)..(160): Homolog of NCBI NO: 25446690 NR Description: Putative ubiquitin-conjugating enzyme
  misc_feature (1)..(160): Homolog of NCBI NO: 15230881 NR Description: E2 ubiquitin-conjugating-like enzyme, Ahus5
  misc_feature (3)..(156): Homolog of NCBI NO: 3212324 NR Description: Human Ubc9
  misc_feature (3)..(156): Homolog of NCBI NO: 2194010 NR Description: Chain A, Human Ubiquitin-Conjugating Enzyme Ubc9
  misc_feature (3)..(159): Homolog of NCBI NO: 30584109 NR Description: Homo sapiens ubiquitin-conjugating enzyme E2I
  misc_feature (3)..(157): Homolog of NCBI NO: 7621708 NR Description: putative E2 enzyme Ubc9 [Dictyostelium discoideum]
  misc_feature (1)..(158): Homolog of NCBI NO: 38345867 NR Description: OSJNBa0064M23.9 [Oryza sativa (japonica
  misc_feature (35)..(160): Homolog of NCBI NO: 11272348 NR Description: ubiquitin-conjugating enzyme
  misc_feature (1)..(160): Homolog of NCBI NO: 37536440 NR Description: putative ubiquitin-conjugating enzyme
  misc_feature (1)..(160): Homolog of NCBI NO: 20975734 NR Description: putative ubiquitin-conjugating enzyme [Populus
  misc_feature (1)..(160): Homolog of NCBI NO: 25446690 NR Description: Putative ubiquitin-conjugating enzyme
  misc_feature (1)..(160): Homolog of NCBI NO: 15230881 NR Description: E2 ubiquitin-conjugating-like enzyme, Ahus5
MASGIARGRLAEERKSWRKNHPHGFVAKPETGQDGTVNLMVWHCTIPGKAGTDWEGGFFPLTMHFSEDYPSKPPKCKFPQGFFHPNVYPSGTVCLSILNEDYGWRPAITVKQILVGIQDLLDTPNPADPAQTDGYHLFCQDPVEYKKRVKLQSKQYPALV

SEQ ID NO: 35743 - protein, 121 aa, Arabidopsis thaliana
  peptide (1)..(121): Ceres Seq. ID no. 12559369
  misc_feature (1)..(117): Homolog of NCBI NO: 3212324 NR Description: Human Ubc9
  misc_feature (1)..(117): Homolog of NCBI NO: 2194010 NR Description: Chain A, Human Ubiquitin-Conjugating Enzyme Ubc9
  misc_feature (1)..(120): Homolog of NCBI NO: 30584109 NR Description: Homo sapiens ubiquitin-conjugating enzyme E2I
  misc_feature (1)..(118): Homolog of NCBI NO: 7621708 NR Description: putative E2 enzyme Ubc9 [Dictyostelium discoideum]
  misc_feature (1)..(119): Homolog of NCBI NO: 38345867 NR Description: OSJNBa0064M23.9 [Oryza sativa (japonica
  misc_feature (1)..(121): Homolog of NCBI NO: 11272348 NR Description: ubiquitin-conjugating enzyme
  misc_feature (1)..(121): Homolog of NCBI NO: 37536440 NR Description: putative ubiquitin-conjugating enzyme
  misc_feature (1)..(121): Homolog of NCBI NO: 20975734 NR Description: putative ubiquitin-conjugating enzyme [Populus
  misc_feature (1)..(121): Homolog of NCBI NO: 25446690 NR Description: Putative ubiquitin-conjugating enzyme
  misc_feature (1)..(121): Homolog of NCBI NO: 15230881 NR Description: E2 ubiquitin-conjugating-like enzyme, Ahus5
  misc_feature (1)..(117): Homolog of NCBI NO: 3212324 NR Description: Human Ubc9
  misc_feature (1)..(117): Homolog of NCBI NO: 2194010 NR Description: Chain A, Human Ubiquitin-Conjugating Enzyme Ubc9
  misc_feature (1)..(120): Homolog of NCBI NO: 30584109 NR Description: Homo sapiens ubiquitin-conjugating enzyme E2I
  misc_feature (1)..(118): Homolog of NCBI NO: 7621708 NR Description: putative E2 enzyme Ubc9 [Dictyostelium discoideum]
  misc_feature (1)..(119): Homolog of NCBI NO: 38345867 NR Description: OSJNBa0064M23.9 [Oryza sativa (japonica
  misc_feature (1)..(121): Homolog of NCBI NO: 11272348 NR Description: ubiquitin-conjugating enzyme
  misc_feature (1)..(121): Homolog of NCBI NO: 37536440 NR Description: putative ubiquitin-conjugating enzyme
  misc_feature (1)..(121): Homolog of NCBI NO: 20975734 NR Description: putative ubiquitin-conjugating enzyme [Populus
  misc_feature (1)..(121): Homolog of NCBI NO: 25446690 NR Description: Putative ubiquitin-conjugating enzyme
  misc_feature (1)..(121): Homolog of NCBI NO: 15230881 NR Description: E2 ubiquitin-conjugating-like enzyme, Ahus5
MVWHCTIPGKAGTDWEGGFFPLTMHFSEDYPSKPPKCKFPQGFFHPNVYPSGTVCLSILNEDYGWRPAITVKQILVGIQDLLDTPNPADPAQTDGYHLFCQDPVEYKKRVKLQSKQYPALV

SEQ ID NO: 35744 - protein, 98 aa, Arabidopsis thaliana
  peptide (1)..(98): Ceres Seq. ID no. 12559370
  misc_feature (1)..(94): Homolog of NCBI NO: 4507785 NR Description: ubiquitin-conjugating enzyme E2I (UBC9 homolog,
  misc_feature (1)..(94): Homolog of NCBI NO: 2194010 NR Description: Chain A, Human Ubiquitin-Conjugating Enzyme Ubc9
  misc_feature (1)..(97): Homolog of NCBI NO: 30584109 NR Description: Homo sapiens ubiquitin-conjugating enzyme E2I
  misc_feature (1)..(95): Homolog of NCBI NO: 7621708 NR Description: putative E2 enzyme Ubc9 [Dictyostelium discoideum]
  misc_feature (1)..(96): Homolog of NCBI NO: 38345867 NR Description: OSJNBa0064M23.9 [Oryza sativa (japonica
  misc_feature (1)..(98): Homolog of NCBI NO: 11272348 NR Description: ubiquitin-conjugating enzyme
  misc_feature (1)..(98): Homolog of NCBI NO: 37536440 NR Description: putative ubiquitin-conjugating enzyme
  misc_feature (1)..(98): Homolog of NCBI NO: 20975734 NR Description: putative ubiquitin-conjugating enzyme [Populus
  misc_feature (1)..(98): Homolog of NCBI NO: 25446690 NR Description: Putative ubiquitin-conjugating enzyme
  misc_feature (1)..(98): Homolog of NCBI NO: 15230881 NR Description: E2 ubiquitin-conjugating-like enzyme, Ahus5
  misc_feature (1)..(94): Homolog of NCBI NO: 4507785 NR Description: ubiquitin-conjugating enzyme E2I (UBC9 homolog,
  misc_feature (1)..(94): Homolog of NCBI NO: 2194010 NR Description: Chain A, Human Ubiquitin-Conjugating Enzyme Ubc9
  misc_feature (1)..(97): Homolog of NCBI NO: 30584109 NR Description: Homo sapiens ubiquitin-conjugating enzyme E2I
  misc_feature (1)..(95): Homolog of NCBI NO: 7621708 NR Description: putative E2 enzyme Ubc9 [Dictyostelium discoideum]
  misc_feature (1)..(96): Homolog of NCBI NO: 38345867 NR Description: OSJNBa0064M23.9 [Oryza sativa (japonica
  misc_feature (1)..(98): Homolog of NCBI NO: 11272348 NR Description: ubiquitin-conjugating enzyme
  misc_feature (1)..(98): Homolog of NCBI NO: 37536440 NR Description: putative ubiquitin-conjugating enzyme
  misc_feature (1)..(98): Homolog of NCBI NO: 20975734 NR Description: putative ubiquitin-conjugating enzyme [Populus
  misc_feature (1)..(98): Homolog of NCBI NO: 25446690 NR Description: Putative ubiquitin-conjugating enzyme
  misc_feature (1)..(98): Homolog of NCBI NO: 15230881 NR Description: E2 ubiquitin-conjugating-like enzyme, Ahus5
MHFSEDYPSKPPKCKFPQGFFHPNVYPSGTVCLSILNEDYGWRPAITVKQILVGIQDLLDTPNPADPAQTDGYHLFCQDPVEYKKRVKLQSKQYPALV

SEQ ID NO: 35745 - DNA, 533 bp, Arabidopsis thaliana
  misc_feature (1)..(533): Ceres Seq. ID no. 12738178
  misc_feature: MA Experiment ID: 108434 Result: Down-regulated in Transcription
  misc_feature: MA Experiment 108434 PARAMETER Experiment Name: At_Root_Tips_cDNA_P Parameter: Tissue Value: Root Tips
  misc_feature: MA Experiment ID: 108463 Result: Up-regulated in Transcription
  misc_feature: MA Experiment 108463 PARAMETER Experiment Name: At_Germinating_Seeds_cDNA_P Parameter: Age (day) Value: 3 vs. 0
  misc_feature: MA Experiment 108463 PARAMETER Experiment Name: At_Germinating_Seeds_cDNA_P Parameter: Tissue Value: Germinating Seeds
  misc_feature: MA Experiment ID: 108573 Result: Up-regulated in Transcription
  misc_feature: MA Experiment 108573 PARAMETER Experiment Name: At_Drought_cDNA_P Parameter: Timepoint (hr) Value: 6
  misc_feature: MA Experiment 108573 PARAMETER Experiment Name: At_Drought_cDNA_P Parameter: Tissue Value: Aerial
  misc_feature: MA Experiment 108573 PARAMETER Experiment Name: At_Drought_cDNA_P Parameter: Treatment Value: Drought vs. No Drought
  misc_feature: MA Experiment ID: 108574 Result: Up-regulated in Transcription
  misc_feature: MA Experiment 108574 PARAMETER Experiment Name: At_Wounding__cDNA_P Parameter: Timepoint (hr) Value: 1
  misc_feature: MA Experiment 108574 PARAMETER Experiment Name: At_Wounding__cDNA_P Parameter: Tissue Value: Aerial
  misc_feature: MA Experiment 108574 PARAMETER Experiment Name: At_Wounding__cDNA_P Parameter: Treatment Value: Wounding vs. No Wounding
  misc_feature: MA Experiment ID: 108579 Result: Up-regulated in Transcription
  misc_feature: MA Experiment 108579 PARAMETER Experiment Name: At_4deg_Cold_cDNA_P Parameter: Temperature (deg C) Value: 4 vs. 22
  misc_feature: MA Experiment 108579 PARAMETER Experiment Name: At_4deg_Cold_cDNA_P Parameter: Timepoint (hr) Value: 6
  misc_feature: MA Experiment 108579 PARAMETER Experiment Name: At_4deg_Cold_cDNA_P Parameter: Tissue Value: Aerial
  misc_feature: MA Experiment ID: 108585 Result: Up-regulated in Transcription
  misc_feature: MA Experiment 108585 PARAMETER Experiment Name: At_5mM_NaNP_cDNA_P Parameter: Timepoint (hr) Value: 6
  misc_feature: MA Experiment 108585 PARAMETER Experiment Name: At_5mM_NaNP_cDNA_P Parameter: Tissue Value: Aerial
  misc_feature: MA Experiment 108585 PARAMETER Experiment Name: At_5mM_NaNP_cDNA_P Parameter: Treatment Value: null
  misc_feature: MA Experiment ID: 108595 Result: Up-regulated in Transcription
  misc_feature: MA Experiment 108595 PARAMETER Experiment Name: At_Ler-pi_Ovule_cDNA_P Parameter: Plant Line Value: null
  misc_feature: MA Experiment ID: 108667 Result: Up-regulated in Transcription
  misc_feature: MA Experiment 108667 PARAMETER Experiment Name: At_2mM_SA_cDNA_P Parameter: Plant Line Value: WS
  misc_feature: MA Experiment 108667 PARAMETER Experiment Name: At_2mM_SA_cDNA_P Parameter: Timepoint (hr) Value: 1
  misc_feature: MA Experiment 108667 PARAMETER Experiment Name: At_2mM_SA_cDNA_P Parameter: Treatment Value: 2mM SA vs. No Treatment
  misc_feature: MA Experiment ID: 108668 Result: Up-regulated in Transcription
  misc_feature: MA Experiment 108668 PARAMETER Experiment Name: At_2mM_SA_cDNA_P Parameter: Plant Line Value: WS
  misc_feature: MA Experiment 108668 PARAMETER Experiment Name: At_2mM_SA_cDNA_P Parameter: Timepoint (hr) Value: 6
  misc_feature: MA Experiment 108668 PARAMETER Experiment Name: At_2mM_SA_cDNA_P Parameter: Treatment Value: 2mM SA vs. No Treatment
  misc_feature: MA Experiment ID: 20000069 Result: Up-regulated in Transcription
  misc_feature: MA Experiment 20000069 PARAMETER Experiment Name: At_100uM_ABA_Mutants_cDNA_P Parameter: Plant Line Value: CS23
  misc_feature: MA Experiment 20000069 PARAMETER Experiment Name: At_100uM_ABA_Mutants_cDNA_P Parameter: Timepoint (hr) Value: 6
  misc_feature: MA Experiment 20000069 PARAMETER Experiment Name: At_100uM_ABA_Mutants_cDNA_P Parameter: Tissue Value: Aerial
  misc_feature: MA Experiment 20000069 PARAMETER Experiment Name: At_100uM_ABA_Mutants_cDNA_P Parameter: Treatment Value: 100uM ABA vs. No Treatment
  misc_feature: MA Experiment ID: 20000070 Result: Up-regulated in Transcription
  misc_feature: MA Experiment 20000070 PARAMETER Experiment Name: At_100uM_ABA_Mutants_cDNA_P Parameter: Plant Line Value: CS24
  misc_feature: MA Experiment 20000070 PARAMETER Experiment Name: At_100uM_ABA_Mutants_cDNA_P Parameter: Timepoint (hr) Value: 6
  misc_feature: MA Experiment 20000070 PARAMETER Experiment Name: At_100uM_ABA_Mutants_cDNA_P Parameter: Tissue Value: Aerial
  misc_feature: MA Experiment 20000070 PARAMETER Experiment Name: At_100uM_ABA_Mutants_cDNA_P Parameter: Treatment Value: 100uM ABA vs. No Treatment
  misc_feature: MA Experiment ID: 20000071 Result: Up-regulated in Transcription
  misc_feature: MA Experiment 20000071 PARAMETER Experiment Name: At_100uM_ABA_Mutants_cDNA_P Parameter: Plant Line Value: CS8104
  misc_feature: MA Experiment 20000071 PARAMETER Experiment Name: At_100uM_ABA_Mutants_cDNA_P Parameter: Timepoint (hr) Value: 6
  misc_feature: MA Experiment 20000071 PARAMETER Experiment Name: At_100uM_ABA_Mutants_cDNA_P Parameter: Tissue Value: Aerial
  misc_feature: MA Experiment 20000071 PARAMETER Experiment Name: At_100uM_ABA_Mutants_cDNA_P Parameter: Treatment Value: 100uM ABA vs. No Treatment
  misc_feature: MA Experiment ID: 20000086 Result: Up-regulated in Transcription
  misc_feature: MA Experiment 20000086 PARAMETER Experiment Name: At_100uM_ABA_Mutants_cDNA_P Parameter: Plant Line Value: CS22
  misc_feature: MA Experiment 20000086 PARAMETER Experiment Name: At_100uM_ABA_Mutants_cDNA_P Parameter: Timepoint (hr) Value: 6
  misc_feature: MA Experiment 20000086 PARAMETER Experiment Name: At_100uM_ABA_Mutants_cDNA_P Parameter: Tissue Value: Aerial
  misc_feature: MA Experiment 20000086 PARAMETER Experiment Name: At_100uM_ABA_Mutants_cDNA_P Parameter: Treatment Value: 100uM ABA vs. No Treatment
  misc_feature: MA Experiment ID: 20000087 Result: Up-regulated in Transcription
  misc_feature: MA Experiment 20000087 PARAMETER Experiment Name: At_100uM_ABA_Mutants_cDNA_P Parameter: Plant Line Value: WS
  misc_feature: MA Experiment 20000087 PARAMETER Experiment Name: At_100uM_ABA_Mutants_cDNA_P Parameter: Timepoint (hr) Value: 6
  misc_feature: MA Experiment 20000087 PARAMETER Experiment Name: At_100uM_ABA_Mutants_cDNA_P Parameter: Tissue Value: Aerial
  misc_feature: MA Experiment 20000087 PARAMETER Experiment Name: At_100uM_ABA_Mutants_cDNA_P Parameter: Treatment Value: 100uM ABA vs. No Treatment
  misc_feature: MA Experiment ID: 20000089 Result: Up-regulated in Transcription
  misc_feature: MA Experiment ID: 20000090 Result: Up-regulated in Transcription
  misc_feature: MA Experiment ID: 20000117 Result: Up-regulated in Transcription
  misc_feature: MA Experiment 20000117 PARAMETER Experiment Name: At_100uM_ABA_Mutants_cDNA_P Parameter: Plant Line Value: Columbia
  misc_feature: MA Experiment 20000117 PARAMETER Experiment Name: At_100uM_ABA_Mutants_cDNA_P Parameter: Timepoint (hr) Value: 6
  misc_feature: MA Experiment 20000117 PARAMETER Experiment Name: At_100uM_ABA_Mutants_cDNA_P Parameter: Tissue Value: Aerial
  misc_feature: MA Experiment 20000117 PARAMETER Experiment Name: At_100uM_ABA_Mutants_cDNA_P Parameter: Treatment Value: 100uM ABA vs. No Treatment
  misc_feature: MA Experiment ID: 20000182 Result: Up-regulated in Transcription
  misc_feature: MA Experiment 20000182 PARAMETER Experiment Name: At_2mM_SA_P Parameter: Age (day) Value: 14
  misc_feature: MA Experiment 20000182 PARAMETER Experiment Name: At_2mM_SA_P Parameter: Organism Value: A. thaliana
  misc_feature: MA Experiment 20000182 PARAMETER Experiment Name: At_2mM_SA_P Parameter: Plant Line Value: WS
  misc_feature: MA Experiment 20000182 PARAMETER Experiment Name: At_2mM_SA_P Parameter: Timepoint (hr) Value: 6
  misc_feature: MA Experiment 20000182 PARAMETER Experiment Name: At_2mM_SA_P Parameter: Tissue Value: Aerial
  misc_feature: MA Experiment 20000182 PARAMETER Experiment Name: At_2mM_SA_P Parameter: Treatment Value: 2mM SA vs. No Treatment
  misc_feature: MA Experiment ID: 20000184 Result: Down-regulated in Transcription
  misc_feature: MA Experiment 20000184 PARAMETER Experiment Name: At_Shoots__P Parameter: Age (day) Value: 7
  misc_feature: MA Experiment 20000184 PARAMETER Experiment Name: At_Shoots__P Parameter: Tissue Value: Shoots vs. Whole Plant
  misc_feature: MA Experiment ID: 20000234 Result: Down-regulated in Transcription
  misc_feature: MA Experiment 20000234 PARAMETER Experiment Name: At_Siliques_P Parameter: Age (day) Value: 21
  misc_feature: MA Experiment 20000234 PARAMETER Experiment Name: At_Siliques_P Parameter: Organism Value: A. thaliana
  misc_feature: MA Experiment 20000234 PARAMETER Experiment Name: At_Siliques_P Parameter: Plant Line Value: WS
  misc_feature: MA Experiment 20000234 PARAMETER Experiment Name: At_Siliques_P Parameter: Tissue Value: Less Than 5mm Siliques vs. Whole Plant
  misc_feature: MA Experiment ID: 20000235 Result: Down-regulated in Transcription
  misc_feature: MA Experiment 20000235 PARAMETER Experiment Name: At_Siliques_P Parameter: Age (day) Value: 21
  misc_feature: MA Experiment 20000235 PARAMETER Experiment Name: At_Siliques_P Parameter: Organism Value: A. thaliana
  misc_feature: MA Experiment 20000235 PARAMETER Experiment Name: At_Siliques_P Parameter: Plant Line Value: WS
  misc_feature: MA Experiment 20000235 PARAMETER Experiment Name: At_Siliques_P Parameter: Tissue Value: 5-10mm Siliques vs. Whole Plant
  misc_feature: MA Experiment ID: 20000264 Result: Down-regulated in Transcription
  misc_feature: MA Experiment 20000264 PARAMETER Experiment Name: At_Open_Flower_P Parameter: Age (day) Value: 21
  misc_feature: MA Experiment 20000264 PARAMETER Experiment Name: At_Open_Flower_P Parameter: Plant Line Value: WS
  misc_feature: MA Experiment 20000264 PARAMETER Experiment Name: At_Open_Flower_P Parameter: Tissue Value: Open Flower vs. Whole Plant
  misc_feature: MA Experiment ID: 20000265 Result: Down-regulated in Transcription
  misc_feature: MA Experiment 20000265 PARAMETER Experiment Name: At_Open_Flower_P Parameter: Age (day) Value: 21
  misc_feature: MA Experiment 20000265 PARAMETER Experiment Name: At_Open_Flower_P Parameter: Plant Line Value: WS
  misc_feature: MA Experiment 20000265 PARAMETER Experiment Name: At_Open_Flower_P Parameter: Tissue Value: Closed Flower vs. Whole Plant
  misc_feature: MA Experiment ID: 20000286 Result: Down-regulated in Transcription
  misc_feature: MA Experiment 20000286 PARAMETER Experiment Name: At_Open_Flower_P Parameter: Age (day) Value: 21
  misc_feature: MA Experiment 20000286 PARAMETER Experiment Name: At_Open_Flower_P Parameter: Plant Line Value: WS
  misc_feature: MA Experiment 20000286 PARAMETER Experiment Name: At_Open_Flower_P Parameter: Tissue Value: Half Open vs. Whole Plant
  misc_feature: MA Experiment ID: 20000436 Result: Up-regulated in Transcription
  misc_feature: MA Experiment 20000436 PARAMETER Experiment Name: At_Drought_P Parameter: Age (day) Value: 7
  misc_feature: MA Experiment 20000436 PARAMETER Experiment Name: At_Drought_P Parameter: Organism Value: A. thaliana
  misc_feature: MA Experiment 20000436 PARAMETER Experiment Name: At_Drought_P Parameter: Plant Line Value: WS
  misc_feature: MA Experiment 20000436 PARAMETER Experiment Name: At_Drought_P Parameter: Timepoint (hr) Value: 12
  misc_feature: MA Experiment 20000436 PARAMETER Experiment Name: At_Drought_P Parameter: Tissue Value: Whole Plant
  misc_feature: MA Experiment 20000436 PARAMETER Experiment Name: At_Drought_P Parameter: Treatment Value: Drought vs. No Drought
  misc_feature: MA Experiment ID: 20000437 Result: Up-regulated in Transcription
  misc_feature: MA Experiment 20000437 PARAMETER Experiment Name: At_Drought_P Parameter: Age (day) Value: 8
  misc_feature: MA Experiment 20000437 PARAMETER Experiment Name: At_Drought_P Parameter: Organism Value: A. thaliana
  misc_feature: MA Experiment 20000437 PARAMETER Experiment Name: At_Drought_P Parameter: Plant Line Value: WS
  misc_feature: MA Experiment 20000437 PARAMETER Experiment Name: At_Drought_P Parameter: Timepoint (hr) Value: 24
  misc_feature: MA Experiment 20000437 PARAMETER Experiment Name: At_Drought_P Parameter: Tissue Value: Whole Plant
  misc_feature: MA Experiment 20000437 PARAMETER Experiment Name: At_Drought_P Parameter: Treatment Value: Drought vs. No Drought
  misc_feature: MA Experiment ID: 20000438 Result: Down-regulated in Transcription
  misc_feature: MA Experiment 20000438 PARAMETER Experiment Name: At_Shoots__P Parameter: Age (day) Value: 14
  misc_feature: MA Experiment 20000438 PARAMETER Experiment Name: At_Shoots__P Parameter: Tissue Value: Shoots vs. Whole Plant
  misc_feature: MA Experiment ID: 20000439 Result: Down-regulated in Transcription
  misc_feature: MA Experiment 20000439 PARAMETER Experiment Name: At_Roots__P Parameter: Age (day) Value: 14 vs. 21
  misc_feature: MA Experiment 20000439 PARAMETER Experiment Name: At_Roots__P Parameter: Organism Value: A. thaliana
  misc_feature: MA Experiment 20000439 PARAMETER Experiment Name: At_Roots__P Parameter: Tissue Value: Roots vs. Whole Plant
  misc_feature: MA Experiment ID: 20000441 Result: Up-regulated in Transcription
  misc_feature: MA Experiment 20000441 PARAMETER Experiment Name: At_1uM_BR-BRZ__P Parameter: Tissue Value: Shoot Apices
  misc_feature: MA Experiment 20000441 PARAMETER Experiment Name: At_1uM_BR-BRZ__P Parameter: Treatment Value: 1uM BR vs. No Treatment
  misc_feature: MA Experiment ID: 20000453 Result: Up-regulated in Transcription
  misc_feature: MA Experiment 20000453 PARAMETER Experiment Name: At_100uM_ABA_P Parameter: Age (day) Value: 15
  misc_feature: MA Experiment 20000453 PARAMETER Experiment Name: At_100uM_ABA_P Parameter: Organism Value: A. thaliana
  misc_feature: MA Experiment 20000453 PARAMETER Experiment Name: At_100uM_ABA_P Parameter: Plant Line Value: WS
  misc_feature: MA Experiment 20000453 PARAMETER Experiment Name: At_100uM_ABA_P Parameter: Timepoint (hr) Value: 24
  misc_feature: MA Experiment 20000453 PARAMETER Experiment Name: At_100uM_ABA_P Parameter: Tissue Value: Aerial
  misc_feature: MA Experiment 20000453 PARAMETER Experiment Name: At_100uM_ABA_P Parameter: Treatment Value: 100uM ABA vs. No Treatment
  misc_feature: MA Experiment ID: 20000460 Result: Up-regulated in Transcription
  misc_feature: MA Experiment 20000460 PARAMETER Experiment Name: At_10percent_PEG_P Parameter: Age (day) Value: 12
  misc_feature: MA Experiment 20000460 PARAMETER Experiment Name: At_10percent_PEG_P Parameter: Organism Value: A. thaliana
  misc_feature: MA Experiment 20000460 PARAMETER Experiment Name: At_10percent_PEG_P Parameter: Plant Line Value: WS
  misc_feature: MA Experiment 20000460 PARAMETER Experiment Name: At_10percent_PEG_P Parameter: Timepoint (day) Value: 12
  misc_feature: MA Experiment 20000460 PARAMETER Experiment Name: At_10percent_PEG_P Parameter: Tissue Value: Whole Plant
  misc_feature: MA Experiment 20000460 PARAMETER Experiment Name: At_10percent_PEG_P Parameter: Treatment Value: 10percent PEG vs. No Treatment
  misc_feature: MA Experiment ID: 20000495 Result: Down-regulated in Transcription
  misc_feature: MA Experiment 20000495 PARAMETER Experiment Name: At_Guard_Cells_P Parameter: Harvest Date Value: 8/2/2002
  misc_feature: MA Experiment 20000495 PARAMETER Experiment Name: At_Guard_Cells_P Parameter: Organism Value: A. thaliana
  misc_feature: MA Experiment 20000495 PARAMETER Experiment Name: At_Guard_Cells_P Parameter: Tissue Value: Guard Cells vs. Leaves
  misc_feature: MA Experiment ID: 20001911 Result: Up-regulated in Transcription
  misc_feature: MA Experiment 20001911 PARAMETER Experiment Name: At_Drought_Reproduction_P Parameter: Age (day) Value: 40
  misc_feature: MA Experiment 20001911 PARAMETER Experiment Name: At_Drought_Reproduction_P Parameter: Organism Value: A. thaliana
  misc_feature: MA Experiment 20001911 PARAMETER Experiment Name: At_Drought_Reproduction_P Parameter: Plant Line Value: WS
  misc_feature: MA Experiment 20001911 PARAMETER Experiment Name: At_Drought_Reproduction_P Parameter: Timepoint (day) Value: 10
  misc_feature: MA Experiment 20001911 PARAMETER Experiment Name: At_Drought_Reproduction_P Parameter: Tissue Value: Flowers
  misc_feature: MA Experiment 20001911 PARAMETER Experiment Name: At_Drought_Reproduction_P Parameter: Treatment Value: Drought vs. No Drought
cacggtttgtggaaacactggattactacacagcgatgtttgagtcgatagatgcagcacggccacgggatgataagcagagaatcagcgcagaacaacactgtgtagcaagagacatagtgaacatgatagcatgtgaggagtcagagagagtagagagacacgaggtactggggaaatggagggtcagaatgatgatggctgggttcacgggttggccggtcagcacatctgcagcgtttgcagcgagtgagatgctgaaagcttatgacaaaaactacaaactgggaggccatgaaggagcgctctacctcttctggaagagacgacccatggctacatgttccgtgtggaagccaaacccaaactagattgggtaagttatagtgatgatggttacttgagtggataaagaagagcacaacaaaaacacatctgtcgctgtaaattttttaggatgtgcaatgatgttttaagttgtaacacaacctaagttatatatgtatacaaaccaaacctggtggttgttttcc

SEQ ID NO: 35746 - protein, 122 aa, Arabidopsis thaliana
  peptide (1)..(122): Ceres Seq. ID no. 12738179
  misc_feature (1)..(118): Homolog of NCBI NO: 25405382 NR Description: scarecrow-like protein [imported] - Arabidopsis
  misc_feature (1)..(118): Homolog of NCBI NO: 14517552 NR Description: F17J6.12/F17J6.12 [Arabidopsis thaliana]
  misc_feature (1)..(118): Homolog of NCBI NO: 11358827 NR Description: scarecrow-like protein 5
  misc_feature (1)..(118): Homolog of NCBI NO: 15224425 NR Description: putative SCARECROW gene regulator
  misc_feature (1)..(118): Homolog of NCBI NO: 26450054 NR Description: putative SCARECROW gene regulator [Arabidopsis
  misc_feature (1)..(118): Homolog of NCBI NO: 15238903 NR Description: SCARECROW gene regulator-like
  misc_feature (1)..(117): Homolog of NCBI NO: 25989334 NR Description: chitin-inducible gibberellin-responsive protein
  misc_feature (1)..(117): Homolog of NCBI NO: 37533564 NR Description: putative SCARECROW gene regulator-like
  misc_feature (1)..(122): Homolog of NCBI NO: 16930433 NR Description: AT4g17230/dl4650c [Arabidopsis thaliana]
  misc_feature (1)..(122): Homolog of NCBI NO: 11358824 NR Description: scarecrow-like protein 13
RFVETLDYYTAMFESIDAARPRDDKQRISAEQHCVARDIVNMIACEESERVERHEVLGKWRVRMMMAGFTGWPVSTSAAFAASEMLKAYDKNYKLGGHEGALYLFWKRRPMATCSVWKPNPN

SEQ ID NO: 35747 - protein, 111 aa, Arabidopsis thaliana
  peptide (1)..(111): Ceres Seq. ID no. 12738180
  misc_feature (1)..(107): Homolog of NCBI NO: 25405382 NR Description: scarecrow-like protein [imported] - Arabidopsis
  misc_feature (1)..(107): Homolog of NCBI NO: 14517552 NR Description: F17J6.12/F17J6.12 [Arabidopsis thaliana]
  misc_feature (1)..(107): Homolog of NCBI NO: 11358827 NR Description: scarecrow-like protein 5
  misc_feature (1)..(107): Homolog of NCBI NO: 15224425 NR Description: putative SCARECROW gene regulator
  misc_feature (1)..(107): Homolog of NCBI NO: 26450054 NR Description: putative SCARECROW gene regulator [Arabidopsis
  misc_feature (1)..(107): Homolog of NCBI NO: 15238903 NR Description: SCARECROW gene regulator-like
  misc_feature (1)..(106): Homolog of NCBI NO: 25989334 NR Description: chitin-inducible gibberellin-responsive protein
  misc_feature (1)..(106): Homolog of NCBI NO: 37533564 NR Description: putative SCARECROW gene regulator-like
  misc_feature (1)..(111): Homolog of NCBI NO: 16930433 NR Description: AT4g17230/dl4650c [Arabidopsis thaliana]
  misc_feature (1)..(111): Homolog of NCBI NO: 11358824 NR Description: scarecrow-like protein 13
MFESIDAARPRDDKQRISAEQHCVARDIVNMIACEESERVERHEVLGKWRVRMMMAGFTGWPVSTSAAFAASEMLKAYDKNYKLGGHEGALYLFWKRRPMATCSVWKPNPN

SEQ ID NO: 35748 - protein, 81 aa, Arabidopsis thaliana
  peptide (1)..(81): Ceres Seq. ID no. 12738181
  misc_feature (1)..(77): Homolog of NCBI NO: 25405382 NR Description: scarecrow-like protein [imported] - Arabidopsis
  misc_feature (1)..(77): Homolog of NCBI NO: 14517552 NR Description: F17J6.12/F17J6.12 [Arabidopsis thaliana]
  misc_feature (1)..(77): Homolog of NCBI NO: 11358827 NR Description: scarecrow-like protein 5
  misc_feature (1)..(77): Homolog of NCBI NO: 15224425 NR Description: putative SCARECROW gene regulator
  misc_feature (1)..(77): Homolog of NCBI NO: 26450054 NR Description: putative SCARECROW gene regulator [Arabidopsis
  misc_feature (1)..(77): Homolog of NCBI NO: 15238903 NR Description: SCARECROW gene regulator-like
  misc_feature (1)..(76): Homolog of NCBI NO: 25989334 NR Description: chitin-inducible gibberellin-responsive protein
  misc_feature (1)..(76): Homolog of NCBI NO: 37533564 NR Description: putative SCARECROW gene regulator-like
  misc_feature (1)..(81): Homolog of NCBI NO: 16930433 NR Description: AT4g17230/dl4650c [Arabidopsis thaliana]
  misc_feature (1)..(81): Homolog of NCBI NO: 11358824 NR Description: scarecrow-like protein 13
MIACEESERVERHEVLGKWRVRMMMAGFTGWPVSTSAAFAASEMLKAYDKNYKLGGHEGALYLFWKRRPMATCSVWKPNPN

SEQ ID NO: 35749 - DNA, 987 bp, Arabidopsis thaliana
  misc_feature (1)..(987): Ceres Seq. ID no. 12332248
  misc_feature: MA Experiment ID: 108434 Result: Down-regulated in Transcription
  misc_feature: MA Experiment 108434 PARAMETER Experiment Name: At_Root_Tips_cDNA_P Parameter: Tissue Value: Root Tips
  misc_feature: MA Experiment ID: 108435 Result: Down-regulated in Transcription
  misc_feature: MA Experiment 108435 PARAMETER Experiment Name: At_stm_Mutants_cDNA_P Parameter: Plant Line Value: wt Landsburg vs stm
  misc_feature: MA Experiment 108435 PARAMETER Experiment Name: At_stm_Mutants_cDNA_P Parameter: Tissue Value: Shoot Apical Meristem Region
  misc_feature: MA Experiment ID: 108461 Result: Up-regulated in Transcription
  misc_feature: MA Experiment 108461 PARAMETER Experiment Name: At_Germinating_Seeds_cDNA_P Parameter: Age (day) Value: 1 vs. 0
  misc_feature: MA Experiment 108461 PARAMETER Experiment Name: At_Germinating_Seeds_cDNA_P Parameter: Tissue Value: Germinating Seeds
  misc_feature: MA Experiment ID: 108463 Result: Up-regulated in Transcription
  misc_feature: MA Experiment 108463 PARAMETER Experiment Name: At_Germinating_Seeds_cDNA_P Parameter: Age (day) Value: 3 vs. 0
  misc_feature: MA Experiment 108463 PARAMETER Experiment Name: At_Germinating_Seeds_cDNA_P Parameter: Tissue Value: Germinating Seeds
  misc_feature: MA Experiment ID: 108464 Result: Up-regulated in Transcription
  misc_feature: MA Experiment 108464 PARAMETER Experiment Name: At_Germinating_Seeds_cDNA_P Parameter: Age (day) Value: 4 vs. 0
  misc_feature: MA Experiment 108464 PARAMETER Experiment Name: At_Germinating_Seeds_cDNA_P Parameter: Tissue Value: Germinating Seeds
  misc_feature: MA Experiment ID: 20000111 Result: Up-regulated in Transcription
  misc_feature: MA Experiment 20000111 PARAMETER Experiment Name: At_42deg_Heat_cDNA_P Parameter: Temperature (deg C) Value: 42 vs. 22
  misc_feature: MA Experiment 20000111 PARAMETER Experiment Name: At_42deg_Heat_cDNA_P Parameter: Timepoint (hr) Value: 6
  misc_feature: MA Experiment 20000111 PARAMETER Experiment Name: At_42deg_Heat_cDNA_P Parameter: Tissue Value: Aerial
  misc_feature: MA Experiment ID: 20000112 Result: Up-regulated in Transcription
  misc_feature: MA Experiment 20000112 PARAMETER Experiment Name: At_42deg_Heat_cDNA_P Parameter: Temperature (deg C) Value: 42 vs. 22
  misc_feature: MA Experiment 20000112 PARAMETER Experiment Name: At_42deg_Heat_cDNA_P Parameter: Timepoint (hr) Value: 2
  misc_feature: MA Experiment 20000112 PARAMETER Experiment Name: At_42deg_Heat_cDNA_P Parameter: Tissue Value: Aerial
  misc_feature: MA Experiment ID: 20000113 Result: Up-regulated in Transcription
  misc_feature: MA Experiment 20000113 PARAMETER Experiment Name: At_42deg_Heat_cDNA_P Parameter: Temperature (deg C) Value: 42 vs. 22
  misc_feature: MA Experiment 20000113 PARAMETER Experiment Name: At_42deg_Heat_cDNA_P Parameter: Timepoint (hr) Value: 8
  misc_feature: MA Experiment 20000113 PARAMETER Experiment Name: At_42deg_Heat_cDNA_P Parameter: Tissue Value: Aerial
  misc_feature: MA Experiment ID: 20000173 Result: Up-regulated in Transcription
  misc_feature: MA Experiment 20000173 PARAMETER Experiment Name: At_42deg_Heat_P Parameter: Age (day) Value: 14
  misc_feature: MA Experiment 20000173 PARAMETER Experiment Name: At_42deg_Heat_P Parameter: Organism Value: A. thaliana
  misc_feature: MA Experiment 20000173 PARAMETER Experiment Name: At_42deg_Heat_P Parameter: Plant Line Value: WS
  misc_feature: MA Experiment 20000173 PARAMETER Experiment Name: At_42deg_Heat_P Parameter: Temperature (deg C) Value: 42 vs. 22
  misc_feature: MA Experiment 20000173 PARAMETER Experiment Name: At_42deg_Heat_P Parameter: Timepoint (hr) Value: 6
  misc_feature: MA Experiment 20000173 PARAMETER Experiment Name: At_42deg_Heat_P Parameter: Tissue Value: Aerial
  misc_feature: MA Experiment ID: 20000185 Result: Down-regulated in Transcription
  misc_feature: MA Experiment 20000185 PARAMETER Experiment Name: At_Roots__P Parameter: Age (day) Value: 7 vs. 21
  misc_feature: MA Experiment 20000185 PARAMETER Experiment Name: At_Roots__P Parameter: Organism Value: A. thaliana
  misc_feature: MA Experiment 20000185 PARAMETER Experiment Name: At_Roots__P Parameter: Tissue Value: Roots vs. Whole Plant
  misc_feature: MA Experiment ID: 20000227 Result: Down-regulated in Transcription
  misc_feature: MA Experiment 20000227 PARAMETER Experiment Name: At_Root-Tips-vs-Tops_P Parameter: Tissue Value: Root Tips vs. Root Tops
  misc_feature: MA Experiment ID: 20000439 Result: Down-regulated in Transcription
  misc_feature: MA Experiment 20000439 PARAMETER Experiment Name: At_Roots__P Parameter: Age (day) Value: 14 vs. 21
  misc_feature: MA Experiment 20000439 PARAMETER Experiment Name: At_Roots__P Parameter: Organism Value: A. thaliana
  misc_feature: MA Experiment 20000439 PARAMETER Experiment Name: At_Roots__P Parameter: Tissue Value: Roots vs. Whole Plant
  misc_feature: MA Experiment ID: 20000495 Result: Down-regulated in Transcription
  misc_feature: MA Experiment 20000495 PARAMETER Experiment Name: At_Guard_Cells_P Parameter: Harvest Date Value: 8/2/2002
  misc_feature: MA Experiment 20000495 PARAMETER Experiment Name: At_Guard_Cells_P Parameter: Organism Value: A. thaliana
  misc_feature: MA Experiment 20000495 PARAMETER Experiment Name: At_Guard_Cells_P Parameter: Tissue Value: Guard Cells vs. Leaves
  misc_feature: MA Experiment ID: 20000709 Result: Up-regulated in Transcription
  misc_feature: MA Experiment 20000709 PARAMETER Experiment Name: At_15mM_NH4NO3_L-to-H_P Parameter: Age (hr) Value: 14
  misc_feature: MA Experiment 20000709 PARAMETER Experiment Name: At_15mM_NH4NO3_L-to-H_P Parameter: Organism Value: A. thaliana
  misc_feature: MA Experiment 20000709 PARAMETER Experiment Name: At_15mM_NH4NO3_L-to-H_P Parameter: Plant Line Value: WS
  misc_feature: MA Experiment 20000709 PARAMETER Experiment Name: At_15mM_NH4NO3_L-to-H_P Parameter: Timepoint (hr) Value: 4
  misc_feature: MA Experiment 20000709 PARAMETER Experiment Name: At_15mM_NH4NO3_L-to-H_P Parameter: Tissue Value: Aerial
  misc_feature: MA Experiment 20000709 PARAMETER Experiment Name: At_15mM_NH4NO3_L-to-H_P Parameter: Treatment Value: 15mM NH4NO3 vs. 30mM Mannitol
  misc_feature: MA Experiment ID: 20001451 Result: Down-regulated in Transcription
  misc_feature: MA Experiment 20001451 PARAMETER Experiment Name: At_Far-red-induction_P Parameter: Age (day) Value: 7
  misc_feature: MA Experiment 20001451 PARAMETER Experiment Name: At_Far-red-induction_P Parameter: Light Value: Far-red vs. White
  misc_feature: MA Experiment 20001451 PARAMETER Experiment Name: At_Far-red-induction_P Parameter: Organism Value: A. thaliana
  misc_feature: MA Experiment 20001451 PARAMETER Experiment Name: At_Far-red-induction_P Parameter: Plant Line Value: Columbia
  misc_feature: MA Experiment 20001451 PARAMETER Experiment Name: At_Far-red-induction_P Parameter: Timepoint (hr) Value: 24
  misc_feature: MA Experiment 20001451 PARAMETER Experiment Name: At_Far-red-induction_P Parameter: Tissue Value: Whole Plant
aattggagagacatgatgagagaaatatcactggaatctgaaccagacagtttctgatcttcttctccttagaggatctctcggagaagattcaaaaccaagaacaatctcagtctctatctctctctctgggtgcatttagatggctggagttgtgcgattaacgacgacgtcggttcaagccattcgtgtctcctcgtccttcagctcctttgccaccgctcttaatcctctgcaaccttgcttacctccaaactcgaatctgaattccgacaagagattgcgtcttctctcatcttctccttcctgctcgtcttctcattaccacccatcttctggtctcggaagccatctcccccttagacgacccaagagccaagtggttcgtgtcaagttagatgaaaatgtagccgagacagagccaccgaaatggtgggagaggaatgctccaaacatggtcgatattcattctactgaagagttcttgagcgctttaagcggtgcgggtgaaagattagttattgtagagttttatggaacttggtgtgcttcttgcagagcattgttcccaaagctttgcaagacagcggtggaacatcccgatatagtgttccttaaagtaaactttgatgagaataaaccgatgtgcaagagtttgaacgtgagagtgcttccttttttccacttttaccgtggagctgatggtcagcttgagtcattctcatgttctcttgctaagtttcagaagataaaagatgcaatccaactgcacaataccgatcgttgcagcctcggtccagccaaggtacctgaaggcttaacattagccaaaccagctgcatcaagttgaagtgccagatttttagatatattactaaggcaacaatctttggttgctcaagcaaatactcagcttaaaattctgtatatcgtcatatttttgggtgtaaaagaatacttcctaaagccagttacgattcttctgcc

SEQ ID NO: 35750 - protein, 235 aa, Arabidopsis thaliana
  peptide (1)..(235): Ceres Seq. ID no. 12332249
  misc_feature (105)..(212): Pfam Name: Thioredoxin Pfam Description: Thioredoxin
  misc_feature (96)..(221): Homolog of NCBI NO: 34394520 NR Description: putative thioredoxin [Oryza sativa (japonica
  misc_feature (96)..(234): Homolog of NCBI NO: 15223262 NR Description: putative thioredoxin
  misc_feature (64)..(234): Homolog of NCBI NO: 308906 NR Description: thioredoxin
  misc_feature (105)..(218): Homolog of NCBI NO: 14423392 NR Description: Thioredoxin-like protein [Arabidopsis thaliana]
  misc_feature (18)..(216): Homolog of NCBI NO: 4973258 NR Description: thioredoxin-like 2 [Arabidopsis thaliana]
  misc_feature (8)..(216): Homolog of NCBI NO: 15236134 NR Description: putative thioredoxin
  misc_feature (8)..(216): Homolog of NCBI NO: 21553512 NR Description: putative thioredoxin [Arabidopsis thaliana]
  misc_feature (1)..(218): Homolog of NCBI NO: 30688403 NR Description: thioredoxin family [Arabidopsis thaliana]
  misc_feature (1)..(235): Homolog of NCBI NO: 18417441 NR Description: Thioredoxin - like protein
  misc_feature (1)..(235): Homolog of NCBI NO: 21554313 NR Description: thioredoxin-like protein [Arabidopsis thaliana]
MAGVVRLTTTSVQAIRVSSSFSSFATALNPLQPCLPPNSNLNSDKRLRLLSSSPSCSSSHYHPSSGLGSHLPLRRPKSQVVRVKLDENVAETEPPKWWERNAPNMVDIHSTEEFLSALSGAGERLVIVEFYGTWCASCRALFPKLCKTAVEHPDIVFLKVNFDENKPMCKSLNVRVLPFFHFYRGADGQLESFSCSLAKFQKIKDAIQLHNTDRCSLGPAKVPEGLTLAKPAASS

SEQ ID NO: 35751 - protein, 131 aa, Arabidopsis thaliana
  peptide (1)..(131): Ceres Seq. ID no. 12332250
  misc_feature (1)..(108): Pfam Name: Thioredoxin Pfam Description: Thioredoxin
  misc_feature (1)..(117): Homolog of NCBI NO: 34394520 NR Description: putative thioredoxin [Oryza sativa (japonica
  misc_feature (1)..(130): Homolog of NCBI NO: 15223262 NR Description: putative thioredoxin
  misc_feature (1)..(130): Homolog of NCBI NO: 308906 NR Description: thioredoxin
  misc_feature (1)..(114): Homolog of NCBI NO: 14423392 NR Description: Thioredoxin-like protein [Arabidopsis thaliana]
  misc_feature (1)..(112): Homolog of NCBI NO: 4973258 NR Description: thioredoxin-like 2 [Arabidopsis thaliana]
  misc_feature (1)..(112): Homolog of NCBI NO: 15236134 NR Description: putative thioredoxin
  misc_feature (1)..(112): Homolog of NCBI NO: 21553512 NR Description: putative thioredoxin [Arabidopsis thaliana]
  misc_feature (1)..(114): Homolog of NCBI NO: 30688403 NR Description: thioredoxin family [Arabidopsis thaliana]
  misc_feature (1)..(131): Homolog of NCBI NO: 18417441 NR Description: Thioredoxin - like protein
  misc_feature (1)..(131): Homolog of NCBI NO: 21554313 NR Description: thioredoxin-like protein [Arabidopsis thaliana]
MVDIHSTEEFLSALSGAGERLVIVEFYGTWCASCRALFPKLCKTAVEHPDIVFLKVNFDENKPMCKSLNVRVLPFFHFYRGADGQLESFSCSLAKFQKIKDAIQLHNTDRCSLGPAKVPEGLTLAKPAASS

SEQ ID NO: 35752 - DNA, 818 bp, Arabidopsis thaliana
  misc_feature (1)..(818): Ceres Seq. ID no. 12332246
  misc_feature: MA Experiment ID: 108462 Result: Down-regulated in Transcription
  misc_feature: MA Experiment 108462 PARAMETER Experiment Name: At_Germinating_Seeds_cDNA_P Parameter: Age (day) Value: 2 vs. 0
  misc_feature: MA Experiment 108462 PARAMETER Experiment Name: At_Germinating_Seeds_cDNA_P Parameter: Tissue Value: Germinating Seeds
  misc_feature: MA Experiment ID: 108577 Result: Down-regulated in Transcription
  misc_feature: MA Experiment 108577 PARAMETER Experiment Name: At_42deg_Heat_cDNA_P Parameter: Temperature (deg C) Value: 42 vs. 22
  misc_feature: MA Experiment 108577 PARAMETER Experiment Name: At_42deg_Heat_cDNA_P Parameter: Timepoint (hr) Value: 6
  misc_feature: MA Experiment 108577 PARAMETER Experiment Name: At_42deg_Heat_cDNA_P Parameter: Tissue Value: Aerial
  misc_feature: MA Experiment ID: 20000030 Result: Up-regulated in Transcription
  misc_feature: MA Experiment 20000030 PARAMETER Experiment Name: At_CS6630_Roots_cDNA_P Parameter: Plant Line Value: CS6630 vs. WS
  misc_feature: MA Experiment 20000030 PARAMETER Experiment Name: At_CS6630_Roots_cDNA_P Parameter: Tissue Value: Roots
  misc_feature: MA Experiment ID: 20000173 Result: Down-regulated in Transcription
  misc_feature: MA Experiment 20000173 PARAMETER Experiment Name: At_42deg_Heat_P Parameter: Age (day) Value: 14
  misc_feature: MA Experiment 20000173 PARAMETER Experiment Name: At_42deg_Heat_P Parameter: Organism Value: A. thaliana
  misc_feature: MA Experiment 20000173 PARAMETER Experiment Name: At_42deg_Heat_P Parameter: Plant Line Value: WS
  misc_feature: MA Experiment 20000173 PARAMETER Experiment Name: At_42deg_Heat_P Parameter: Temperature (deg C) Value: 42 vs. 22
  misc_feature: MA Experiment 20000173 PARAMETER Experiment Name: At_42deg_Heat_P Parameter: Timepoint (hr) Value: 6
  misc_feature: MA Experiment 20000173 PARAMETER Experiment Name: At_42deg_Heat_P Parameter: Tissue Value: Aerial
  misc_feature: MA Experiment ID: 20000184 Result: Down-regulated in Transcription
  misc_feature: MA Experiment 20000184 PARAMETER Experiment Name: At_Shoots__P Parameter: Age (day) Value: 7
  misc_feature: MA Experiment 20000184 PARAMETER Experiment Name: At_Shoots__P Parameter: Tissue Value: Shoots vs. Whole Plant
  misc_feature: MA Experiment ID: 20000224 Result: Up-regulated in Transcription
  misc_feature: MA Experiment ID: 20000495 Result: Up-regulated in Transcription
  misc_feature: MA Experiment 20000495 PARAMETER Experiment Name: At_Guard_Cells_P Parameter: Harvest Date Value: 8/2/2002
  misc_feature: MA Experiment 20000495 PARAMETER Experiment Name: At_Guard_Cells_P Parameter: Organism Value: A. thaliana
  misc_feature: MA Experiment 20000495 PARAMETER Experiment Name: At_Guard_Cells_P Parameter: Tissue Value: Guard Cells vs. Leaves
  misc_feature: MA Experiment ID: 20001451 Result: Up-regulated in Transcription
  misc_feature: MA Experiment 20001451 PARAMETER Experiment Name: At_Far-red-induction_P Parameter: Age (day) Value: 7
  misc_feature: MA Experiment 20001451 PARAMETER Experiment Name: At_Far-red-induction_P Parameter: Light Value: Far-red vs. White
  misc_feature: MA Experiment 20001451 PARAMETER Experiment Name: At_Far-red-induction_P Parameter: Organism Value: A. thaliana
  misc_feature: MA Experiment 20001451 PARAMETER Experiment Name: At_Far-red-induction_P Parameter: Plant Line Value: Columbia
  misc_feature: MA Experiment 20001451 PARAMETER Experiment Name: At_Far-red-induction_P Parameter: Timepoint (hr) Value: 24
  misc_feature: MA Experiment 20001451 PARAMETER Experiment Name: At_Far-red-induction_P Parameter: Tissue Value: Whole Plant
  misc_feature: MA Experiment ID: 20001560 Result: Up-regulated in Transcription
  misc_feature: MA Experiment 20001560 PARAMETER Experiment Name: At_Drought_Soil_Dry_P Parameter: Age (day) Value: 28
  misc_feature: MA Experiment 20001560 PARAMETER Experiment Name: At_Drought_Soil_Dry_P Parameter: Organism Value: A. thaliana
  misc_feature: MA Experiment 20001560 PARAMETER Experiment Name: At_Drought_Soil_Dry_P Parameter: Plant Line Value: WS
  misc_feature: MA Experiment 20001560 PARAMETER Experiment Name: At_Drought_Soil_Dry_P Parameter: Post Timepoint (hr) Value: None
  misc_feature: MA Experiment 20001560 PARAMETER Experiment Name: At_Drought_Soil_Dry_P Parameter: Post-Treatment Value: None
  misc_feature: MA Experiment 20001560 PARAMETER Experiment Name: At_Drought_Soil_Dry_P Parameter: Timepoint (day) Value: 14
  misc_feature: MA Experiment 20001560 PARAMETER Experiment Name: At_Drought_Soil_Dry_P Parameter: Treatment Value: Drought vs. No Drought
  misc_feature: MA Experiment ID: 20001911 Result: Up-regulated in Transcription
  misc_feature: MA Experiment 20001911 PARAMETER Experiment Name: At_Drought_Reproduction_P Parameter: Age (day) Value: 40
  misc_feature: MA Experiment 20001911 PARAMETER Experiment Name: At_Drought_Reproduction_P Parameter: Organism Value: A. thaliana
  misc_feature: MA Experiment 20001911 PARAMETER Experiment Name: At_Drought_Reproduction_P Parameter: Plant Line Value: WS
  misc_feature: MA Experiment 20001911 PARAMETER Experiment Name: At_Drought_Reproduction_P Parameter: Timepoint (day) Value: 10
  misc_feature: MA Experiment 20001911 PARAMETER Experiment Name: At_Drought_Reproduction_P Parameter: Tissue Value: Flowers
  misc_feature: MA Experiment 20001911 PARAMETER Experiment Name: At_Drought_Reproduction_P Parameter: Treatment Value: Drought vs. No Drought
ggagacggaagaaaattcgaatcatcagtgtttgtttcctcctctcttaaagcttagcccttctcaggtcattgttcttcaatggcttcgagcaacacgactactggggttgataatacgtttagaaagaagtttgatgtggaagagtttaaggagcgtgctcgtgaacgcgaaaagaaggaatcggatcggtctaaatctcggtccaaaggtcctcctgtgcaaagagcccctttgaagcatagagattatcatgtagacctagaatctcgtctgggcaagacacaggtcgttacaccggtagcgcctctaagtcagcaggctggttatttctgtcgcgtttgtgattgtgttgttaaagattcggcaaactacttggatcacataaatgggaaaaaacatcaaagggcattggggatgtctatgcgggtggagagatcgtcacttgaacaagtccaagagcggttcgaggttttaaagaagcggaaagcgccaggaactttcacagaacaagatctggacgaacgcatccgaaaacagcaagaagaagaggaagaactaaaaaggcagcgtagagagaaaaagaaagagaagaagaaagggaaggtggtggaagaagagcctgagatggatcctgaggttgcagagatgatgggatttgggggctttggatcttcaaaaaaatcatgatgattatatgatcacttgtatctttgtcttgtagcgtttttgatccaaagtttgcaactttgtaatctgacacatcataacgatatttttctcattgtgcaagaagaggaatttgatggcaatttacc

SEQ ID NO: 35753 - protein, 202 aa, Arabidopsis thaliana
  peptide (1)..(202): Ceres Seq. ID no. 12332247
  misc_feature (83)..(107): Pfam Name: Zinc finger, C2H2 type Pfam Description: Zinc finger, C2H2 type
  misc_feature (5)..(180): Homolog of NCBI NO: 23509107 NR Description: hypothetical protein, conserved [Plasmodium
  misc_feature (3)..(201): Homolog of NCBI NO: 17557051 NR Description: Putative nuclear protein family member, with 2
  misc_feature (3)..(201): Homolog of NCBI NO: 39581678 NR Description: Hypothetical protein CBG00030 [Caenorhabditis
  misc_feature (15)..(202): Homolog of NCBI NO: 21355873 NR Description: CG11586-PA [Drosophila melanogaster]
  misc_feature (14)..(202): Homolog of NCBI NO: 34878791 NR Description: similar to histidyl-tRNA synthetase-like [Rattus
  misc_feature (1)..(202): Homolog of NCBI NO: 13385046 NR Description: RIKEN cDNA 2610510D14 [Mus musculus]
  misc_feature (8)..(201): Homolog of NCBI NO: 37595334 NR Description: z2610510D14Rik [Danio rerio]
  misc_feature (4)..(201): Homolog of NCBI NO: 34897240 NR Description: unknown protein [Oryza sativa (japonica
  misc_feature (1)..(172): Homolog of NCBI NO: 6714389 NR Description: hypothetical protein [Arabidopsis thaliana]
  misc_feature (1)..(202): Homolog of NCBI NO: 18397358 NR Description: expressed protein
MASSNTTTGVDNTFRKKFDVEEFKERAREREKKESDRSKSRSKGPPVQRAPLKHRDYHVDLESRLGKTQVVTPVAPLSQQAGYFCRVCDCVVKDSANYLDHINGKKHQRALGMSMRVERSSLEQVQERFEVLKKRKAPGTFTEQDLDERIRKQQEEEEELKRQRREKKKEKKKGKVVEEEPEMDPEVAEMMGFGGFGSSKKS

SEQ ID NO: 35754 - DNA, 1631 bp, Arabidopsis thaliana
  misc_feature (1)..(1631): Ceres Seq. ID no. 12321799
  misc_feature: MA Experiment ID: 108561 Result: Down-regulated in Transcription
  misc_feature: MA Experiment 108561 PARAMETER Experiment Name: At_100uM_ABA_cDNA_P Parameter: Timepoint (hr) Value: 6
  misc_feature: MA Experiment 108561 PARAMETER Experiment Name: At_100uM_ABA_cDNA_P Parameter: Tissue Value: Aerial
  misc_feature: MA Experiment 108561 PARAMETER Experiment Name: At_100uM_ABA_cDNA_P Parameter: Treatment Value: 100uM ABA vs. No Treatment
  misc_feature: MA Experiment ID: 108595 Result: Down-regulated in Transcription
  misc_feature: MA Experiment 108595 PARAMETER Experiment Name: At_Ler-pi_Ovule_cDNA_P Parameter: Plant Line Value: null
  misc_feature: MA Experiment ID: 20000087 Result: Down-regulated in Transcription
  misc_feature: MA Experiment 20000087 PARAMETER Experiment Name: At_100uM_ABA_Mutants_cDNA_P Parameter: Plant Line Value: WS
  misc_feature: MA Experiment 20000087 PARAMETER Experiment Name: At_100uM_ABA_Mutants_cDNA_P Parameter: Timepoint (hr) Value: 6
  misc_feature: MA Experiment 20000087 PARAMETER Experiment Name: At_100uM_ABA_Mutants_cDNA_P Parameter: Tissue Value: Aerial
  misc_feature: MA Experiment 20000087 PARAMETER Experiment Name: At_100uM_ABA_Mutants_cDNA_P Parameter: Treatment Value: 100uM ABA vs. No Treatment
  misc_feature: MA Experiment ID: 20000179 Result: Up-regulated in Transcription
  misc_feature: MA Experiment 20000179 PARAMETER Experiment Name: At_Germinating_Seeds_P Parameter: Age (hr) Value: 6 vs. 0
  misc_feature: MA Experiment 20000179 PARAMETER Experiment Name: At_Germinating_Seeds_P Parameter: Tissue Value: Germinating Seeds
  misc_feature: MA Experiment ID: 20000180 Result: Up-regulated in Transcription
  misc_feature: MA Experiment 20000180 PARAMETER Experiment Name: At_Germinating_Seeds_P Parameter: Age (hr) Value: 24 vs. 0
  misc_feature: MA Experiment 20000180 PARAMETER Experiment Name: At_Germinating_Seeds_P Parameter: Tissue Value: Germinating Seeds
  misc_feature: MA Experiment ID: 20000234 Result: Up-regulated in Transcription
  misc_feature: MA Experiment 20000234 PARAMETER Experiment Name: At_Siliques_P Parameter: Age (day) Value: 21
  misc_feature: MA Experiment 20000234 PARAMETER Experiment Name: At_Siliques_P Parameter: Organism Value: A. thaliana
  misc_feature: MA Experiment 20000234 PARAMETER Experiment Name: At_Siliques_P Parameter: Plant Line Value: WS
  misc_feature: MA Experiment 20000234 PARAMETER Experiment Name: At_Siliques_P Parameter: Tissue Value: Less Than 5mm Siliques vs. Whole Plant
  misc_feature: MA Experiment ID: 20000235 Result: Up-regulated in Transcription
  misc_feature: MA Experiment 20000235 PARAMETER Experiment Name: At_Siliques_P Parameter: Age (day) Value: 21
  misc_feature: MA Experiment 20000235 PARAMETER Experiment Name: At_Siliques_P Parameter: Organism Value: A. thaliana
  misc_feature: MA Experiment 20000235 PARAMETER Experiment Name: At_Siliques_P Parameter: Plant Line Value: WS
  misc_feature: MA Experiment 20000235 PARAMETER Experiment Name: At_Siliques_P Parameter: Tissue Value: 5-10mm Siliques vs. Whole Plant
  misc_feature: MA Experiment ID: 20001906 Result: Down-regulated in Transcription
  misc_feature: MA Experiment 20001906 PARAMETER Experiment Name: At_Drought_Reproduction_P Parameter: Age (day) Value: 35
  misc_feature: MA Experiment 20001906 PARAMETER Experiment Name: At_Drought_Reproduction_P Parameter: Organism Value: A. thaliana
  misc_feature: MA Experiment 20001906 PARAMETER Experiment Name: At_Drought_Reproduction_P Parameter: Plant Line Value: WS
  misc_feature: MA Experiment 20001906 PARAMETER Experiment Name: At_Drought_Reproduction_P Parameter: Timepoint (day) Value: 5
  misc_feature: MA Experiment 20001906 PARAMETER Experiment Name: At_Drought_Reproduction_P Parameter: Tissue Value: Siliques
  misc_feature: MA Experiment 20001906 PARAMETER Experiment Name: At_Drought_Reproduction_P Parameter: Treatment Value: Drought vs. No Drought
aacaaacaaacaaaaacacaccaattccttcattcatcttctccatttcgtaattcgtacacttcactctcaagtctctctaagccacaaaccactgaagaagaatccatctaagagctgttaaaaattgatgaagcttcgaatatgaagaaattgaaaagctattacatgcaagttcgtaaccagcaacaatctcttgaccgaaaatggattcttccattagcaatcggatccatttgttctctctttctcttgttgctaacgaacttagcttcttcttctggtcaaactcgtttgattccattttcagtttacggatttagatcctccgtcttcgtcgaatccaagataaatccagtatccgtctcactcaccgtctccgtctctcctcctccgccgccacgtctcgcttatctaatctccggctcctctggtgacggtcagatgctgaaacgaactctaatggcgctttatcatcccaacaaccagtacgttgttcatctcgatcgggaatcttcaccggaggaacgattggatctcagtggttttgtggcgaatcatactctgtttcagagatttcaaaatgttcggatgattgttaaggctaatttcgttacgtatcgtggtccaactatggtggctaatacacttcacgctgcagcgattttgcttcgtgaaggtggtgattgggattggttcatcaatctcagtgcctctgattatcctctcgtaacacaagatgatctgttgcatacgttttcgtatcttcctcgagatctcaatttcatcgatcatacaagcaacattggctggaaagagtctcatagagcaaagcctataattattgatcctggtttgtatatgtcaaagaaagctgatgttttctgggtttcacagaagagaagtatgcctacagctttcaaactcttcacaggatctgcgtggatgatgttatctagaccttttgtggattatttcatatggggatgggataatcttcctcgaattgtgttaatgtattacgcaaacttcctttcatcgccagaaggttacttccacactgtgatttgcaatgctcgagagtttaccaacacaacggttaacagtgacttacatttcatctcatgggacaatcctccaaagcaacatcctcaccatcttacattagatgatttccagagaatggtggacagtaacgctccttttgctaggaaattccgtagagatgagcctgttctcgataagattgattcggaactattgtttcggagtcacgggatggtcactccgggtggttggtgtattggtacgagggaaaacgggagcgatccgtgtgcggtgattggtgatacgtcggttattaaacctggtcttggagctaaacggatcgagaaactcataacttatttgttatctactgagaatttcagaccacggcaatgccggtaatggcaaattagagttttgtcatagagatggttacgtggtttttcacacaaatgaactgtattgattatccgatactttgatatggttgtatagagatctttttggactttcttcatttgagaaagtgcagaaatttcgggaaagatcattgattattggaatttgtcttctattgccgaccg

SEQ ID NO: 35755 - protein, 434 aa, Arabidopsis thaliana
  peptide (1)..(434): Ceres Seq. ID no. 12321800
  misc_feature (88)..(313): Pfam Name: Core-2/I-Branching enzyme Pfam Description: Core-2/I-Branching enzyme
  misc_feature (18)..(433): Homolog of NCBI NO: 15219202 NR Description: N-acetylglucosaminyltransferase family
  misc_feature (18)..(434): Homolog of NCBI NO: 34903664 NR Description: B1015E06.17 [Oryza sativa (japonica
  misc_feature (50)..(434): Homolog of NCBI NO: 7486258 NR Description: hypothetical protein F27G19.80 - Arabidopsis
  misc_feature (19)..(433): Homolog of NCBI NO: 15236287 NR Description: N-acetylglucosaminyltransferase family
  misc_feature (19)..(434): Homolog of NCBI NO: 30687610 NR Description: N-acetylglucosaminyltransferase family
  misc_feature (17)..(434): Homolog of NCBI NO: 15146308 NR Description: AT3g15350/K7L4_15 [Arabidopsis thaliana]
  misc_feature (17)..(434): Homolog of NCBI NO: 18400725 NR Description: N-acetylglucosaminyltransferase family
  misc_feature (19)..(433): Homolog of NCBI NO: 15218824 NR Description: N-acetylglucosaminyltransferase family
  misc_feature (1)..(434): Homolog of NCBI NO: 15242532 NR Description: N-acetylglucosaminyltransferase family
  misc_feature (1)..(434): Homolog of NCBI NO: 15242199 NR Description: N-acetylglucosaminyltransferase family
MKKLKSYYMQVRNQQQSLDRKWILPLAIGSICSLFLLLLTNLASSSGQTRLIPFSVYGFRSSVFVESKINPVSVSLTVSVSPPPPPRLAYLISGSSGDGQMLKRTLMALYHPNNQYVVHLDRESSPEERLDLSGFVANHTLFQRFQNVRMIVKANFVTYRGPTMVANTLHAAAILLREGGDWDWFINLSASDYPLVTQDDLLHTFSYLPRDLNFIDHTSNIGWKESHRAKPIIIDPGLYMSKKADVFWVSQKRSMPTAFKLFTGSAWMMLSRPFVDYFIWGWDNLPRIVLMYYANFLSSPEGYFHTVICNAREFTNTTVNSDLHFISWDNPPKQHPHHLTLDDFQRMVDSNAPFARKFRRDEPVLDKIDSELLFRSHGMVTPGGWCIGTRENGSDPCAVIGDTSVIKPGLGAKRIEKLITYLLSTENFRPRQCR

SEQ ID NO: 35756 - protein, 426 aa, Arabidopsis thaliana
  peptide (1)..(426): Ceres Seq. ID no. 12321801
  misc_feature (80)..(305): Pfam Name: Core-2/I-Branching enzyme Pfam Description: Core-2/I-Branching enzyme
  misc_feature (10)..(425): Homolog of NCBI NO: 15219202 NR Description: N-acetylglucosaminyltransferase family
  misc_feature (10)..(426): Homolog of NCBI NO: 34903664 NR Description: B1015E06.17 [Oryza sativa (japonica
  misc_feature (42)..(426): Homolog of NCBI NO: 7486258 NR Description: hypothetical protein F27G19.80 - Arabidopsis
  misc_feature (11)..(425): Homolog of NCBI NO: 15236287 NR Description: N-acetylglucosaminyltransferase family
  misc_feature (11)..(426): Homolog of NCBI NO: 30687610 NR Description: N-acetylglucosaminyltransferase family
  misc_feature (9)..(426): Homolog of NCBI NO: 15146308 NR Description: AT3g15350/K7L4_15 [Arabidopsis thaliana]
  misc_feature (9)..(426): Homolog of NCBI NO: 18400725 NR Description: N-acetylglucosaminyltransferase family
  misc_feature (11)..(425): Homolog of NCBI NO: 15218824 NR Description: N-acetylglucosaminyltransferase family
  misc_feature (1)..(426): Homolog of NCBI NO: 15242532 NR Description: N-acetylglucosaminyltransferase family
  misc_feature (1)..(426): Homolog of NCBI NO: 15242199 NR Description: N-acetylglucosaminyltransferase family
MQVRNQQQSLDRKWILPLAIGSICSLFLLLLTNLASSSGQTRLIPFSVYGFRSSVFVESKINPVSVSLTVSVSPPPPPRLAYLISGSSGDGQMLKRTLMALYHPNNQYVVHLDRESSPEERLDLSGFVANHTLFQRFQNVRMIVKANFVTYRGPTMVANTLHAAAILLREGGDWDWFINLSASDYPLVTQDDLLHTFSYLPRDLNFIDHTSNIGWKESHRAKPIIIDPGLYMSKKADVFWVSQKRSMPTAFKLFTGSAWMMLSRPFVDYFIWGWDNLPRIVLMYYANFLSSPEGYFHTVICNAREFTNTTVNSDLHFISWDNPPKQHPHHLTLDDFQRMVDSNAPFARKFRRDEPVLDKIDSELLFRSHGMVTPGGWCIGTRENGSDPCAVIGDTSVIKPGLGAKRIEKLITYLLSTENFRPRQCR

SEQ ID NO: 35757 - protein, 334 aa, Arabidopsis thaliana
  peptide (1)..(334): Ceres Seq. ID no. 12321802
  misc_feature (1)..(213): Pfam Name: Core-2/I-Branching enzyme Pfam Description: Core-2/I-Branching enzyme
  misc_feature (1)..(333): Homolog of NCBI NO: 15219202 NR Description: N-acetylglucosaminyltransferase family
  misc_feature (1)..(334): Homolog of NCBI NO: 34903664 NR Description: B1015E06.17 [Oryza sativa (japonica
  misc_feature (1)..(334): Homolog of NCBI NO: 7486258 NR Description: hypothetical protein F27G19.80 - Arabidopsis
  misc_feature (1)..(333): Homolog of NCBI NO: 15236287 NR Description: N-acetylglucosaminyltransferase family
  misc_feature (1)..(334): Homolog of NCBI NO: 30687610 NR Description: N-acetylglucosaminyltransferase family
  misc_feature (1)..(334): Homolog of NCBI NO: 15146308 NR Description: AT3g15350/K7L4_15 [Arabidopsis thaliana]
  misc_feature (1)..(334): Homolog of NCBI NO: 18400725 NR Description: N-acetylglucosaminyltransferase family
  misc_feature (1)..(333): Homolog of NCBI NO: 15218824 NR Description: N-acetylglucosaminyltransferase family
  misc_feature (1)..(334): Homolog of NCBI NO: 15242532 NR Description: N-acetylglucosaminyltransferase family
  misc_feature (1)..(334): Homolog of NCBI NO: 15242199 NR Description: N-acetylglucosaminyltransferase family
MLKRTLMALYHPNNQYVVHLDRESSPEERLDLSGFVANHTLFQRFQNVRMIVKANFVTYRGPTMVANTLHAAAILLREGGDWDWFINLSASDYPLVTQDDLLHTFSYLPRDLNFIDHTSNIGWKESHRAKPIIIDPGLYMSKKADVFWVSQKRSMPTAFKLFTGSAWMMLSRPFVDYFIWGWDNLPRIVLMYYANFLSSPEGYFHTVICNAREFTNTTVNSDLHFISWDNPPKQHPHHLTLDDFQRMVDSNAPFARKFRRDEPVLDKIDSELLFRSHGMVTPGGWCIGTRENGSDPCAVIGDTSVIKPGLGAKRIEKLITYLLSTENFRPRQCR

SEQ ID NO: 35758 - DNA, 1113 bp, Arabidopsis thaliana
  misc_feature (1)..(1113): Ceres Seq. ID no. 13580802
  misc_feature: MA Experiment ID: 108435 Result: Up-regulated in Transcription
  misc_feature: MA Experiment 108435 PARAMETER Experiment Name: At_stm_Mutants_cDNA_P Parameter: Plant Line Value: wt Landsburg vs stm
  misc_feature: MA Experiment 108435 PARAMETER Experiment Name: At_stm_Mutants_cDNA_P Parameter: Tissue Value: Shoot Apical Meristem Region
  misc_feature: MA Experiment ID: 108569 Result: Up-regulated in Transcription
  misc_feature: MA Experiment 108569 PARAMETER Experiment Name: At_0.001%_MeJA__cDNA_P Parameter: Timepoint (hr) Value: 6
  misc_feature: MA Experiment 108569 PARAMETER Experiment Name: At_0.001%_MeJA__cDNA_P Parameter: Tissue Value: Aerial
  misc_feature: MA Experiment 108569 PARAMETER Experiment Name: At_0.001%_MeJA__cDNA_P Parameter: Treatment Value: 0.001% MeJA vs. No Treatment
  misc_feature: MA Experiment ID: 108573 Result: Up-regulated in Transcription
  misc_feature: MA Experiment 108573 PARAMETER Experiment Name: At_Drought_cDNA_P Parameter: Timepoint (hr) Value: 6
  misc_feature: MA Experiment 108573 PARAMETER Experiment Name: At_Drought_cDNA_P Parameter: Tissue Value: Aerial
  misc_feature: MA Experiment 108573 PARAMETER Experiment Name: At_Drought_cDNA_P Parameter: Treatment Value: Drought vs. No Drought
  misc_feature: MA Experiment ID: 108585 Result: Up-regulated in Transcription
  misc_feature: MA Experiment 108585 PARAMETER Experiment Name: At_5mM_NaNP_cDNA_P Parameter: Timepoint (hr) Value: 6
  misc_feature: MA Experiment 108585 PARAMETER Experiment Name: At_5mM_NaNP_cDNA_P Parameter: Tissue Value: Aerial
  misc_feature: MA Experiment 108585 PARAMETER Experiment Name: At_5mM_NaNP_cDNA_P Parameter: Treatment Value: null
  misc_feature: MA Experiment ID: 108605 Result: Up-regulated in Transcription
  misc_feature: MA Experiment 108605 PARAMETER Experiment Name: At_100uM_ABA_cDNA_P Parameter: Timepoint (hr) Value: 6
  misc_feature: MA Experiment 108605 PARAMETER Experiment Name: At_100uM_ABA_cDNA_P Parameter: Tissue Value: Aerial
  misc_feature: MA Experiment 108605 PARAMETER Experiment Name: At_100uM_ABA_cDNA_P Parameter: Treatment Value: 100uM ABA vs. No Treatment
  misc_feature: MA Experiment ID: 20000071 Result: Up-regulated in Transcription
  misc_feature: MA Experiment 20000071 PARAMETER Experiment Name: At_100uM_ABA_Mutants_cDNA_P Parameter: Plant Line Value: CS8104
  misc_feature: MA Experiment 20000071 PARAMETER Experiment Name: At_100uM_ABA_Mutants_cDNA_P Parameter: Timepoint (hr) Value: 6
  misc_feature: MA Experiment 20000071 PARAMETER Experiment Name: At_100uM_ABA_Mutants_cDNA_P Parameter: Tissue Value: Aerial
  misc_feature: MA Experiment 20000071 PARAMETER Experiment Name: At_100uM_ABA_Mutants_cDNA_P Parameter: Treatment Value: 100uM ABA vs. No Treatment
  misc_feature: MA Experiment ID: 20000072 Result: Up-regulated in Transcription
  misc_feature: MA Experiment 20000072 PARAMETER Experiment Name: At_100uM_ABA_Mutants_cDNA_P Parameter: Plant Line Value: CS8105
  misc_feature: MA Experiment 20000072 PARAMETER Experiment Name: At_100uM_ABA_Mutants_cDNA_P Parameter: Timepoint (hr) Value: 6
  misc_feature: MA Experiment 20000072 PARAMETER Experiment Name: At_100uM_ABA_Mutants_cDNA_P Parameter: Tissue Value: Aerial
  misc_feature: MA Experiment 20000072 PARAMETER Experiment Name: At_100uM_ABA_Mutants_cDNA_P Parameter: Treatment Value: 100uM ABA vs. No Treatment
  misc_feature: MA Experiment ID: 20000093 Result: Up-regulated in Transcription
  misc_feature: MA Experiment 20000093 PARAMETER Experiment Name: At_42deg_Heat_cDNA_P Parameter: Temperature (deg C) Value: 42 vs. 22
  misc_feature: MA Experiment 20000093 PARAMETER Experiment Name: At_42deg_Heat_cDNA_P Parameter: Timepoint (hr) Value: 0.5
  misc_feature: MA Experiment 20000093 PARAMETER Experiment Name: At_42deg_Heat_cDNA_P Parameter: Tissue Value: Aerial
  misc_feature: MA Experiment ID: 20000112 Result: Up-regulated in Transcription
  misc_feature: MA Experiment 20000112 PARAMETER Experiment Name: At_42deg_Heat_cDNA_P Parameter: Temperature (deg C) Value: 42 vs. 22
  misc_feature: MA Experiment 20000112 PARAMETER Experiment Name: At_42deg_Heat_cDNA_P Parameter: Timepoint (hr) Value: 2
  misc_feature: MA Experiment 20000112 PARAMETER Experiment Name: At_42deg_Heat_cDNA_P Parameter: Tissue Value: Aerial
  misc_feature: MA Experiment ID: 20000113 Result: Up-regulated in Transcription
  misc_feature: MA Experiment 20000113 PARAMETER Experiment Name: At_42deg_Heat_cDNA_P Parameter: Temperature (deg C) Value: 42 vs. 22
  misc_feature: MA Experiment 20000113 PARAMETER Experiment Name: At_42deg_Heat_cDNA_P Parameter: Timepoint (hr) Value: 8
  misc_feature: MA Experiment 20000113 PARAMETER Experiment Name: At_42deg_Heat_cDNA_P Parameter: Tissue Value: Aerial
  misc_feature: MA Experiment ID: 20000117 Result: Up-regulated in Transcription
  misc_feature: MA Experiment 20000117 PARAMETER Experiment Name: At_100uM_ABA_Mutants_cDNA_P Parameter: Plant Line Value: Columbia
  misc_feature: MA Experiment 20000117 PARAMETER Experiment Name: At_100uM_ABA_Mutants_cDNA_P Parameter: Timepoint (hr) Value: 6
  misc_feature: MA Experiment 20000117 PARAMETER Experiment Name: At_100uM_ABA_Mutants_cDNA_P Parameter: Tissue Value: Aerial
  misc_feature: MA Experiment 20000117 PARAMETER Experiment Name: At_100uM_ABA_Mutants_cDNA_P Parameter: Treatment Value: 100uM ABA vs. No Treatment
  misc_feature: MA Experiment ID: 20000169 Result: Up-regulated in Transcription
  misc_feature: MA Experiment 20000169 PARAMETER Experiment Name: At_100uM_ABA_P Parameter: Age (day) Value: 14
  misc_feature: MA Experiment 20000169 PARAMETER Experiment Name: At_100uM_ABA_P Parameter: Organism Value: A. thaliana
  misc_feature: MA Experiment 20000169 PARAMETER Experiment Name: At_100uM_ABA_P Parameter: Plant Line Value: WS
  misc_feature: MA Experiment 20000169 PARAMETER Experiment Name: At_100uM_ABA_P Parameter: Timepoint (hr) Value: 6
  misc_feature: MA Experiment 20000169 PARAMETER Experiment Name: At_100uM_ABA_P Parameter: Tissue Value: Aerial
  misc_feature: MA Experiment 20000169 PARAMETER Experiment Name: At_100uM_ABA_P Parameter: Treatment Value: 100uM ABA vs. No Treatment
  misc_feature: MA Experiment ID: 20000171 Result: Up-regulated in Transcription
  misc_feature: MA Experiment 20000171 PARAMETER Experiment Name: At_42deg_Heat_P Parameter: Age (day) Value: 14
  misc_feature: MA Experiment 20000171 PARAMETER Experiment Name: At_42deg_Heat_P Parameter: Organism Value: A. thaliana
  misc_feature: MA Experiment 20000171 PARAMETER Experiment Name: At_42deg_Heat_P Parameter: Plant Line Value: WS
  misc_feature: MA Experiment 20000171 PARAMETER Experiment Name: At_42deg_Heat_P Parameter: Temperature (deg C) Value: 42 vs. 22
  misc_feature: MA Experiment 20000171 PARAMETER Experiment Name: At_42deg_Heat_P Parameter: Timepoint (hr) Value: 1
  misc_feature: MA Experiment 20000171 PARAMETER Experiment Name: At_42deg_Heat_P Parameter: Tissue Value: Aerial
  misc_feature: MA Experiment ID: 20000179 Result: Up-regulated in Transcription
  misc_feature: MA Experiment 20000179 PARAMETER Experiment Name: At_Germinating_Seeds_P Parameter: Age (hr) Value: 6 vs. 0
  misc_feature: MA Experiment 20000179 PARAMETER Experiment Name: At_Germinating_Seeds_P Parameter: Tissue Value: Germinating Seeds
  misc_feature: MA Experiment ID: 20000180 Result: Up-regulated in Transcription
  misc_feature: MA Experiment 20000180 PARAMETER Experiment Name: At_Germinating_Seeds_P Parameter: Age (hr) Value: 24 vs. 0
  misc_feature: MA Experiment 20000180 PARAMETER Experiment Name: At_Germinating_Seeds_P Parameter: Tissue Value: Germinating Seeds
  misc_feature: MA Experiment ID: 20000460 Result: Down-regulated in Transcription
  misc_feature: MA Experiment 20000460 PARAMETER Experiment Name: At_10percent_PEG_P Parameter: Age (day) Value: 12
  misc_feature: MA Experiment 20000460 PARAMETER Experiment Name: At_10percent_PEG_P Parameter: Organism Value: A. thaliana
  misc_feature: MA Experiment 20000460 PARAMETER Experiment Name: At_10percent_PEG_P Parameter: Plant Line Value: WS
  misc_feature: MA Experiment 20000460 PARAMETER Experiment Name: At_10percent_PEG_P Parameter: Timepoint (day) Value: 12
  misc_feature: MA Experiment 20000460 PARAMETER Experiment Name: At_10percent_PEG_P Parameter: Tissue Value: Whole Plant
  misc_feature: MA Experiment 20000460 PARAMETER Experiment Name: At_10percent_PEG_P Parameter: Treatment Value: 10percent PEG vs. No Treatment
  misc_feature: MA Experiment ID: 20000527 Result: Down-regulated in Transcription
  misc_feature: MA Experiment 20000527 PARAMETER Experiment Name: At_10percent_PEG_P Parameter: Age (day) Value: 20
  misc_feature: MA Experiment 20000527 PARAMETER Experiment Name: At_10percent_PEG_P Parameter: Organism Value: A. thaliana
  misc_feature: MA Experiment 20000527 PARAMETER Experiment Name: At_10percent_PEG_P Parameter: Plant Line Value: WS
  misc_feature: MA Experiment 20000527 PARAMETER Experiment Name: At_10percent_PEG_P Parameter: Timepoint (day) Value: 20
  misc_feature: MA Experiment 20000527 PARAMETER Experiment Name: At_10percent_PEG_P Parameter: Tissue Value: Whole Plant
  misc_feature: MA Experiment 20000527 PARAMETER Experiment Name: At_10percent_PEG_P Parameter: Treatment Value: 10percent PEG vs. No Treatment
  misc_feature: MA Experiment ID: 20000573 Result: Down-regulated in Transcription
  misc_feature: MA Experiment 20000573 PARAMETER Experiment Name: At_100uM_ABA_Mutants__P Parameter: Organism Value: A. thaliana
  misc_feature: MA Experiment 20000573 PARAMETER Experiment Name: At_100uM_ABA_Mutants__P Parameter: Plant Line Value: CS22 vs. Ler wt
  misc_feature: MA Experiment 20000573 PARAMETER Experiment Name: At_100uM_ABA_Mutants__P Parameter: Timepoint (hr) Value: N/A
  misc_feature: MA Experiment 20000573 PARAMETER Experiment Name: At_100uM_ABA_Mutants__P Parameter: Tissue Value: Whole Plant
  misc_feature: MA Experiment 20000573 PARAMETER Experiment Name: At_100uM_ABA_Mutants__P Parameter: Treatment Value: None
  misc_feature: MA Experiment ID: 20000574 Result: Down-regulated in Transcription
  misc_feature: MA Experiment 20000574 PARAMETER Experiment Name: At_100uM_ABA_Mutants__P Parameter: Organism Value: A. thaliana
  misc_feature: MA Experiment 20000574 PARAMETER Experiment Name: At_100uM_ABA_Mutants__P Parameter: Plant Line Value: CS23 vs. Ler wt
  misc_feature: MA Experiment 20000574 PARAMETER Experiment Name: At_100uM_ABA_Mutants__P Parameter: Timepoint (hr) Value: N/A
  misc_feature: MA Experiment 20000574 PARAMETER Experiment Name: At_100uM_ABA_Mutants__P Parameter: Tissue Value: Whole Plant
  misc_feature: MA Experiment 20000574 PARAMETER Experiment Name: At_100uM_ABA_Mutants__P Parameter: Treatment Value: None
  misc_feature: MA Experiment ID: 20001248 Result: Down-regulated in Transcription
  misc_feature: MA Experiment 20001248 PARAMETER Experiment Name: At_Far-red-induction_P Parameter: Age (day) Value: 7
  misc_feature: MA Experiment 20001248 PARAMETER Experiment Name: At_Far-red-induction_P Parameter: Light Value: Far-red vs. White
  misc_feature: MA Experiment 20001248 PARAMETER Experiment Name: At_Far-red-induction_P Parameter: Organism Value: A. thaliana
  misc_feature: MA Experiment 20001248 PARAMETER Experiment Name: At_Far-red-induction_P Parameter: Plant Line Value: Columbia
  misc_feature: MA Experiment 20001248 PARAMETER Experiment Name: At_Far-red-induction_P Parameter: Timepoint (hr) Value: 4
  misc_feature: MA Experiment 20001248 PARAMETER Experiment Name: At_Far-red-induction_P Parameter: Tissue Value: Whole Plant
  misc_feature: MA Experiment ID: 20001450 Result: Down-regulated in Transcription
  misc_feature: MA Experiment 20001450 PARAMETER Experiment Name: At_Far-red-induction_P Parameter: Age (day) Value: 7
  misc_feature: MA Experiment 20001450 PARAMETER Experiment Name: At_Far-red-induction_P Parameter: Light Value: Far-red vs. White
  misc_feature: MA Experiment 20001450 PARAMETER Experiment Name: At_Far-red-induction_P Parameter: Organism Value: A. thaliana
  misc_feature: MA Experiment 20001450 PARAMETER Experiment Name: At_Far-red-induction_P Parameter: Plant Line Value: Columbia
  misc_feature: MA Experiment 20001450 PARAMETER Experiment Name: At_Far-red-induction_P Parameter: Timepoint (hr) Value: 8
  misc_feature: MA Experiment 20001450 PARAMETER Experiment Name: At_Far-red-induction_P Parameter: Tissue Value: Whole Plant
  misc_feature: MA Experiment ID: 20001560 Result: Up-regulated in Transcription
  misc_feature: MA Experiment 20001560 PARAMETER Experiment Name: At_Drought_Soil_Dry_P Parameter: Age (day) Value: 28
  misc_feature: MA Experiment 20001560 PARAMETER Experiment Name: At_Drought_Soil_Dry_P Parameter: Organism Value: A. thaliana
  misc_feature: MA Experiment 20001560 PARAMETER Experiment Name: At_Drought_Soil_Dry_P Parameter: Plant Line Value: WS
  misc_feature: MA Experiment 20001560 PARAMETER Experiment Name: At_Drought_Soil_Dry_P Parameter: Post Timepoint (hr) Value: None
  misc_feature: MA Experiment 20001560 PARAMETER Experiment Name: At_Drought_Soil_Dry_P Parameter: Post-Treatment Value: None
  misc_feature: MA Experiment 20001560 PARAMETER Experiment Name: At_Drought_Soil_Dry_P Parameter: Timepoint (day) Value: 14
  misc_feature: MA Experiment 20001560 PARAMETER Experiment Name: At_Drought_Soil_Dry_P Parameter: Treatment Value: Drought vs. No Drought
acgttctcattcatgactctatatatttcgcatttcttctcctcaacgctctcataaaaagtagtactcgtgtcttactcgtgccagccactcgcatttctccagattttattatccttcctcgaaacaagagcttagctaagatgacgaagaactacccaaccgtgagcgaagattacaagaaggctgttgagaagtgcaggaggaagctcagaggtttgatcgctgagaagaactgtgcacccatcatggtccgactcgcatggcactctgctggaactttcgattgtcaatcaaggactggaggtccattcggaacaatgaggtttgacgctgagcaagctcatggagccaacagtggtatccacattgctcttaggttgttggaccccatcagggagcaattccctaccatctcttttgctgatttccatcagcttgctggtgttgtggccgttgaagttactggtggccctgacattcctttccaccctggaagagaggacaagccccaaccacctccagagggtcgtcttcctgatgctaccaagggttgtgaccatttgagagatgtctttgctaagcagatgggcttatctgacaaagacattgtcgctttatctggtgcccacactctgggacgatgccacaaggataggtctggcttcgaaggtgcatggacatcaaaccctctaatcttcgacaactcttacttcaaggaactcttgagcggagagaaggaaggccttcttcagcttgtctctgacaaagcactattggacgaccctgttttccgtcctttggtcgagaaatacgctgctgatgaagatgcctttttcgctgattacgctgaggcccacatgaagctttctgagcttgggtttgctgatgcttaagctgtgacgtatgctctgtgtgtgtgtgtgtgtctccccgagagtcatggctgtttttggttgggggctggaggggtcgcattgcatttgaactttgtcatatgattgcttaatgtactctcggatttacgtatctgtttttttcggtgggttgcgatttgaacacatccgttgcgcttttgctgcttagacacattaataaaattaatttctctcg

SEQ ID NO: 35759 - protein, 297 aa, Arabidopsis thaliana
  peptide (1)..(297): Ceres Seq. ID no. 13580803
  misc_feature (66)..(274): Pfam Name: Peroxidase Pfam Description: Peroxidase
  misc_feature (48)..(297): Homolog of NCBI NO: 24636598 NR Description: ascorbate peroxidase [Solanum tuberosum]
  misc_feature (48)..(297): Homolog of NCBI NO: 7488439 NR Description: L-ascorbate peroxidase (EC 1.11.1.11) - leaf
  misc_feature (48)..(297): Homolog of NCBI NO: 1890354 NR Description: L-ascorbate peroxidase [Brassica napus]
  misc_feature (48)..(297): Homolog of NCBI NO: 541927 NR Description: L-ascorbate peroxidase (EC 1.11.1.11) - radish
  misc_feature (48)..(297): Homolog of NCBI NO: 18265379 NR Description: ascorbate peroxidase [Brassica oleracea]
  misc_feature (48)..(297): Homolog of NCBI NO: 18265381 NR Description: ascorbate peroxidase [Brassica oleracea]
  misc_feature (48)..(297): Homolog of NCBI NO: 24421231 NR Description: ascorbate peroxidase [Brassica juncea]
  misc_feature (48)..(297): Homolog of NCBI NO: 24421233 NR Description: ascorbate peroxidase [Brassica juncea]
  misc_feature (48)..(297): Homolog of NCBI NO: 15223049 NR Description: ascorbate peroxidase, putative (APX) [Arabidopsis
  misc_feature (35)..(297): Homolog of NCBI NO: 99735 NR Description: L-ascorbate peroxidase (EC 1.11.1.11) precursor -
VLIHDSIYFAFLLLNALIKSSTRVLLVPATRISPDFIILPRNKSLAKMTKNYPTVSEDYKKAVEKCRRKLRGLIAEKNCAPIMVRLAWHSAGTFDCQSRTGGPFGTMRFDAEQAHGANSGIHIALRLLDPIREQFPTISFADFHQLAGVVAVEVTGGPDIPFHPGREDKPQPPPEGRLPDATKGCDHLRDVFAKQMGLSDKDIVALSGAHTLGRCHKDRSGFEGAWTSNPLIFDNSYFKELLSGEKEGLLQLVSDKALLDDPVFRPLVEKYAADEDAFFADYAEAHMKLSELGFADA

SEQ ID NO: 35760 - protein, 250 aa, Arabidopsis thaliana; identical to SEQ ID NO: 22608
  peptide (1)..(250): Ceres Seq. ID no. 13580804
  misc_feature (19)..(227): Pfam Name: Peroxidase Pfam Description: Peroxidase
  misc_feature (1)..(250): Homolog of NCBI NO: 24636598 NR Description: ascorbate peroxidase [Solanum tuberosum]
  misc_feature (1)..(250): Homolog of NCBI NO: 7488439 NR Description: L-ascorbate peroxidase (EC 1.11.1.11) - leaf
  misc_feature (1)..(250): Homolog of NCBI NO: 1890354 NR Description: L-ascorbate peroxidase [Brassica napus]
  misc_feature (1)..(250): Homolog of NCBI NO: 541927 NR Description: L-ascorbate peroxidase (EC 1.11.1.11) - radish
  misc_feature (1)..(250): Homolog of NCBI NO: 18265379 NR Description: ascorbate peroxidase [Brassica oleracea]
  misc_feature (1)..(250): Homolog of NCBI NO: 18265381 NR Description: ascorbate peroxidase [Brassica oleracea]
  misc_feature (1)..(250): Homolog of NCBI NO: 24421231 NR Description: ascorbate peroxidase [Brassica juncea]
  misc_feature (1)..(250): Homolog of NCBI NO: 24421233 NR Description: ascorbate peroxidase [Brassica juncea]
  misc_feature (1)..(250): Homolog of NCBI NO: 15223049 NR Description: ascorbate peroxidase, putative (APX) [Arabidopsis
  misc_feature (1)..(250): Homolog of NCBI NO: 99735 NR Description: L-ascorbate peroxidase (EC 1.11.1.11) precursor -

SEQ ID NO: 35761 - protein, 215 aa, Arabidopsis thaliana; identical to SEQ ID NO: 22609
  peptide (1)..(215): Ceres Seq. ID no. 13580805
  misc_feature (1)..(192): Pfam Name: Peroxidase Pfam Description: Peroxidase
  misc_feature (1)..(215): Homolog of NCBI NO: 24636598 NR Description: ascorbate peroxidase [Solanum tuberosum]
  misc_feature (1)..(215): Homolog of NCBI NO: 7488439 NR Description: L-ascorbate peroxidase (EC 1.11.1.11) - leaf
  misc_feature (1)..(215): Homolog of NCBI NO: 1890354 NR Description: L-ascorbate peroxidase [Brassica napus]
  misc_feature (1)..(215): Homolog of NCBI NO: 541927 NR Description: L-ascorbate peroxidase (EC 1.11.1.11) - radish
  misc_feature (1)..(215): Homolog of NCBI NO: 18265379 NR Description: ascorbate peroxidase [Brassica oleracea]
  misc_feature (1)..(215): Homolog of NCBI NO: 18265381 NR Description: ascorbate peroxidase [Brassica oleracea]
  misc_feature (1)..(215): Homolog of NCBI NO: 24421231 NR Description: ascorbate peroxidase [Brassica juncea]
  misc_feature (1)..(215): Homolog of NCBI NO: 24421233 NR Description: ascorbate peroxidase [Brassica juncea]
  misc_feature (1)..(215): Homolog of NCBI NO: 15223049 NR Description: ascorbate peroxidase, putative (APX) [Arabidopsis
  misc_feature (1)..(215): Homolog of NCBI NO: 99735 NR Description: L-ascorbate peroxidase (EC 1.11.1.11) precursor -

SEQ ID NO: 35762 - DNA, 767 bp, Arabidopsis thaliana
  misc_feature (1)..(767): Ceres Seq. ID no. 12481796
  misc_feature: MA Experiment ID: 108435 Result: Down-regulated in Transcription
  misc_feature: MA Experiment 108435 PARAMETER Experiment Name: At_stm_Mutants_cDNA_P Parameter: Plant Line Value: wt Landsburg vs stm
  misc_feature: MA Experiment 108435 PARAMETER Experiment Name: At_stm_Mutants_cDNA_P Parameter: Tissue Value: Shoot Apical Meristem Region
  misc_feature: MA Experiment ID: 108462 Result: Up-regulated in Transcription
  misc_feature: MA Experiment 108462 PARAMETER Experiment Name: At_Germinating_Seeds_cDNA_P Parameter: Age (day) Value: 2 vs. 0
  misc_feature: MA Experiment 108462 PARAMETER Experiment Name: At_Germinating_Seeds_cDNA_P Parameter: Tissue Value: Germinating Seeds
  misc_feature: MA Experiment ID: 108463 Result: Up-regulated in Transcription
  misc_feature: MA Experiment 108463 PARAMETER Experiment Name: At_Germinating_Seeds_cDNA_P Parameter: Age (day) Value: 3 vs. 0
  misc_feature: MA Experiment 108463 PARAMETER Experiment Name: At_Germinating_Seeds_cDNA_P Parameter: Tissue Value: Germinating Seeds
  misc_feature: MA Experiment ID: 108464 Result: Up-regulated in Transcription
  misc_feature: MA Experiment 108464 PARAMETER Experiment Name: At_Germinating_Seeds_cDNA_P Parameter: Age (day) Value: 4 vs. 0
  misc_feature: MA Experiment 108464 PARAMETER Experiment Name: At_Germinating_Seeds_cDNA_P Parameter: Tissue Value: Germinating Seeds
  misc_feature: MA Experiment ID: 108469 Result: Up-regulated in Transcription
  misc_feature: MA Experiment ID: 108573 Result: Up-regulated in Transcription
  misc_feature: MA Experiment 108573 PARAMETER Experiment Name: At_Drought_cDNA_P Parameter: Timepoint (hr) Value: 6
  misc_feature: MA Experiment 108573 PARAMETER Experiment Name: At_Drought_cDNA_P Parameter: Tissue Value: Aerial
  misc_feature: MA Experiment 108573 PARAMETER Experiment Name: At_Drought_cDNA_P Parameter: Treatment Value: Drought vs. No Drought
  misc_feature: MA Experiment ID: 108574 Result: Up-regulated in Transcription
  misc_feature: MA Experiment 108574 PARAMETER Experiment Name: At_Wounding__cDNA_P Parameter: Timepoint (hr) Value: 1
  misc_feature: MA Experiment 108574 PARAMETER Experiment Name: At_Wounding__cDNA_P Parameter: Tissue Value: Aerial
  misc_feature: MA Experiment 108574 PARAMETER Experiment Name: At_Wounding__cDNA_P Parameter: Treatment Value: Wounding vs. No Wounding
  misc_feature: MA Experiment ID: 108579 Result: Up-regulated in Transcription
  misc_feature: MA Experiment 108579 PARAMETER Experiment Name: At_4deg_Cold_cDNA_P Parameter: Temperature (deg C) Value: 4 vs. 22
  misc_feature: MA Experiment 108579 PARAMETER Experiment Name: At_4deg_Cold_cDNA_P Parameter: Timepoint (hr) Value: 6
  misc_feature: MA Experiment 108579 PARAMETER Experiment Name: At_4deg_Cold_cDNA_P Parameter: Tissue Value: Aerial
  misc_feature: MA Experiment ID: 108585 Result: Up-regulated in Transcription
  misc_feature: MA Experiment 108585 PARAMETER Experiment Name: At_5mM_NaNP_cDNA_P Parameter: Timepoint (hr) Value: 6
  misc_feature: MA Experiment 108585 PARAMETER Experiment Name: At_5mM_NaNP_cDNA_P Parameter: Tissue Value: Aerial
  misc_feature: MA Experiment 108585 PARAMETER Experiment Name: At_5mM_NaNP_cDNA_P Parameter: Treatment Value: null
  misc_feature: MA Experiment ID: 108595 Result: Down-regulated in Transcription
  misc_feature: MA Experiment 108595 PARAMETER Experiment Name: At_Ler-pi_Ovule_cDNA_P Parameter: Plant Line Value: null
  misc_feature: MA Experiment ID: 20000070 Result: Down-regulated in Transcription
  misc_feature: MA Experiment 20000070 PARAMETER Experiment Name: At_100uM_ABA_Mutants_cDNA_P Parameter: Plant Line Value: CS24
  misc_feature: MA Experiment 20000070 PARAMETER Experiment Name: At_100uM_ABA_Mutants_cDNA_P Parameter: Timepoint (hr) Value: 6
  misc_feature: MA Experiment 20000070 PARAMETER Experiment Name: At_100uM_ABA_Mutants_cDNA_P Parameter: Tissue Value: Aerial
  misc_feature: MA Experiment 20000070 PARAMETER Experiment Name: At_100uM_ABA_Mutants_cDNA_P Parameter: Treatment Value: 100uM ABA vs. No Treatment
  misc_feature: MA Experiment ID: 20000071 Result: Down-regulated in Transcription
  misc_feature: MA Experiment 20000071 PARAMETER Experiment Name: At_100uM_ABA_Mutants_cDNA_P Parameter: Plant Line Value: CS8104
  misc_feature: MA Experiment 20000071 PARAMETER Experiment Name: At_100uM_ABA_Mutants_cDNA_P Parameter: Timepoint (hr) Value: 6
  misc_feature: MA Experiment 20000071 PARAMETER Experiment Name: At_100uM_ABA_Mutants_cDNA_P Parameter: Tissue Value: Aerial
  misc_feature: MA Experiment 20000071 PARAMETER Experiment Name: At_100uM_ABA_Mutants_cDNA_P Parameter: Treatment Value: 100uM ABA vs. No Treatment
  misc_feature: MA Experiment ID: 20000072 Result: Down-regulated in Transcription
  misc_feature: MA Experiment 20000072 PARAMETER Experiment Name: At_100uM_ABA_Mutants_cDNA_P Parameter: Plant Line Value: CS8105
  misc_feature: MA Experiment 20000072 PARAMETER Experiment Name: At_100uM_ABA_Mutants_cDNA_P Parameter: Timepoint (hr) Value: 6
  misc_feature: MA Experiment 20000072 PARAMETER Experiment Name: At_100uM_ABA_Mutants_cDNA_P Parameter: Tissue Value: Aerial
  misc_feature: MA Experiment 20000072 PARAMETER Experiment Name: At_100uM_ABA_Mutants_cDNA_P Parameter: Treatment Value: 100uM ABA vs. No Treatment
  misc_feature: MA Experiment ID: 20000086 Result: Down-regulated in Transcription
  misc_feature: MA Experiment 20000086 PARAMETER Experiment Name: At_100uM_ABA_Mutants_cDNA_P Parameter: Plant Line Value: CS22
  misc_feature: MA Experiment 20000086 PARAMETER Experiment Name: At_100uM_ABA_Mutants_cDNA_P Parameter: Timepoint (hr) Value: 6
  misc_feature: MA Experiment 20000086 PARAMETER Experiment Name: At_100uM_ABA_Mutants_cDNA_P Parameter: Tissue Value: Aerial
  misc_feature: MA Experiment 20000086 PARAMETER Experiment Name: At_100uM_ABA_Mutants_cDNA_P Parameter: Treatment Value: 100uM ABA vs. No Treatment
  misc_feature: MA Experiment ID: 20000087 Result: Down-regulated in Transcription
  misc_feature: MA Experiment 20000087 PARAMETER Experiment Name: At_100uM_ABA_Mutants_cDNA_P Parameter: Plant Line Value: WS
  misc_feature: MA Experiment 20000087 PARAMETER Experiment Name: At_100uM_ABA_Mutants_cDNA_P Parameter: Timepoint (hr) Value: 6
  misc_feature: MA Experiment 20000087 PARAMETER Experiment Name: At_100uM_ABA_Mutants_cDNA_P Parameter: Tissue Value: Aerial
  misc_feature: MA Experiment 20000087 PARAMETER Experiment Name: At_100uM_ABA_Mutants_cDNA_P Parameter: Treatment Value: 100uM ABA vs. No Treatment
  misc_feature: MA Experiment ID: 20000088 Result: Down-regulated in Transcription
  misc_feature: MA Experiment 20000088 PARAMETER Experiment Name: At_100uM_ABA_Mutants_cDNA_P Parameter: Plant Line Value: Landsberg
  misc_feature: MA Experiment 20000088 PARAMETER Experiment Name: At_100uM_ABA_Mutants_cDNA_P Parameter: Timepoint (hr) Value: 6
  misc_feature: MA Experiment 20000088 PARAMETER Experiment Name: At_100uM_ABA_Mutants_cDNA_P Parameter: Tissue Value: Aerial
  misc_feature: MA Experiment 20000088 PARAMETER Experiment Name: At_100uM_ABA_Mutants_cDNA_P Parameter: Treatment Value: 100uM ABA vs. No Treatment
  misc_feature: MA Experiment ID: 20000089 Result: Down-regulated in Transcription
  misc_feature: MA Experiment ID: 20000090 Result: Down-regulated in Transcription
  misc_feature: MA Experiment ID: 20000111 Result: Up-regulated in Transcription
  misc_feature: MA Experiment 20000111 PARAMETER Experiment Name: At_42deg_Heat_cDNA_P Parameter: Temperature (deg C) Value: 42 vs. 22
  misc_feature: MA Experiment 20000111 PARAMETER Experiment Name: At_42deg_Heat_cDNA_P Parameter: Timepoint (hr) Value: 6
  misc_feature: MA Experiment 20000111 PARAMETER Experiment Name: At_42deg_Heat_cDNA_P Parameter: Tissue Value: Aerial
  misc_feature: MA Experiment ID: 20000112 Result: Up-regulated in Transcription
  misc_feature: MA Experiment 20000112 PARAMETER Experiment Name: At_42deg_Heat_cDNA_P Parameter: Temperature (deg C) Value: 42 vs. 22
  misc_feature: MA Experiment 20000112 PARAMETER Experiment Name: At_42deg_Heat_cDNA_P Parameter: Timepoint (hr) Value: 2
  misc_feature: MA Experiment 20000112 PARAMETER Experiment Name: At_42deg_Heat_cDNA_P Parameter: Tissue Value: Aerial
  misc_feature: MA Experiment ID: 20000113 Result: Up-regulated in Transcription
  misc_feature: MA Experiment 20000113 PARAMETER Experiment Name: At_42deg_Heat_cDNA_P Parameter: Temperature (deg C) Value: 42 vs. 22
  misc_feature: MA Experiment 20000113 PARAMETER Experiment Name: At_42deg_Heat_cDNA_P Parameter: Timepoint (hr) Value: 8
  misc_feature: MA Experiment 20000113 PARAMETER Experiment Name: At_42deg_Heat_cDNA_P Parameter: Tissue Value: Aerial
  misc_feature: MA Experiment ID: 20000117 Result: Down-regulated in Transcription
  misc_feature: MA Experiment 20000117 PARAMETER Experiment Name: At_100uM_ABA_Mutants_cDNA_P Parameter: Plant Line Value: Columbia
  misc_feature: MA Experiment 20000117 PARAMETER Experiment Name: At_100uM_ABA_Mutants_cDNA_P Parameter: Timepoint (hr) Value: 6
  misc_feature: MA Experiment 20000117 PARAMETER Experiment Name: At_100uM_ABA_Mutants_cDNA_P Parameter: Tissue Value: Aerial
  misc_feature: MA Experiment 20000117 PARAMETER Experiment Name: At_100uM_ABA_Mutants_cDNA_P Parameter: Treatment Value: 100uM ABA vs. No Treatment
  misc_feature: MA Experiment ID: 20000144 Result: Up-regulated in Transcription
  misc_feature: MA Experiment 20000144 PARAMETER Experiment Name: At_42deg_Heat_cDNA_P Parameter: Temperature (deg C) Value: 42 vs. 22
  misc_feature: MA Experiment 20000144 PARAMETER Experiment Name: At_42deg_Heat_cDNA_P Parameter: Timepoint (hr) Value: 1
  misc_feature: MA Experiment 20000144 PARAMETER Experiment Name: At_42deg_Heat_cDNA_P Parameter: Tissue Value: Aerial
  misc_feature: MA Experiment ID: 20000173 Result: Up-regulated in Transcription
  misc_feature: MA Experiment 20000173 PARAMETER Experiment Name: At_42deg_Heat_P Parameter: Age (day) Value: 14
  misc_feature: MA Experiment 20000173 PARAMETER Experiment Name: At_42deg_Heat_P Parameter: Organism Value: A. thaliana
  misc_feature: MA Experiment 20000173 PARAMETER Experiment Name: At_42deg_Heat_P Parameter: Plant Line Value: WS
  misc_feature: MA Experiment 20000173 PARAMETER Experiment Name: At_42deg_Heat_P Parameter: Temperature (deg C) Value: 42 vs. 22
  misc_feature: MA Experiment 20000173 PARAMETER Experiment Name: At_42deg_Heat_P Parameter: Timepoint (hr) Value: 6
  misc_feature: MA Experiment 20000173 PARAMETER Experiment Name: At_42deg_Heat_P Parameter: Tissue Value: Aerial
  misc_feature: MA Experiment ID: 20000179 Result: Down-regulated in Transcription
  misc_feature: MA Experiment 20000179 PARAMETER Experiment Name: At_Germinating_Seeds_P Parameter: Age (hr) Value: 6 vs. 0
  misc_feature: MA Experiment 20000179 PARAMETER Experiment Name: At_Germinating_Seeds_P Parameter: Tissue Value: Germinating Seeds
  misc_feature: MA Experiment ID: 20000182 Result: Up-regulated in Transcription
  misc_feature: MA Experiment 20000182 PARAMETER Experiment Name: At_2mM_SA_P Parameter: Age (day) Value: 14
  misc_feature: MA Experiment 20000182 PARAMETER Experiment Name: At_2mM_SA_P Parameter: Organism Value: A. thaliana
  misc_feature: MA Experiment 20000182 PARAMETER Experiment Name: At_2mM_SA_P Parameter: Plant Line Value: WS
  misc_feature: MA Experiment 20000182 PARAMETER Experiment Name: At_2mM_SA_P Parameter: Timepoint (hr) Value: 6
  misc_feature: MA Experiment 20000182 PARAMETER Experiment Name: At_2mM_SA_P Parameter: Tissue Value: Aerial
  misc_feature: MA Experiment 20000182 PARAMETER Experiment Name: At_2mM_SA_P Parameter: Treatment Value: 2mM SA vs. No Treatment
  misc_feature: MA Experiment ID: 20000184 Result: Up-regulated in Transcription
  misc_feature: MA Experiment 20000184 PARAMETER Experiment Name: At_Shoots__P Parameter: Age (day) Value: 7
  misc_feature: MA Experiment 20000184 PARAMETER Experiment Name: At_Shoots__P Parameter: Tissue Value: Shoots vs. Whole Plant
  misc_feature: MA Experiment ID: 20000438 Result: Up-regulated in Transcription
  misc_feature: MA Experiment 20000438 PARAMETER Experiment Name: At_Shoots__P Parameter: Age (day) Value: 14
  misc_feature: MA Experiment 20000438 PARAMETER Experiment Name: At_Shoots__P Parameter: Tissue Value: Shoots vs. Whole Plant
  misc_feature: MA Experiment ID: 20000495 Result: Down-regulated in Transcription
  misc_feature: MA Experiment 20000495 PARAMETER Experiment Name: At_Guard_Cells_P Parameter: Harvest Date Value: 8/2/2002
  misc_feature: MA Experiment 20000495 PARAMETER Experiment Name: At_Guard_Cells_P Parameter: Organism Value: A. thaliana
  misc_feature: MA Experiment 20000495 PARAMETER Experiment Name: At_Guard_Cells_P Parameter: Tissue Value: Guard Cells vs. Leaves
  misc_feature: MA Experiment ID: 20000794 Result: Up-regulated in Transcription
  misc_feature: MA Experiment 20000794 PARAMETER Experiment Name: At_Petals_P Parameter: Age (day) Value: 23-25 days
  misc_feature: MA Experiment 20000794 PARAMETER Experiment Name: At_Petals_P Parameter: Plant Line Value: WS
  misc_feature: MA Experiment 20000794 PARAMETER Experiment Name: At_Petals_P Parameter: Tissue Value: Petals vs. Whole plant
  misc_feature: MA Experiment ID: 20001248 Result: Down-regulated in Transcription
  misc_feature: MA Experiment 20001248 PARAMETER Experiment Name: At_Far-red-induction_P Parameter: Age (day) Value: 7
  misc_feature: MA Experiment 20001248 PARAMETER Experiment Name: At_Far-red-induction_P Parameter: Light Value: Far-red vs. White
  misc_feature: MA Experiment 20001248 PARAMETER Experiment Name: At_Far-red-induction_P Parameter: Organism Value: A. thaliana
  misc_feature: MA Experiment 20001248 PARAMETER Experiment Name: At_Far-red-induction_P Parameter: Plant Line Value: Columbia
  misc_feature: MA Experiment 20001248 PARAMETER Experiment Name: At_Far-red-induction_P Parameter: Timepoint (hr) Value: 4
  misc_feature: MA Experiment 20001248 PARAMETER Experiment Name: At_Far-red-induction_P Parameter: Tissue Value: Whole Plant
  misc_feature: MA Experiment ID: 20001904 Result: Up-regulated in Transcription
  misc_feature: MA Experiment 20001904 PARAMETER Experiment Name: At_Drought_Reproduction_P Parameter: Age (day) Value: 37
  misc_feature: MA Experiment 20001904 PARAMETER Experiment Name: At_Drought_Reproduction_P Parameter: Organism Value: A. thaliana
  misc_feature: MA Experiment 20001904 PARAMETER Experiment Name: At_Drought_Reproduction_P Parameter: Plant Line Value: WS
  misc_feature: MA Experiment 20001904 PARAMETER Experiment Name: At_Drought_Reproduction_P Parameter: Timepoint (day) Value: 7
  misc_feature: MA Experiment 20001904 PARAMETER Experiment Name: At_Drought_Reproduction_P Parameter: Tissue Value: Rosettes
  misc_feature: MA Experiment 20001904 PARAMETER Experiment Name: At_Drought_Reproduction_P Parameter: Treatment Value: Drought vs. No Drought
acaatagtctccttctgtttctctttatatttgtctctataactctctttcgttaaagtttcataaaacctcaacgaactccttccatggcagcaggactatcaacaatcgccgtaacactcaaaccactcaaccgctcttctttctccgcaaaccaccctatatccaccgcagttttccctccatctctaagattcaacggcttccgacgtcgaaagattctcaccgtttgtttcgtcgtggaagaacggaaacaaagctctcccatggacgatgacaacaaaccagaaagcacgacaagctcttctgagatcttgatgacgtcgcggcttctcaagaaagcggagaagaagaaatcagagaggttcacttatttaatagcagctgtgatgtcgagctttggtatcacttctatggctataatggctgtttattaccgattttcttggcaaatgaagggaggtgaagtgtctgtgttagagatgtttggtacatttgctctttccgttggtgctgccggactgggaataacgatgtttggaatggcttacatgttcgttcacgatggacttgtgcacaagagattccctgtaggtcccattgccaacgttccttaccttcgaaaggtcgccgccgctcaccagctacaccacacagacaaattcaaaggtgtaccatatgggctgtttcttggaccaaaggaagtagaagaagtgggaggaaaagaagagttggagaaagagataagccggagaatcaaattatac

SEQ ID NO: 35763 - protein, 227 aa, Arabidopsis thaliana
  peptide (1)..(227): Ceres Seq. ID no. 12481797
  misc_feature (144)..(224): Pfam Name: Carotene hydroxylase Pfam Description: Carotene hydroxylase
  misc_feature (144)..(226): Homolog of NCBI NO: 9971820 NR Description: beta hydroxylase [Tagetes erecta]
  misc_feature (1)..(164): Homolog of NCBI NO: 9971820 NR Description: beta hydroxylase [Tagetes erecta]
  misc_feature (144)..(226): Homolog of NCBI NO: 5870598 NR Description: beta-carotene hydroxylase [Lycopersicon
  misc_feature (12)..(164): Homolog of NCBI NO: 5870598 NR Description: beta-carotene hydroxylase [Lycopersicon
  misc_feature (144)..(226): Homolog of NCBI NO: 1575296 NR Description: beta-carotene hydroxylase [Arabidopsis thaliana]
  misc_feature (18)..(164): Homolog of NCBI NO: 1575296 NR Description: beta-carotene hydroxylase [Arabidopsis thaliana]
  misc_feature (144)..(226): Homolog of NCBI NO: 15235959 NR Description: beta-carotene hydroxylase
  misc_feature (1)..(164): Homolog of NCBI NO: 15235959 NR Description: beta-carotene hydroxylase
  misc_feature (144)..(226): Homolog of NCBI NO: 15237204 NR Description: beta-carotene hydroxylase, putative
  misc_feature (1)..(162): Homolog of NCBI NO: 15237204 NR Description: beta-carotene hydroxylase, putative
MAAGLSTIAVTLKPLNRSSFSANHPISTAVFPPSLRFNGFRRRKILTVCFVVEERKQSSPMDDDNKPESTTSSSEILMTSRLLKKAEKKKSERFTYLIAAVMSSFGITSMAIMAVYYRFSWQMKGGEVSVLEMFGTFALSVGAAGLGITMFGMAYMFVHDGLVHKRFPVGPIANVPYLRKVAAAHQLHHTDKFKGVPYGLFLGPKEVEEVGGKEELEKEISRRIKLY

SEQ ID NO: 35764 - protein, 167 aa, Arabidopsis thaliana
  peptide (1)..(167): Ceres Seq. ID no. 12481798
  misc_feature (84)..(164): Pfam Name: Carotene hydroxylase Pfam Description: Carotene hydroxylase
  misc_feature (84)..(166): Homolog of NCBI NO: 9971820 NR Description: beta hydroxylase [Tagetes erecta]
  misc_feature (1)..(104): Homolog of NCBI NO: 9971820 NR Description: beta hydroxylase [Tagetes erecta]
  misc_feature (84)..(166): Homolog of NCBI NO: 5870598 NR Description: beta-carotene hydroxylase [Lycopersicon
  misc_feature (1)..(104): Homolog of NCBI NO: 5870598 NR Description: beta-carotene hydroxylase [Lycopersicon
  misc_feature (84)..(166): Homolog of NCBI NO: 1575296 NR Description: beta-carotene hydroxylase [Arabidopsis thaliana]
  misc_feature (1)..(104): Homolog of NCBI NO: 1575296 NR Description: beta-carotene hydroxylase [Arabidopsis thaliana]
  misc_feature (84)..(166): Homolog of NCBI NO: 15235959 NR Description: beta-carotene hydroxylase
  misc_feature (1)..(104): Homolog of NCBI NO: 15235959 NR Description: beta-carotene hydroxylase
  misc_feature (84)..(166): Homolog of NCBI NO: 15237204 NR Description: beta-carotene hydroxylase, putative
  misc_feature (1)..(102): Homolog of NCBI NO: 15237204 NR Description: beta-carotene hydroxylase, putative
MDDDNKPESTTSSSEILMTSRLLKKAEKKKSERFTYLIAAVMSSFGITSMAIMAVYYRFSWQMKGGEVSVLEMFGTFALSVGAAGLGITMFGMAYMFVHDGLVHKRFPVGPIANVPYLRKVAAAHQLHHTDKFKGVPYGLFLGPKEVEEVGGKEELEKEISRRIKLY

SEQ ID NO: 35765 - protein, 150 aa, Arabidopsis thaliana
  peptide (1)..(150): Ceres Seq. ID no. 12481799
  misc_feature (67)..(147): Pfam Name: Carotene hydroxylase Pfam Description: Carotene hydroxylase
  misc_feature (67)..(149): Homolog of NCBI NO: 9971820 NR Description: beta hydroxylase [Tagetes erecta]
  misc_feature (1)..(87): Homolog of NCBI NO: 9971820 NR Description: beta hydroxylase [Tagetes erecta]
  misc_feature (67)..(149): Homolog of NCBI NO: 5870598 NR Description: beta-carotene hydroxylase [Lycopersicon
  misc_feature (1)..(87): Homolog of NCBI NO: 5870598 NR Description: beta-carotene hydroxylase [Lycopersicon
  misc_feature (67)..(149): Homolog of NCBI NO: 1575296 NR Description: beta-carotene hydroxylase [Arabidopsis thaliana]
  misc_feature (1)..(87): Homolog of NCBI NO: 1575296 NR Description: beta-carotene hydroxylase [Arabidopsis thaliana]
  misc_feature (67)..(149): Homolog of NCBI NO: 15235959 NR Description: beta-carotene hydroxylase
  misc_feature (1)..(87): Homolog of NCBI NO: 15235959 NR Description: beta-carotene hydroxylase
  misc_feature (67)..(149): Homolog of NCBI NO: 15237204 NR Description: beta-carotene hydroxylase, putative
  misc_feature (1)..(85): Homolog of NCBI NO: 15237204 NR Description: beta-carotene hydroxylase, putative
MTSRLLKKAEKKKSERFTYLIAAVMSSFGITSMAIMAVYYRFSWQMKGGEVSVLEMFGTFALSVGAAGLGITMFGMAYMFVHDGLVHKRFPVGPIANVPYLRKVAAAHQLHHTDKFKGVPYGLFLGPKEVEEVGGKEELEKEISRRIKLY

SEQ ID NO: 35766 - DNA, 474 bp, Arabidopsis thaliana
  misc_feature (1)..(474): Ceres Seq. ID no. 13495933
  misc_feature: MA Experiment ID: 108473 Result: Down-regulated in Transcription
  misc_feature: MA Experiment 108473 PARAMETER Experiment Name: At_Drought_Flowers_cDNA_P Parameter: Timepoint (hr) Value: 7 d
  misc_feature: MA Experiment 108473 PARAMETER Experiment Name: At_Drought_Flowers_cDNA_P Parameter: Tissue Value: Flower
  misc_feature: MA Experiment 108473 PARAMETER Experiment Name: At_Drought_Flowers_cDNA_P Parameter: Treatment Value: Drought vs. No Drought
  misc_feature: MA Experiment ID: 108501 Result: Down-regulated in Transcription
  misc_feature: MA Experiment 108501 PARAMETER Experiment Name: At_ap2_floral_buds_cDNA_P Parameter: Plant Line Value: ap2 (Ler.)
  misc_feature: MA Experiment 108501 PARAMETER Experiment Name: At_ap2_floral_buds_cDNA_P Parameter: Tissue Value: Closed Flower
  misc_feature: MA Experiment ID: 108576 Result: Up-regulated in Transcription
  misc_feature: MA Experiment 108576 PARAMETER Experiment Name: At_42deg_Heat_cDNA_P Parameter: Temperature (deg C) Value: 42 vs. 22
  misc_feature: MA Experiment 108576 PARAMETER Experiment Name: At_42deg_Heat_cDNA_P Parameter: Timepoint (hr) Value: 1
  misc_feature: MA Experiment 108576 PARAMETER Experiment Name: At_42deg_Heat_cDNA_P Parameter: Tissue Value: Aerial
  misc_feature: MA Experiment ID: 20000087 Result: Up-regulated in Transcription
  misc_feature: MA Experiment 20000087 PARAMETER Experiment Name: At_100uM_ABA_Mutants_cDNA_P Parameter: Plant Line Value: WS
  misc_feature: MA Experiment 20000087 PARAMETER Experiment Name: At_100uM_ABA_Mutants_cDNA_P Parameter: Timepoint (hr) Value: 6
  misc_feature: MA Experiment 20000087 PARAMETER Experiment Name: At_100uM_ABA_Mutants_cDNA_P Parameter: Tissue Value: Aerial
  misc_feature: MA Experiment 20000087 PARAMETER Experiment Name: At_100uM_ABA_Mutants_cDNA_P Parameter: Treatment Value: 100uM ABA vs. No Treatment
  misc_feature: MA Experiment ID: 20000184 Result: Down-regulated in Transcription
  misc_feature: MA Experiment 20000184 PARAMETER Experiment Name: At_Shoots__P Parameter: Age (day) Value: 7
  misc_feature: MA Experiment 20000184 PARAMETER Experiment Name: At_Shoots__P Parameter: Tissue Value: Shoots vs. Whole Plant
  misc_feature: MA Experiment ID: 20000185 Result: Down-regulated in Transcription
  misc_feature: MA Experiment 20000185 PARAMETER Experiment Name: At_Roots__P Parameter: Age (day) Value: 7 vs. 21
  misc_feature: MA Experiment 20000185 PARAMETER Experiment Name: At_Roots__P Parameter: Organism Value: A. thaliana
  misc_feature: MA Experiment 20000185 PARAMETER Experiment Name: At_Roots__P Parameter: Tissue Value: Roots vs. Whole Plant
  misc_feature: MA Experiment ID: 20000234 Result: Down-regulated in Transcription
  misc_feature: MA Experiment 20000234 PARAMETER Experiment Name: At_Siliques_P Parameter: Age (day) Value: 21
  misc_feature: MA Experiment 20000234 PARAMETER Experiment Name: At_Siliques_P Parameter: Organism Value: A. thaliana
  misc_feature: MA Experiment 20000234 PARAMETER Experiment Name: At_Siliques_P Parameter: Plant Line Value: WS
  misc_feature: MA Experiment 20000234 PARAMETER Experiment Name: At_Siliques_P Parameter: Tissue Value: Less Than 5mm Siliques vs. Whole Plant
  misc_feature: MA Experiment ID: 20000235 Result: Down-regulated in Transcription
  misc_feature: MA Experiment 20000235 PARAMETER Experiment Name: At_Siliques_P Parameter: Age (day) Value: 21
  misc_feature: MA Experiment 20000235 PARAMETER Experiment Name: At_Siliques_P Parameter: Organism Value: A. thaliana
  misc_feature: MA Experiment 20000235 PARAMETER Experiment Name: At_Siliques_P Parameter: Plant Line Value: WS
  misc_feature: MA Experiment 20000235 PARAMETER Experiment Name: At_Siliques_P Parameter: Tissue Value: 5-10mm Siliques vs. Whole Plant
  misc_feature: MA Experiment ID: 20000265 Result: Up-regulated in Transcription
  misc_feature: MA Experiment 20000265 PARAMETER Experiment Name: At_Open_Flower_P Parameter: Age (day) Value: 21
  misc_feature: MA Experiment 20000265 PARAMETER Experiment Name: At_Open_Flower_P Parameter: Plant Line Value: WS
  misc_feature: MA Experiment 20000265 PARAMETER Experiment Name: At_Open_Flower_P Parameter: Tissue Value: Closed Flower vs. Whole Plant
  misc_feature: MA Experiment ID: 20000286 Result: Up-regulated in Transcription
  misc_feature: MA Experiment 20000286 PARAMETER Experiment Name: At_Open_Flower_P Parameter: Age (day) Value: 21
  misc_feature: MA Experiment 20000286 PARAMETER Experiment Name: At_Open_Flower_P Parameter: Plant Line Value: WS
  misc_feature: MA Experiment 20000286 PARAMETER Experiment Name: At_Open_Flower_P Parameter: Tissue Value: Half Open vs. Whole Plant
  misc_feature: MA Experiment ID: 20000438 Result: Down-regulated in Transcription
  misc_feature: MA Experiment 20000438 PARAMETER Experiment Name: At_Shoots__P Parameter: Age (day) Value: 14
  misc_feature: MA Experiment 20000438 PARAMETER Experiment Name: At_Shoots__P Parameter: Tissue Value: Shoots vs. Whole Plant
  misc_feature: MA Experiment ID: 20000794 Result: Down-regulated in Transcription
  misc_feature: MA Experiment 20000794 PARAMETER Experiment Name: At_Petals_P Parameter: Age (day) Value: 23-25 days
  misc_feature: MA Experiment 20000794 PARAMETER Experiment Name: At_Petals_P Parameter: Plant Line Value: WS
  misc_feature: MA Experiment 20000794 PARAMETER Experiment Name: At_Petals_P Parameter: Tissue Value: Petals vs. Whole plant
  misc_feature: MA Experiment ID: 20001760 Result: Up-regulated in Transcription
  misc_feature: MA Experiment 20001760 PARAMETER Experiment Name: At_50mM_NH4NO3_L-to-H_P Parameter: Timepoint (hr) Value: 2
  misc_feature: MA Experiment 20001760 PARAMETER Experiment Name: At_50mM_NH4NO3_L-to-H_P Parameter: Tissue Value: Siliques
  misc_feature: MA Experiment 20001760 PARAMETER Experiment Name: At_50mM_NH4NO3_L-to-H_P Parameter: Treatment Value: 50mM NH4NO3 vs 100mM Mannitol
  misc_feature: MA Experiment ID: 20001770 Result: Down-regulated in Transcription
  misc_feature: MA Experiment 20001770 PARAMETER Experiment Name: At_Far-red-enriched-adult_P Parameter: Age (day) Value: 28
  misc_feature: MA Experiment 20001770 PARAMETER Experiment Name: At_Far-red-enriched-adult_P Parameter: Light Value: Far-red enriched vs. White
  misc_feature: MA Experiment 20001770 PARAMETER Experiment Name: At_Far-red-enriched-adult_P Parameter: Organism Value: A. thaliana
  misc_feature: MA Experiment 20001770 PARAMETER Experiment Name: At_Far-red-enriched-adult_P Parameter: Plant Line Value: Columbia
  misc_feature: MA Experiment 20001770 PARAMETER Experiment Name: At_Far-red-enriched-adult_P Parameter: Timepoint (hr) Value: 8
  misc_feature: MA Experiment 20001770 PARAMETER Experiment Name: At_Far-red-enriched-adult_P Parameter: Tissue Value: Aerial
  misc_feature: MA Experiment ID: 20001771 Result: Up-regulated in Transcription
  misc_feature: MA Experiment 20001771 PARAMETER Experiment Name: At_Far-red-enriched-adult_P Parameter: Age (day) Value: 28
  misc_feature: MA Experiment 20001771 PARAMETER Experiment Name: At_Far-red-enriched-adult_P Parameter: Light Value: Far-red enriched vs. White
  misc_feature: MA Experiment 20001771 PARAMETER Experiment Name: At_Far-red-enriched-adult_P Parameter: Organism Value: A. thaliana
  misc_feature: MA Experiment 20001771 PARAMETER Experiment Name: At_Far-red-enriched-adult_P Parameter: Plant Line Value: Columbia
  misc_feature: MA Experiment 20001771 PARAMETER Experiment Name: At_Far-red-enriched-adult_P Parameter: Timepoint (hr) Value: 16
  misc_feature: MA Experiment 20001771 PARAMETER Experiment Name: At_Far-red-enriched-adult_P Parameter: Tissue Value: Aerial
  misc_feature: MA Experiment ID: 20001906 Result: Up-regulated in Transcription
  misc_feature: MA Experiment 20001906 PARAMETER Experiment Name: At_Drought_Reproduction_P Parameter: Age (day) Value: 35
  misc_feature: MA Experiment 20001906 PARAMETER Experiment Name: At_Drought_Reproduction_P Parameter: Organism Value: A. thaliana
  misc_feature: MA Experiment 20001906 PARAMETER Experiment Name: At_Drought_Reproduction_P Parameter: Plant Line Value: WS
  misc_feature: MA Experiment 20001906 PARAMETER Experiment Name: At_Drought_Reproduction_P Parameter: Timepoint (day) Value: 5
  misc_feature: MA Experiment 20001906 PARAMETER Experiment Name: At_Drought_Reproduction_P Parameter: Tissue Value: Siliques
  misc_feature: MA Experiment 20001906 PARAMETER Experiment Name: At_Drought_Reproduction_P Parameter: Treatment Value: Drought vs. No Drought
aatatagaatataaccatattccggacatgaagatcgtgacattggtactcgtcgtcttcgtcatactttcgacatcattcccggctgccatcaaagccgaagacacgggagatacaggaaatgtgggagtgacatgtgacgcaaggcagcttcagccttgccttgccgcgattacgggaggaggacaaccctcaggtgcatgttgtgcaaagcttacagagcaacagtcatgcctctgtggtttcgctaagaaccctgcgttcgcacagtacattagctctccaaacgctcgcaaagtgctccttgcttgcaatgttgcttatcccacttgttgaaacttatctagagattttataaataaataaacgaaaggaaataaattacattatatcaaacgttatgatacaattcaaccgtttgtgttaatgtactggcttacatggttaaataaagtttattttcttggttgtttt

SEQ ID NO: 35767 - protein, 111 aa, Arabidopsis thaliana
  peptide (1)..(111): Ceres Seq. ID no. 13495934
  misc_feature (46)..(111): Pfam Name: Protease inhibitor/seed storage/LTP family Pfam Description: Protease inhibitor/seed storage/LTP family
  misc_feature (17)..(111): Homolog of NCBI NO: 7489428 NR Description: probable lipid transfer protein - barley
  misc_feature (38)..(111): Homolog of NCBI NO: 3183088 NR Description: Probable nonspecific lipid-transfer protein AKCS9
  misc_feature (43)..(111): Homolog of NCBI NO: 18402345 NR Description: protease inhibitor/seed storage/lipid transfer
  misc_feature (29)..(111): Homolog of NCBI NO: 7489543 NR Description: probable lipid transfer protein - rice
  misc_feature (10)..(111): Homolog of NCBI NO: 15240856 NR Description: protease inhibitor/seed storage/lipid transfer
  misc_feature (10)..(111): Homolog of NCBI NO: 21555147 NR Description: lipid transfer-like protein [Arabidopsis thaliana]
  misc_feature (10)..(111): Homolog of NCBI NO: 18421731 NR Description: protease inhibitor/seed storage/lipid transfer
  misc_feature (10)..(111): Homolog of NCBI NO: 15240847 NR Description: protease inhibitor/seed storage/lipid transfer
  misc_feature (22)..(111): Homolog of NCBI NO: 7488524 NR Description: lipid transfer like protein - turnip (fragment)
  misc_feature (10)..(111): Homolog of NCBI NO: 15219758 NR Description: lipid transfer protein family [Arabidopsis
NIEYNHIPDMKIVTLVLVVFVILSTSFPAAIKAEDTGDTGNVGVTCDARQLQPCLAAITGGGQPSGACCAKLTEQQSCLCGFAKNPAFAQYISSPNARKVLLACNVAYPTC

SEQ ID NO: 35768 - protein, 102 aa, Arabidopsis thaliana; identical to SEQ ID NO: 24515
  peptide (1)..(102): Ceres Seq. ID no. 13495935
  misc_feature (37)..(102): Pfam Name: Protease inhibitor/seed storage/LTP family Pfam Description: Protease inhibitor/seed storage/LTP family
  misc_feature (8)..(102): Homolog of NCBI NO: 7489428 NR Description: probable lipid transfer protein - barley
  misc_feature (29)..(102): Homolog of NCBI NO: 3183088 NR Description: Probable nonspecific lipid-transfer protein AKCS9
  misc_feature (34)..(102): Homolog of NCBI NO: 18402345 NR Description: protease inhibitor/seed storage/lipid transfer
  misc_feature (20)..(102): Homolog of NCBI NO: 7489543 NR Description: probable lipid transfer protein - rice
  misc_feature (1)..(102): Homolog of NCBI NO: 15240856 NR Description: protease inhibitor/seed storage/lipid transfer
  misc_feature (1)..(102): Homolog of NCBI NO: 21555147 NR Description: lipid transfer-like protein [Arabidopsis thaliana]
  misc_feature (1)..(102): Homolog of NCBI NO: 18421731 NR Description: protease inhibitor/seed storage/lipid transfer
  misc_feature (1)..(102): Homolog of NCBI NO: 15240847 NR Description: protease inhibitor/seed storage/lipid transfer
  misc_feature (13)..(102): Homolog of NCBI NO: 7488524 NR Description: lipid transfer like protein - turnip (fragment)
  misc_feature (1)..(102): Homolog of NCBI NO: 15219758 NR Description: lipid transfer protein family [Arabidopsis

SEQ ID NO: 35769 - DNA, 1293 bp, Arabidopsis thaliana
  misc_feature (1)..(1293): Ceres Seq. ID no. 12370494
  misc_feature: MA Experiment ID: 108434 Result: Down-regulated in Transcription
  misc_feature: MA Experiment 108434 PARAMETER Experiment Name: At_Root_Tips_cDNA_P Parameter: Tissue Value: Root Tips
  misc_feature: MA Experiment ID: 108469 Result: Up-regulated in Transcription
  misc_feature: MA Experiment ID: 108585 Result: Up-regulated in Transcription
  misc_feature: MA Experiment 108585 PARAMETER Experiment Name: At_5mM_NaNP_cDNA_P Parameter: Timepoint (hr) Value: 6
  misc_feature: MA Experiment 108585 PARAMETER Experiment Name: At_5mM_NaNP_cDNA_P Parameter: Tissue Value: Aerial
  misc_feature: MA Experiment 108585 PARAMETER Experiment Name: At_5mM_NaNP_cDNA_P Parameter: Treatment Value: null
  misc_feature: MA Experiment ID: 108668 Result: Up-regulated in Transcription
  misc_feature: MA Experiment 108668 PARAMETER Experiment Name: At_2mM_SA_cDNA_P Parameter: Plant Line Value: WS
  misc_feature: MA Experiment 108668 PARAMETER Experiment Name: At_2mM_SA_cDNA_P Parameter: Timepoint (hr) Value: 6
  misc_feature: MA Experiment 108668 PARAMETER Experiment Name: At_2mM_SA_cDNA_P Parameter: Treatment Value: 2mM SA vs. No Treatment
  misc_feature: MA Experiment ID: 20000182 Result: Up-regulated in Transcription
  misc_feature: MA Experiment 20000182 PARAMETER Experiment Name: At_2mM_SA_P Parameter: Age (day) Value: 14
  misc_feature: MA Experiment 20000182 PARAMETER Experiment Name: At_2mM_SA_P Parameter: Organism Value: A. thaliana
  misc_feature: MA Experiment 20000182 PARAMETER Experiment Name: At_2mM_SA_P Parameter: Plant Line Value: WS
  misc_feature: MA Experiment 20000182 PARAMETER Experiment Name: At_2mM_SA_P Parameter: Timepoint (hr) Value: 6
  misc_feature: MA Experiment 20000182 PARAMETER Experiment Name: At_2mM_SA_P Parameter: Tissue Value: Aerial
  misc_feature: MA Experiment 20000182 PARAMETER Experiment Name: At_2mM_SA_P Parameter: Treatment Value: 2mM SA vs. No Treatment
  misc_feature: MA Experiment ID: 20000184 Result: Down-regulated in Transcription
  misc_feature: MA Experiment 20000184 PARAMETER Experiment Name: At_Shoots__P Parameter: Age (day) Value: 7
  misc_feature: MA Experiment 20000184 PARAMETER Experiment Name: At_Shoots__P Parameter: Tissue Value: Shoots vs. Whole Plant
  misc_feature: MA Experiment ID: 20000234 Result: Down-regulated in Transcription
  misc_feature: MA Experiment 20000234 PARAMETER Experiment Name: At_Siliques_P Parameter: Age (day) Value: 21
  misc_feature: MA Experiment 20000234 PARAMETER Experiment Name: At_Siliques_P Parameter: Organism Value: A. thaliana
  misc_feature: MA Experiment 20000234 PARAMETER Experiment Name: At_Siliques_P Parameter: Plant Line Value: WS
  misc_feature: MA Experiment 20000234 PARAMETER Experiment Name: At_Siliques_P Parameter: Tissue Value: Less Than 5mm Siliques vs. Whole Plant
  misc_feature: MA Experiment ID: 20000264 Result: Down-regulated in Transcription
  misc_feature: MA Experiment 20000264 PARAMETER Experiment Name: At_Open_Flower_P Parameter: Age (day) Value: 21
  misc_feature: MA Experiment 20000264 PARAMETER Experiment Name: At_Open_Flower_P Parameter: Plant Line Value: WS
  misc_feature: MA Experiment 20000264 PARAMETER Experiment Name: At_Open_Flower_P Parameter: Tissue Value: Open Flower vs. Whole Plant
  misc_feature: MA Experiment ID: 20000265 Result: Down-regulated in Transcription
  misc_feature: MA Experiment 20000265 PARAMETER Experiment Name: At_Open_Flower_P Parameter: Age (day) Value: 21
  misc_feature: MA Experiment 20000265 PARAMETER Experiment Name: At_Open_Flower_P Parameter: Plant Line Value: WS
  misc_feature: MA Experiment 20000265 PARAMETER Experiment Name: At_Open_Flower_P Parameter: Tissue Value: Closed Flower vs. Whole Plant
  misc_feature: MA Experiment ID: 20000286 Result: Down-regulated in Transcription
  misc_feature: MA Experiment 20000286 PARAMETER Experiment Name: At_Open_Flower_P Parameter: Age (day) Value: 21
  misc_feature: MA Experiment 20000286 PARAMETER Experiment Name: At_Open_Flower_P Parameter: Plant Line Value: WS
  misc_feature: MA Experiment 20000286 PARAMETER Experiment Name: At_Open_Flower_P Parameter: Tissue Value: Half Open vs. Whole Plant
  misc_feature: MA Experiment ID: 20000438 Result: Down-regulated in Transcription
  misc_feature: MA Experiment 20000438 PARAMETER Experiment Name: At_Shoots__P Parameter: Age (day) Value: 14
  misc_feature: MA Experiment 20000438 PARAMETER Experiment Name: At_Shoots__P Parameter: Tissue Value: Shoots vs. Whole Plant
  misc_feature: MA Experiment ID: 20001247 Result: Up-regulated in Transcription
  misc_feature: MA Experiment 20001247 PARAMETER Experiment Name: At_Far-red-induction_P Parameter: Age (day) Value: 7
  misc_feature: MA Experiment 20001247 PARAMETER Experiment Name: At_Far-red-induction_P Parameter: Light Value: Far-red vs. White
  misc_feature: MA Experiment 20001247 PARAMETER Experiment Name: At_Far-red-induction_P Parameter: Organism Value: A. thaliana
  misc_feature: MA Experiment 20001247 PARAMETER Experiment Name: At_Far-red-induction_P Parameter: Plant Line Value: Columbia
  misc_feature: MA Experiment 20001247 PARAMETER Experiment Name: At_Far-red-induction_P Parameter: Timepoint (hr) Value: 1
  misc_feature: MA Experiment 20001247 PARAMETER Experiment Name: At_Far-red-induction_P Parameter: Tissue Value: Whole Plant
  misc_feature: MA Experiment ID: 20001555 Result: Down-regulated in Transcription
  misc_feature: MA Experiment 20001555 PARAMETER Experiment Name: At_Drought_Soil_Dry_P Parameter: Age (day) Value: 24
  misc_feature: MA Experiment 20001555 PARAMETER Experiment Name: At_Drought_Soil_Dry_P Parameter: Organism Value: A. thaliana
  misc_feature: MA Experiment 20001555 PARAMETER Experiment Name: At_Drought_Soil_Dry_P Parameter: Plant Line Value: WS
  misc_feature: MA Experiment 20001555 PARAMETER Experiment Name: At_Drought_Soil_Dry_P Parameter: Post Timepoint (hr) Value: None
  misc_feature: MA Experiment 20001555 PARAMETER Experiment Name: At_Drought_Soil_Dry_P Parameter: Post-Treatment Value: None
  misc_feature: MA Experiment 20001555 PARAMETER Experiment Name: At_Drought_Soil_Dry_P Parameter: Timepoint (day) Value: 10
  misc_feature: MA Experiment 20001555 PARAMETER Experiment Name: At_Drought_Soil_Dry_P Parameter: Treatment Value: Drought vs. No Drought
  misc_feature: MA Experiment ID: 20001556 Result: Down-regulated in Transcription
  misc_feature: MA Experiment 20001556 PARAMETER Experiment Name: At_Drought_Soil_Dry_P Parameter: Age (day) Value: 26
  misc_feature: MA Experiment 20001556 PARAMETER Experiment Name: At_Drought_Soil_Dry_P Parameter: Organism Value: A. thaliana
  misc_feature: MA Experiment 20001556 PARAMETER Experiment Name: At_Drought_Soil_Dry_P Parameter: Plant Line Value: WS
  misc_feature: MA Experiment 20001556 PARAMETER Experiment Name: At_Drought_Soil_Dry_P Parameter: Post Timepoint (hr) Value: None
  misc_feature: MA Experiment 20001556 PARAMETER Experiment Name: At_Drought_Soil_Dry_P Parameter: Post-Treatment Value: None
  misc_feature: MA Experiment 20001556 PARAMETER Experiment Name: At_Drought_Soil_Dry_P Parameter: Timepoint (day) Value: 12
  misc_feature: MA Experiment 20001556 PARAMETER Experiment Name: At_Drought_Soil_Dry_P Parameter: Treatment Value: Drought vs. No Drought
  misc_feature: MA Experiment ID: 20001560 Result: Down-regulated in Transcription
  misc_feature: MA Experiment 20001560 PARAMETER Experiment Name: At_Drought_Soil_Dry_P Parameter: Age (day) Value: 28
  misc_feature: MA Experiment 20001560 PARAMETER Experiment Name: At_Drought_Soil_Dry_P Parameter: Organism Value: A. thaliana
  misc_feature: MA Experiment 20001560 PARAMETER Experiment Name: At_Drought_Soil_Dry_P Parameter: Plant Line Value: WS
  misc_feature: MA Experiment 20001560 PARAMETER Experiment Name: At_Drought_Soil_Dry_P Parameter: Post Timepoint (hr) Value: None
  misc_feature: MA Experiment 20001560 PARAMETER Experiment Name: At_Drought_Soil_Dry_P Parameter: Post-Treatment Value: None
  misc_feature: MA Experiment 20001560 PARAMETER Experiment Name: At_Drought_Soil_Dry_P Parameter: Timepoint (day) Value: 14
  misc_feature: MA Experiment 20001560 PARAMETER Experiment Name: At_Drought_Soil_Dry_P Parameter: Treatment Value: Drought vs. No Drought
gttaaatcttttccctttttgatcctttcttcctttcttcttcttcttcgcattgatttggtcctccttcctcttctattctattcattaagaacctaatcttcatcttctccatcttcttcttcacggactccacttcgctcatccaggaaggtttattagtagtaaccaatccaagtgttccttttgtttgaagcaacaagctttgtgatattatcctgagagacaatgtttggtttaaggaaatcaccggcaaatcttcccaagcataactcagtcgacctcaagtcttccaagccaaatcctttcgattcagatgatgaatctgacaacaaacatacccttaacccttctaagaggactacctctgaaccctctttggctgatatgacaaacccttttggtggtgagagagttcagaaaggagatagtagttcatccaaacagtcattgttttcgaactccaaataccagtacaagaacaatttccgtgattctggtggtattgaaaaccagtcggttcaggagcttgaaggttatgctgtgtacaaggctgaagagactacgaaatctgtacaaggttgtttgaaggtagcagaagatataaggtctgatgctaccagaactttggtcatgttacacgatcagggcgagcaaatcactaggacgcaccataaagccgttgaaatcgaccatgatctcagtcgtggtgagaagcttcttggaagccttggaggcatgttttcaaagacttggaaaccaaagaagactcgtcctataaatggtcccgtcgtaaccagagatgactcaccaacgagaagagttaaccacttagagaaaagggaaaaactgggactgaactcagcacccagaggacaatcaagaacccgagaaccactccccgaatcagctgatgcttatcagagagtggagatggaaaaagctaagcaagacgatgggctttcagacttgagtgatatactcggcgagctaaagaacatggctgttgacatgggaagcgaaatcgagaagcagaacaaaggacttgaccatcttcatgatgatgttgacgaactcaacttcagagtgcaacaatcaaaccaacgtggtcgccgtttgcttggaaagtagatgaacagagggtttatatgttcattacactcattcctcgtttgttttattctctatgaagttgttctttaaaactggaaagattcttatcatgttaaatacattattgctatctgtgtttgtatttgatcttgtgacaaaaaaccaaaaaacttattgacc

SEQ ID NO: 35770 - protein, 300 aa, Arabidopsis thaliana; identical to SEQ ID NO: 29602
  peptide (1)..(300): Ceres Seq. ID no. 12370495
  misc_feature (240)..(300): Pfam Name: SNARE domain Pfam Description: SNARE domain
  misc_feature (98)..(298): Homolog of NCBI NO: 17737875 NR Description: Synapse protein 24 CG9474-PA [Drosophila
  misc_feature (95)..(298): Homolog of NCBI NO: 28279149 NR Description: Similar to synaptosomal-associated protein, 23kD
  misc_feature (91)..(298): Homolog of NCBI NO: 27263173 NR Description: synaptosome-associated protein of 25 kDa
  misc_feature (89)..(299): Homolog of NCBI NO: 6755588 NR Description: synaptosomal-associated protein
  misc_feature (89)..(299): Homolog of NCBI NO: 18765733 NR Description: synaptosomal-associated protein 25 isoform SNAP25A
  misc_feature (82)..(300): Homolog of NCBI NO: 15241436 NR Description: SNAP25 - like protein; protein id: At5g07880.1
  misc_feature (8)..(300): Homolog of NCBI NO: 32308074 NR Description: SNAP-34 [Hordeum vulgare subsp. vulgare]
  misc_feature (53)..(300): Homolog of NCBI NO: 15222976 NR Description: synaptosomal associated protein (SNAP25A),
  misc_feature (1)..(300): Homolog of NCBI NO: 21553460 NR Description: snap25a [Arabidopsis thaliana]
  misc_feature (1)..(300): Homolog of NCBI NO: 15240163 NR Description: syntaxin SNAP33

SEQ ID NO: 35771 - protein, 247 aa, Arabidopsis thaliana; identical to SEQ ID NO: 29603
  peptide (1)..(247): Ceres Seq. ID no. 12370496
  misc_feature (187)..(247): Pfam Name: SNARE domain Pfam Description: SNARE domain
  misc_feature (45)..(245): Homolog of NCBI NO: 17737875 NR Description: Synapse protein 24 CG9474-PA [Drosophila
  misc_feature (42)..(245): Homolog of NCBI NO: 28279149 NR Description: Similar to synaptosomal-associated protein, 23kD
  misc_feature (38)..(245): Homolog of NCBI NO: 27263173 NR Description: synaptosome-associated protein of 25 kDa
  misc_feature (36)..(246): Homolog of NCBI NO: 6755588 NR Description: synaptosomal-associated protein
  misc_feature (36)..(246): Homolog of NCBI NO: 18765733 NR Description: synaptosomal-associated protein 25 isoform SNAP25A
  misc_feature (29)..(247): Homolog of NCBI NO: 15241436 NR Description: SNAP25 - like protein; protein id: At5g07880.1
  misc_feature (1)..(247): Homolog of NCBI NO: 32308074 NR Description: SNAP-34 [Hordeum vulgare subsp. vulgare]
  misc_feature (1)..(247): Homolog of NCBI NO: 15222976 NR Description: synaptosomal associated protein (SNAP25A),
  misc_feature (1)..(247): Homolog of NCBI NO: 21553460 NR Description: snap25a [Arabidopsis thaliana]
  misc_feature (1)..(247): Homolog of NCBI NO: 15240163 NR Description: syntaxin SNAP33

SEQ ID NO: 35772 - protein, 165 aa, Arabidopsis thaliana; identical to SEQ ID NO: 29604
  peptide (1)..(165): Ceres Seq. ID no. 12370497
  misc_feature (105)..(165): Pfam Name: SNARE domain Pfam Description: SNARE domain
  misc_feature (1)..(163): Homolog of NCBI NO: 17737875 NR Description: Synapse protein 24 CG9474-PA [Drosophila
  misc_feature (1)..(163): Homolog of NCBI NO: 28279149 NR Description: Similar to synaptosomal-associated protein, 23kD
  misc_feature (1)..(163): Homolog of NCBI NO: 27263173 NR Description: synaptosome-associated protein of 25 kDa
  misc_feature (1)..(164): Homolog of NCBI NO: 6755588 NR Description: synaptosomal-associated protein
  misc_feature (1)..(164): Homolog of NCBI NO: 18765733 NR Description: synaptosomal-associated protein 25 isoform SNAP25A
  misc_feature (1)..(165): Homolog of NCBI NO: 15241436 NR Description: SNAP25 - like protein; protein id: At5g07880.1
  misc_feature (1)..(165): Homolog of NCBI NO: 32308074 NR Description: SNAP-34 [Hordeum vulgare subsp. vulgare]
  misc_feature (1)..(165): Homolog of NCBI NO: 15222976 NR Description: synaptosomal associated protein (SNAP25A),
  misc_feature (1)..(165): Homolog of NCBI NO: 21553460 NR Description: snap25a [Arabidopsis thaliana]
  misc_feature (1)..(165): Homolog of NCBI NO: 15240163 NR Description: syntaxin SNAP33

SEQ ID NO: 35773 - DNA, 1317 bp, Arabidopsis thaliana
  misc_feature (1)..(1317): Ceres Seq. ID no. 12339040
  misc_feature: MA Experiment ID: 108462 Result: Up-regulated in Transcription
  misc_feature: MA Experiment 108462 PARAMETER Experiment Name: At_Germinating_Seeds_cDNA_P Parameter: Age (day) Value: 2 vs. 0
  misc_feature: MA Experiment 108462 PARAMETER Experiment Name: At_Germinating_Seeds_cDNA_P Parameter: Tissue Value: Germinating Seeds
  misc_feature: MA Experiment ID: 108463 Result: Up-regulated in Transcription
  misc_feature: MA Experiment 108463 PARAMETER Experiment Name: At_Germinating_Seeds_cDNA_P Parameter: Age (day) Value: 3 vs. 0
  misc_feature: MA Experiment 108463 PARAMETER Experiment Name: At_Germinating_Seeds_cDNA_P Parameter: Tissue Value: Germinating Seeds
  misc_feature: MA Experiment ID: 108464 Result: Up-regulated in Transcription
  misc_feature: MA Experiment 108464 PARAMETER Experiment Name: At_Germinating_Seeds_cDNA_P Parameter: Age (day) Value: 4 vs. 0
  misc_feature: MA Experiment 108464 PARAMETER Experiment Name: At_Germinating_Seeds_cDNA_P Parameter: Tissue Value: Germinating Seeds
  misc_feature: MA Experiment ID: 108501 Result: Up-regulated in Transcription
  misc_feature: MA Experiment 108501 PARAMETER Experiment Name: At_ap2_floral_buds_cDNA_P Parameter: Plant Line Value: ap2 (Ler.)
  misc_feature: MA Experiment 108501 PARAMETER Experiment Name: At_ap2_floral_buds_cDNA_P Parameter: Tissue Value: Closed Flower
  misc_feature: MA Experiment ID: 108605 Result: Up-regulated in Transcription
  misc_feature: MA Experiment 108605 PARAMETER Experiment Name: At_100uM_ABA_cDNA_P Parameter: Timepoint (hr) Value: 6
  misc_feature: MA Experiment 108605 PARAMETER Experiment Name: At_100uM_ABA_cDNA_P Parameter: Tissue Value: Aerial
  misc_feature: MA Experiment 108605 PARAMETER Experiment Name: At_100uM_ABA_cDNA_P Parameter: Treatment Value: 100uM ABA vs. No Treatment
  misc_feature: MA Experiment ID: 108607 Result: Up-regulated in Transcription
  misc_feature: MA Experiment 108607 PARAMETER Experiment Name: At_100uM_ABA_cDNA_P Parameter: Timepoint (hr) Value: 4
  misc_feature: MA Experiment 108607 PARAMETER Experiment Name: At_100uM_ABA_cDNA_P Parameter: Tissue Value: Aerial
  misc_feature: MA Experiment 108607 PARAMETER Experiment Name: At_100uM_ABA_cDNA_P Parameter: Treatment Value: 100uM ABA vs. No Treatment
  misc_feature: MA Experiment ID: 108609 Result: Up-regulated in Transcription
  misc_feature: MA Experiment 108609 PARAMETER Experiment Name: At_100uM_ABA_cDNA_P Parameter: Timepoint (hr) Value: 24
  misc_feature: MA Experiment 108609 PARAMETER Experiment Name: At_100uM_ABA_cDNA_P Parameter: Tissue Value: Aerial
  misc_feature: MA Experiment 108609 PARAMETER Experiment Name: At_100uM_ABA_cDNA_P Parameter: Treatment Value: 100uM ABA vs. No Treatment
  misc_feature: MA Experiment ID: 20000069 Result: Up-regulated in Transcription
  misc_feature: MA Experiment 20000069 PARAMETER Experiment Name: At_100uM_ABA_Mutants_cDNA_P Parameter: Plant Line Value: CS23
  misc_feature: MA Experiment 20000069 PARAMETER Experiment Name: At_100uM_ABA_Mutants_cDNA_P Parameter: Timepoint (hr) Value: 6
  misc_feature: MA Experiment 20000069 PARAMETER Experiment Name: At_100uM_ABA_Mutants_cDNA_P Parameter: Tissue Value: Aerial
  misc_feature: MA Experiment 20000069 PARAMETER Experiment Name: At_100uM_ABA_Mutants_cDNA_P Parameter: Treatment Value: 100uM ABA vs. No Treatment
  misc_feature: MA Experiment ID: 20000070 Result: Up-regulated in Transcription
  misc_feature: MA Experiment 20000070 PARAMETER Experiment Name: At_100uM_ABA_Mutants_cDNA_P Parameter: Plant Line Value: CS24
  misc_feature: MA Experiment 20000070 PARAMETER Experiment Name: At_100uM_ABA_Mutants_cDNA_P Parameter: Timepoint (hr) Value: 6
  misc_feature: MA Experiment 20000070 PARAMETER Experiment Name: At_100uM_ABA_Mutants_cDNA_P Parameter: Tissue Value: Aerial
  misc_feature: MA Experiment 20000070 PARAMETER Experiment Name: At_100uM_ABA_Mutants_cDNA_P Parameter: Treatment Value: 100uM ABA vs. No Treatment
  misc_feature: MA Experiment ID: 20000071 Result: Up-regulated in Transcription
  misc_feature: MA Experiment 20000071 PARAMETER Experiment Name: At_100uM_ABA_Mutants_cDNA_P Parameter: Plant Line Value: CS8104
  misc_feature: MA Experiment 20000071 PARAMETER Experiment Name: At_100uM_ABA_Mutants_cDNA_P Parameter: Timepoint (hr) Value: 6
  misc_feature: MA Experiment 20000071 PARAMETER Experiment Name: At_100uM_ABA_Mutants_cDNA_P Parameter: Tissue Value: Aerial
  misc_feature: MA Experiment 20000071 PARAMETER Experiment Name: At_100uM_ABA_Mutants_cDNA_P Parameter: Treatment Value: 100uM ABA vs. No Treatment
  misc_feature: MA Experiment ID: 20000072 Result: Up-regulated in Transcription
  misc_feature: MA Experiment 20000072 PARAMETER Experiment Name: At_100uM_ABA_Mutants_cDNA_P Parameter: Plant Line Value: CS8105
  misc_feature: MA Experiment 20000072 PARAMETER Experiment Name: At_100uM_ABA_Mutants_cDNA_P Parameter: Timepoint (hr) Value: 6
  misc_feature: MA Experiment 20000072 PARAMETER Experiment Name: At_100uM_ABA_Mutants_cDNA_P Parameter: Tissue Value: Aerial
  misc_feature: MA Experiment 20000072 PARAMETER Experiment Name: At_100uM_ABA_Mutants_cDNA_P Parameter: Treatment Value: 100uM ABA vs. No Treatment
  misc_feature: MA Experiment ID: 20000087 Result: Up-regulated in Transcription
  misc_feature: MA Experiment 20000087 PARAMETER Experiment Name: At_100uM_ABA_Mutants_cDNA_P Parameter: Plant Line Value: WS
  misc_feature: MA Experiment 20000087 PARAMETER Experiment Name: At_100uM_ABA_Mutants_cDNA_P Parameter: Timepoint (hr) Value: 6
  misc_feature: MA Experiment 20000087 PARAMETER Experiment Name: At_100uM_ABA_Mutants_cDNA_P Parameter: Tissue Value: Aerial
  misc_feature: MA Experiment 20000087 PARAMETER Experiment Name: At_100uM_ABA_Mutants_cDNA_P Parameter: Treatment Value: 100uM ABA vs. No Treatment
  misc_feature: MA Experiment ID: 20000088 Result: Up-regulated in Transcription
  misc_feature: MA Experiment 20000088 PARAMETER Experiment Name: At_100uM_ABA_Mutants_cDNA_P Parameter: Plant Line Value: Landsberg
  misc_feature: MA Experiment 20000088 PARAMETER Experiment Name: At_100uM_ABA_Mutants_cDNA_P Parameter: Timepoint (hr) Value: 6
  misc_feature: MA Experiment 20000088 PARAMETER Experiment Name: At_100uM_ABA_Mutants_cDNA_P Parameter: Tissue Value: Aerial
  misc_feature: MA Experiment 20000088 PARAMETER Experiment Name: At_100uM_ABA_Mutants_cDNA_P Parameter: Treatment Value: 100uM ABA vs. No Treatment
  misc_feature: MA Experiment ID: 20000111 Result: Down-regulated in Transcription
  misc_feature: MA Experiment 20000111 PARAMETER Experiment Name: At_42deg_Heat_cDNA_P Parameter: Temperature (deg C) Value: 42 vs. 22
  misc_feature: MA Experiment 20000111 PARAMETER Experiment Name: At_42deg_Heat_cDNA_P Parameter: Timepoint (hr) Value: 6
  misc_feature: MA Experiment 20000111 PARAMETER Experiment Name: At_42deg_Heat_cDNA_P Parameter: Tissue Value: Aerial
  misc_feature: MA Experiment ID: 20000112 Result: Down-regulated in Transcription
  misc_feature: MA Experiment 20000112 PARAMETER Experiment Name: At_42deg_Heat_cDNA_P Parameter: Temperature (deg C) Value: 42 vs. 22
  misc_feature: MA Experiment 20000112 PARAMETER Experiment Name: At_42deg_Heat_cDNA_P Parameter: Timepoint (hr) Value: 2
  misc_feature: MA Experiment 20000112 PARAMETER Experiment Name: At_42deg_Heat_cDNA_P Parameter: Tissue Value: Aerial
  misc_feature: MA Experiment ID: 20000113 Result: Down-regulated in Transcription
  misc_feature: MA Experiment 20000113 PARAMETER Experiment Name: At_42deg_Heat_cDNA_P Parameter: Temperature (deg C) Value: 42 vs. 22
  misc_feature: MA Experiment 20000113 PARAMETER Experiment Name: At_42deg_Heat_cDNA_P Parameter: Timepoint (hr) Value: 8
  misc_feature: MA Experiment 20000113 PARAMETER Experiment Name: At_42deg_Heat_cDNA_P Parameter: Tissue Value: Aerial
  misc_feature: MA Experiment ID: 20000117 Result: Up-regulated in Transcription
  misc_feature: MA Experiment 20000117 PARAMETER Experiment Name: At_100uM_ABA_Mutants_cDNA_P Parameter: Plant Line Value: Columbia
  misc_feature: MA Experiment 20000117 PARAMETER Experiment Name: At_100uM_ABA_Mutants_cDNA_P Parameter: Timepoint (hr) Value: 6
  misc_feature: MA Experiment 20000117 PARAMETER Experiment Name: At_100uM_ABA_Mutants_cDNA_P Parameter: Tissue Value: Aerial
  misc_feature: MA Experiment 20000117 PARAMETER Experiment Name: At_100uM_ABA_Mutants_cDNA_P Parameter: Treatment Value: 100uM ABA vs. No Treatment
  misc_feature: MA Experiment ID: 20000144 Result: Down-regulated in Transcription
  misc_feature: MA Experiment 20000144 PARAMETER Experiment Name: At_42deg_Heat_cDNA_P Parameter: Temperature (deg C) Value: 42 vs. 22
  misc_feature: MA Experiment 20000144 PARAMETER Experiment Name: At_42deg_Heat_cDNA_P Parameter: Timepoint (hr) Value: 1
  misc_feature: MA Experiment 20000144 PARAMETER Experiment Name: At_42deg_Heat_cDNA_P Parameter: Tissue Value: Aerial
  misc_feature: MA Experiment ID: 20000166 Result: Up-regulated in Transcription
  misc_feature: MA Experiment 20000166 PARAMETER Experiment Name: At_100uM_ABA_P Parameter: Age (day) Value: 14
  misc_feature: MA Experiment 20000166 PARAMETER Experiment Name: At_100uM_ABA_P Parameter: Organism Value: A. thaliana
  misc_feature: MA Experiment 20000166 PARAMETER Experiment Name: At_100uM_ABA_P Parameter: Plant Line Value: WS
  misc_feature: MA Experiment 20000166 PARAMETER Experiment Name: At_100uM_ABA_P Parameter: Timepoint (hr) Value: 1
  misc_feature: MA Experiment 20000166 PARAMETER Experiment Name: At_100uM_ABA_P Parameter: Tissue Value: Aerial
  misc_feature: MA Experiment 20000166 PARAMETER Experiment Name: At_100uM_ABA_P Parameter: Treatment Value: 100uM ABA vs. No Treatment
  misc_feature: MA Experiment ID: 20000169 Result: Up-regulated in Transcription
  misc_feature: MA Experiment 20000169 PARAMETER Experiment Name: At_100uM_ABA_P Parameter: Age (day) Value: 14
  misc_feature: MA Experiment 20000169 PARAMETER Experiment Name: At_100uM_ABA_P Parameter: Organism Value: A. thaliana
  misc_feature: MA Experiment 20000169 PARAMETER Experiment Name: At_100uM_ABA_P Parameter: Plant Line Value: WS
  misc_feature: MA Experiment 20000169 PARAMETER Experiment Name: At_100uM_ABA_P Parameter: Timepoint (hr) Value: 6
  misc_feature: MA Experiment 20000169 PARAMETER Experiment Name: At_100uM_ABA_P Parameter: Tissue Value: Aerial
  misc_feature: MA Experiment 20000169 PARAMETER Experiment Name: At_100uM_ABA_P Parameter: Treatment Value: 100uM ABA vs. No Treatment
  misc_feature: MA Experiment ID: 20000171 Result: Down-regulated in Transcription
  misc_feature: MA Experiment 20000171 PARAMETER Experiment Name: At_42deg_Heat_P Parameter: Age (day) Value: 14
  misc_feature: MA Experiment 20000171 PARAMETER Experiment Name: At_42deg_Heat_P Parameter: Organism Value: A. thaliana
  misc_feature: MA Experiment 20000171 PARAMETER Experiment Name: At_42deg_Heat_P Parameter: Plant Line Value: WS
  misc_feature: MA Experiment 20000171 PARAMETER Experiment Name: At_42deg_Heat_P Parameter: Temperature (deg C) Value: 42 vs. 22
  misc_feature: MA Experiment 20000171 PARAMETER Experiment Name: At_42deg_Heat_P Parameter: Timepoint (hr) Value: 1
  misc_feature: MA Experiment 20000171 PARAMETER Experiment Name: At_42deg_Heat_P Parameter: Tissue Value: Aerial
  misc_feature: MA Experiment ID: 20000173 Result: Down-regulated in Transcription
  misc_feature: MA Experiment 20000173 PARAMETER Experiment Name: At_42deg_Heat_P Parameter: Age (day) Value: 14
  misc_feature: MA Experiment 20000173 PARAMETER Experiment Name: At_42deg_Heat_P Parameter: Organism Value: A. thaliana
  misc_feature: MA Experiment 20000173 PARAMETER Experiment Name: At_42deg_Heat_P Parameter: Plant Line Value: WS
  misc_feature: MA Experiment 20000173 PARAMETER Experiment Name: At_42deg_Heat_P Parameter: Temperature (deg C) Value: 42 vs. 22
  misc_feature: MA Experiment 20000173 PARAMETER Experiment Name: At_42deg_Heat_P Parameter: Timepoint (hr) Value: 6
  misc_feature: MA Experiment 20000173 PARAMETER Experiment Name: At_42deg_Heat_P Parameter: Tissue Value: Aerial
  misc_feature: MA Experiment ID: 20000184 Result: Down-regulated in Transcription
  misc_feature: MA Experiment 20000184 PARAMETER Experiment Name: At_Shoots__P Parameter: Age (day) Value: 7
  misc_feature: MA Experiment 20000184 PARAMETER Experiment Name: At_Shoots__P Parameter: Tissue Value: Shoots vs. Whole Plant
  misc_feature: MA Experiment ID: 20000185 Result: Down-regulated in Transcription
  misc_feature: MA Experiment 20000185 PARAMETER Experiment Name: At_Roots__P Parameter: Age (day) Value: 7 vs. 21
  misc_feature: MA Experiment 20000185 PARAMETER Experiment Name: At_Roots__P Parameter: Organism Value: A. thaliana
  misc_feature: MA Experiment 20000185 PARAMETER Experiment Name: At_Roots__P Parameter: Tissue Value: Roots vs. Whole Plant
  misc_feature: MA Experiment ID: 20000234 Result: Up-regulated in Transcription
  misc_feature: MA Experiment 20000234 PARAMETER Experiment Name: At_Siliques_P Parameter: Age (day) Value: 21
  misc_feature: MA Experiment 20000234 PARAMETER Experiment Name: At_Siliques_P Parameter: Organism Value: A. thaliana
  misc_feature: MA Experiment 20000234 PARAMETER Experiment Name: At_Siliques_P Parameter: Plant Line Value: WS
  misc_feature: MA Experiment 20000234 PARAMETER Experiment Name: At_Siliques_P Parameter: Tissue Value: Less Than 5mm Siliques vs. Whole Plant
  misc_feature: MA Experiment ID: 20000235 Result: Up-regulated in Transcription
  misc_feature: MA Experiment 20000235 PARAMETER Experiment Name: At_Siliques_P Parameter: Age (day) Value: 21
  misc_feature: MA Experiment 20000235 PARAMETER Experiment Name: At_Siliques_P Parameter: Organism Value: A. thaliana
  misc_feature: MA Experiment 20000235 PARAMETER Experiment Name: At_Siliques_P Parameter: Plant Line Value: WS
  misc_feature: MA Experiment 20000235 PARAMETER Experiment Name: At_Siliques_P Parameter: Tissue Value: 5-10mm Siliques vs. Whole Plant
  misc_feature: MA Experiment ID: 20000267 Result: Up-regulated in Transcription
  misc_feature: MA Experiment 20000267 PARAMETER Experiment Name: At_Drought_P Parameter: Age (day) Value: 7
  misc_feature: MA Experiment 20000267 PARAMETER Experiment Name: At_Drought_P Parameter: Organism Value: A. thaliana
  misc_feature: MA Experiment 20000267 PARAMETER Experiment Name: At_Drought_P Parameter: Plant Line Value: WS
  misc_feature: MA Experiment 20000267 PARAMETER Experiment Name: At_Drought_P Parameter: Timepoint (hr) Value: 6
  misc_feature: MA Experiment 20000267 PARAMETER Experiment Name: At_Drought_P Parameter: Tissue Value: Whole Plant
  misc_feature: MA Experiment 20000267 PARAMETER Experiment Name: At_Drought_P Parameter: Treatment Value: Drought vs. No Drought
  misc_feature: MA Experiment ID: 20000437 Result: Up-regulated in Transcription
  misc_feature: MA Experiment 20000437 PARAMETER Experiment Name: At_Drought_P Parameter: Age (day) Value: 8
  misc_feature: MA Experiment 20000437 PARAMETER Experiment Name: At_Drought_P Parameter: Organism Value: A. thaliana
  misc_feature: MA Experiment 20000437 PARAMETER Experiment Name: At_Drought_P Parameter: Plant Line Value: WS
  misc_feature: MA Experiment 20000437 PARAMETER Experiment Name: At_Drought_P Parameter: Timepoint (hr) Value: 24
  misc_feature: MA Experiment 20000437 PARAMETER Experiment Name: At_Drought_P Parameter: Tissue Value: Whole Plant
  misc_feature: MA Experiment 20000437 PARAMETER Experiment Name: At_Drought_P Parameter: Treatment Value: Drought vs. No Drought
  misc_feature: MA Experiment ID: 20000438 Result: Down-regulated in Transcription
  misc_feature: MA Experiment 20000438 PARAMETER Experiment Name: At_Shoots__P Parameter: Age (day) Value: 14
  misc_feature: MA Experiment 20000438 PARAMETER Experiment Name: At_Shoots__P Parameter: Tissue Value: Shoots vs. Whole Plant
  misc_feature: MA Experiment ID: 20000441 Result: Down-regulated in Transcription
  misc_feature: MA Experiment 20000441 PARAMETER Experiment Name: At_1uM_BR-BRZ__P Parameter: Tissue Value: Shoot Apices
  misc_feature: MA Experiment 20000441 PARAMETER Experiment Name: At_1uM_BR-BRZ__P Parameter: Treatment Value: 1uM BR vs. No Treatment
  misc_feature: MA Experiment ID: 20000453 Result: Up-regulated in Transcription
  misc_feature: MA Experiment 20000453 PARAMETER Experiment Name: At_100uM_ABA_P Parameter: Age (day) Value: 15
  misc_feature: MA Experiment 20000453 PARAMETER Experiment Name: At_100uM_ABA_P Parameter: Organism Value: A. thaliana
  misc_feature: MA Experiment 20000453 PARAMETER Experiment Name: At_100uM_ABA_P Parameter: Plant Line Value: WS
  misc_feature: MA Experiment 20000453 PARAMETER Experiment Name: At_100uM_ABA_P Parameter: Timepoint (hr) Value: 24
  misc_feature: MA Experiment 20000453 PARAMETER Experiment Name: At_100uM_ABA_P Parameter: Tissue Value: Aerial
  misc_feature: MA Experiment 20000453 PARAMETER Experiment Name: At_100uM_ABA_P Parameter: Treatment Value: 100uM ABA vs. No Treatment
  misc_feature: MA Experiment ID: 20000455 Result: Up-regulated in Transcription
  misc_feature: MA Experiment 20000455 PARAMETER Experiment Name: At_100uM_ABA_P Parameter: Age (day) Value: 16
  misc_feature: MA Experiment 20000455 PARAMETER Experiment Name: At_100uM_ABA_P Parameter: Organism Value: A. thaliana
  misc_feature: MA Experiment 20000455 PARAMETER Experiment Name: At_100uM_ABA_P Parameter: Plant Line Value: WS
  misc_feature: MA Experiment 20000455 PARAMETER Experiment Name: At_100uM_ABA_P Parameter: Timepoint (hr) Value: 48
  misc_feature: MA Experiment 20000455 PARAMETER Experiment Name: At_100uM_ABA_P Parameter: Tissue Value: Aerial
  misc_feature: MA Experiment 20000455 PARAMETER Experiment Name: At_100uM_ABA_P Parameter: Treatment Value: 100uM ABA vs. No Treatment
  misc_feature: MA Experiment ID: 20000794 Result: Down-regulated in Transcription
  misc_feature: MA Experiment 20000794 PARAMETER Experiment Name: At_Petals_P Parameter: Age (day) Value: 23-25 days
  misc_feature: MA Experiment 20000794 PARAMETER Experiment Name: At_Petals_P Parameter: Plant Line Value: WS
  misc_feature: MA Experiment 20000794 PARAMETER Experiment Name: At_Petals_P Parameter: Tissue Value: Petals vs. Whole plant
  misc_feature: MA Experiment ID: 20001248 Result: Down-regulated in Transcription
  misc_feature: MA Experiment 20001248 PARAMETER Experiment Name: At_Far-red-induction_P Parameter: Age (day) Value: 7
  misc_feature: MA Experiment 20001248 PARAMETER Experiment Name: At_Far-red-induction_P Parameter: Light Value: Far-red vs. White
  misc_feature: MA Experiment 20001248 PARAMETER Experiment Name: At_Far-red-induction_P Parameter: Organism Value: A. thaliana
  misc_feature: MA Experiment 20001248 PARAMETER Experiment Name: At_Far-red-induction_P Parameter: Plant Line Value: Columbia
  misc_feature: MA Experiment 20001248 PARAMETER Experiment Name: At_Far-red-induction_P Parameter: Timepoint (hr) Value: 4
  misc_feature: MA Experiment 20001248 PARAMETER Experiment Name: At_Far-red-induction_P Parameter: Tissue Value: Whole Plant
  misc_feature: MA Experiment ID: 20001451 Result: Down-regulated in Transcription
  misc_feature: MA Experiment 20001451 PARAMETER Experiment Name: At_Far-red-induction_P Parameter: Age (day) Value: 7
  misc_feature: MA Experiment 20001451 PARAMETER Experiment Name: At_Far-red-induction_P Parameter: Light Value: Far-red vs. White
  misc_feature: MA Experiment 20001451 PARAMETER Experiment Name: At_Far-red-induction_P Parameter: Organism Value: A. thaliana
  misc_feature: MA Experiment 20001451 PARAMETER Experiment Name: At_Far-red-induction_P Parameter: Plant Line Value: Columbia
  misc_feature: MA Experiment 20001451 PARAMETER Experiment Name: At_Far-red-induction_P Parameter: Timepoint (hr) Value: 24
  misc_feature: MA Experiment 20001451 PARAMETER Experiment Name: At_Far-red-induction_P Parameter: Tissue Value: Whole Plant
  misc_feature: MA Experiment ID: 20001560 Result: Up-regulated in Transcription
  misc_feature: MA Experiment 20001560 PARAMETER Experiment Name: At_Drought_Soil_Dry_P Parameter: Age (day) Value: 28
  misc_feature: MA Experiment 20001560 PARAMETER Experiment Name: At_Drought_Soil_Dry_P Parameter: Organism Value: A. thaliana
  misc_feature: MA Experiment 20001560 PARAMETER Experiment Name: At_Drought_Soil_Dry_P Parameter: Plant Line Value: WS
  misc_feature: MA Experiment 20001560 PARAMETER Experiment Name: At_Drought_Soil_Dry_P Parameter: Post Timepoint (hr) Value: None
  misc_feature: MA Experiment 20001560 PARAMETER Experiment Name: At_Drought_Soil_Dry_P Parameter: Post-Treatment Value: None
  misc_feature: MA Experiment 20001560 PARAMETER Experiment Name: At_Drought_Soil_Dry_P Parameter: Timepoint (day) Value: 14
  misc_feature: MA Experiment 20001560 PARAMETER Experiment Name: At_Drought_Soil_Dry_P Parameter: Treatment Value: Drought vs. No Drought
  misc_feature: MA Experiment ID: 20001773 Result: Up-regulated in Transcription
  misc_feature: MA Experiment 20001773 PARAMETER Experiment Name: At_Far-red-enriched-adult_P Parameter: Age (day) Value: 30
  misc_feature: MA Experiment 20001773 PARAMETER Experiment Name: At_Far-red-enriched-adult_P Parameter: Light Value: Far-red enriched vs. White
  misc_feature: MA Experiment 20001773 PARAMETER Experiment Name: At_Far-red-enriched-adult_P Parameter: Organism Value: A. thaliana
  misc_feature: MA Experiment 20001773 PARAMETER Experiment Name: At_Far-red-enriched-adult_P Parameter: Plant Line Value: Columbia
  misc_feature: MA Experiment 20001773 PARAMETER Experiment Name: At_Far-red-enriched-adult_P Parameter: Timepoint (hr) Value: 48
  misc_feature: MA Experiment 20001773 PARAMETER Experiment Name: At_Far-red-enriched-adult_P Parameter: Tissue Value: Aerial
  misc_feature: MA Experiment ID: 20001906 Result: Down-regulated in Transcription
  misc_feature: MA Experiment 20001906 PARAMETER Experiment Name: At_Drought_Reproduction_P Parameter: Age (day) Value: 35
  misc_feature: MA Experiment 20001906 PARAMETER Experiment Name: At_Drought_Reproduction_P Parameter: Organism Value: A. thaliana
  misc_feature: MA Experiment 20001906 PARAMETER Experiment Name: At_Drought_Reproduction_P Parameter: Plant Line Value: WS
  misc_feature: MA Experiment 20001906 PARAMETER Experiment Name: At_Drought_Reproduction_P Parameter: Timepoint (day) Value: 5
  misc_feature: MA Experiment 20001906 PARAMETER Experiment Name: At_Drought_Reproduction_P Parameter: Tissue Value: Siliques
  misc_feature: MA Experiment 20001906 PARAMETER Experiment Name: At_Drought_Reproduction_P Parameter: Treatment Value: Drought vs. No Drought
  misc_feature: MA Experiment ID: 20001908 Result: Down-regulated in Transcription
  misc_feature: MA Experiment 20001908 PARAMETER Experiment Name: At_Drought_Reproduction_P Parameter: Age (day) Value: 40
  misc_feature: MA Experiment 20001908 PARAMETER Experiment Name: At_Drought_Reproduction_P Parameter: Organism Value: A. thaliana
  misc_feature: MA Experiment 20001908 PARAMETER Experiment Name: At_Drought_Reproduction_P Parameter: Plant Line Value: WS
  misc_feature: MA Experiment 20001908 PARAMETER Experiment Name: At_Drought_Reproduction_P Parameter: Timepoint (day) Value: 10
  misc_feature: MA Experiment 20001908 PARAMETER Experiment Name: At_Drought_Reproduction_P Parameter: Tissue Value: Siliques
  misc_feature: MA Experiment 20001908 PARAMETER Experiment Name: At_Drought_Reproduction_P Parameter: Treatment Value: Drought vs. No Drought
  misc_feature: MA Experiment ID: 20001911 Result: Down-regulated in Transcription
  misc_feature: MA Experiment 20001911 PARAMETER Experiment Name: At_Drought_Reproduction_P Parameter: Age (day) Value: 40
  misc_feature: MA Experiment 20001911 PARAMETER Experiment Name: At_Drought_Reproduction_P Parameter: Organism Value: A. thaliana
  misc_feature: MA Experiment 20001911 PARAMETER Experiment Name: At_Drought_Reproduction_P Parameter: Plant Line Value: WS
  misc_feature: MA Experiment 20001911 PARAMETER Experiment Name: At_Drought_Reproduction_P Parameter: Timepoint (day) Value: 10
  misc_feature: MA Experiment 20001911 PARAMETER Experiment Name: At_Drought_Reproduction_P Parameter: Tissue Value: Flowers
  misc_feature: MA Experiment 20001911 PARAMETER Experiment Name: At_Drought_Reproduction_P Parameter: Treatment Value: Drought vs. No Drought
aagttgatttagcctctgtttgtccttgttatgttgttgtaaaacttgaaactttggaagcaaactcatttttataacaaaaggaaatcttattttatacattacattaaagcaacatgaaagacaattcaagctggtcttgttcttgttcttggtcttcgtggaaaatatgtttgttgtctgttctctttctcaccgagacgatcaccgccgtgaagctgccgccaaaattgattattccggctgtaatcgctttcggagactccatcgtcgacacaggaatgaacaacaatgtcaaaaccgtggttaagtgtgattttcttccttatggtatcaatttccaaagcggagttgccacggggagattctgcgatggacgagtccctgccgatttgctagccgaagaactgggaataaaatcaattgtaccagcatacctagatccgaatctaaaatcgaaagatcttttaaccggtgtatcgtttgcgtccggaggttctggttatgatcctataacaccgaaacttgtggcagtaatatcattagaagatcaattgagttatttcgaggagtacatagagaaagtgaagaatatagttggggaagcaagaaaagacttcatagtagccaacagcttattcttattggtcgcaggcagcgacgacatagccaatacatactatactctacgtgcaagacctgaatacgacgtcgattcatacactactcttatgtctgactctgcctcagaatttgtgactaaactatatggatatggagtgagaagagtagctgtgtttggtgcaccaccaattgggtgtgtaccatcacagagaacgttaggaggaggtatcttgagagattgtgctgataattacaacgaagcagcaaaactttttaattcaaagctctccccaaaattggattcgttgcgtaaaaccctaccgggcatcaaaccgatctacattaatatctatgatcctctttttgacatcatccagaatcctgcaaattatgggtttgaagtgtctaataaaggatgctgtggaacaggagccatagaagttgctgtgttgtgcaataaaatcacatcttctgtatgtcccgacgtgtctactcatgtgttttgggacagttatcatcctacagagaaaacttacaaagtattagtctcactgttgattaacaaatttgttaatcagttcgtctgaattaaaaactattttcacggcataatgattgattatattttatctcatcttgtttgtattatttgataattgtattcgatttaaataaaattaatattttcttgtt

SEQ ID NO: 35774 - protein, 364 aa, Arabidopsis thaliana
  peptide (1)..(364): Ceres Seq. ID no. 12339041
  misc_feature (44)..(351): Pfam Name: GDSL-like Lipase/Acylhydrolase Pfam Description: GDSL-like Lipase/Acylhydrolase
  misc_feature (42)..(363): Homolog of NCBI NO: 21592372 NR Description: anter-specific proline-rich protein APG
  misc_feature (42)..(363): Homolog of NCBI NO: 18394825 NR Description: anter-specific proline-rich protein APG
  misc_feature (27)..(360): Homolog of NCBI NO: 8778807 NR Description: T4O12.12 [Arabidopsis thaliana]
  misc_feature (16)..(352): Homolog of NCBI NO: 8778807 NR Description: T4O12.12 [Arabidopsis thaliana]
  misc_feature (16)..(360): Homolog of NCBI NO: 18410956 NR Description: family II extracellular lipase 2 (EXL2)
  misc_feature (16)..(363): Homolog of NCBI NO: 18410954 NR Description: family II extracellular lipase 1 (EXL1)
  misc_feature (16)..(363): Homolog of NCBI NO: 28393626 NR Description: putative family II extracellular lipase 1 (EXL1)
  misc_feature (1)..(361): Homolog of NCBI NO: 25404994 NR Description: protein T4O12.13 [imported] - Arabidopsis
  misc_feature (1)..(364): Homolog of NCBI NO: 26449364 NR Description: putative family II lipase EXL3 [Arabidopsis
  misc_feature (1)..(364): Homolog of NCBI NO: 15222901 NR Description: family II extracellular lipase 3 (EXL3)
MKDNSSWSCSCSWSSWKICLLSVLFLTETITAVKLPPKLIIPAVIAFGDSIVDTGMNNNVKTVVKCDFLPYGINFQSGVATGRFCDGRVPADLLAEELGIKSIVPAYLDPNLKSKDLLTGVSFASGGSGYDPITPKLVAVISLEDQLSYFEEYIEKVKNIVGEARKDFIVANSLFLLVAGSDDIANTYYTLRARPEYDVDSYTTLMSDSASEFVTKLYGYGVRRVAVFGAPPIGCVPSQRTLGGGILRDCADNYNEAAKLFNSKLSPKLDSLRKTLPGIKPIYINIYDPLFDIIQNPANYGFEVSNKGCCGTGAIEVAVLCNKITSSVCPDVSTHVFWDSYHPTEKTYKVLVSLLINKFVNQFV

SEQ ID NO: 35775 - protein, 309 aa, Arabidopsis thaliana; identical to SEQ ID NO: 21461
  peptide (1)..(309): Ceres Seq. ID no. 12339042
  misc_feature (1)..(296): Pfam Name: GDSL-like Lipase/Acylhydrolase Pfam Description: GDSL-like Lipase/Acylhydrolase
  misc_feature (1)..(308): Homolog of NCBI NO: 21592372 NR Description: anter-specific proline-rich protein APG
  misc_feature (1)..(308): Homolog of NCBI NO: 18394825 NR Description: anter-specific proline-rich protein APG
  misc_feature (1)..(305): Homolog of NCBI NO: 8778807 NR Description: T4O12.12 [Arabidopsis thaliana]
  misc_feature (1)..(297): Homolog of NCBI NO: 8778807 NR Description: T4O12.12 [Arabidopsis thaliana]
  misc_feature (1)..(305): Homolog of NCBI NO: 18410956 NR Description: family II extracellular lipase 2 (EXL2)
  misc_feature (1)..(308): Homolog of NCBI NO: 18410954 NR Description: family II extracellular lipase 1 (EXL1)
  misc_feature (1)..(308): Homolog of NCBI NO: 28393626 NR Description: putative family II extracellular lipase 1 (EXL1)
  misc_feature (1)..(306): Homolog of NCBI NO: 25404994 NR Description: protein T4O12.13 [imported] - Arabidopsis
  misc_feature (1)..(309): Homolog of NCBI NO: 26449364 NR Description: putative family II lipase EXL3 [Arabidopsis
  misc_feature (1)..(309): Homolog of NCBI NO: 15222901 NR Description: family II extracellular lipase 3 (EXL3)

SEQ ID NO: 35776 - DNA, 1251 bp, Arabidopsis thaliana; identical to SEQ ID NO: 21293
  misc_feature (1)..(1251): Ceres Seq. ID no. 12391659
  misc_feature: MA Experiment ID: 20000234 Result: Down-regulated in Transcription
  misc_feature: MA Experiment 20000234 PARAMETER Experiment Name: At_Siliques_P Parameter: Age (day) Value: 21
  misc_feature: MA Experiment 20000234 PARAMETER Experiment Name: At_Siliques_P Parameter: Organism Value: A. thaliana
  misc_feature: MA Experiment 20000234 PARAMETER Experiment Name: At_Siliques_P Parameter: Plant Line Value: WS
  misc_feature: MA Experiment 20000234 PARAMETER Experiment Name: At_Siliques_P Parameter: Tissue Value: Less Than 5mm Siliques vs. Whole Plant
  misc_feature: MA Experiment ID: 20000235 Result: Down-regulated in Transcription
  misc_feature: MA Experiment 20000235 PARAMETER Experiment Name: At_Siliques_P Parameter: Age (day) Value: 21
  misc_feature: MA Experiment 20000235 PARAMETER Experiment Name: At_Siliques_P Parameter: Organism Value: A. thaliana
  misc_feature: MA Experiment 20000235 PARAMETER Experiment Name: At_Siliques_P Parameter: Plant Line Value: WS
  misc_feature: MA Experiment 20000235 PARAMETER Experiment Name: At_Siliques_P Parameter: Tissue Value: 5-10mm Siliques vs. Whole Plant
  misc_feature: MA Experiment ID: 20000264 Result: Up-regulated in Transcription
  misc_feature: MA Experiment 20000264 PARAMETER Experiment Name: At_Open_Flower_P Parameter: Age (day) Value: 21
  misc_feature: MA Experiment 20000264 PARAMETER Experiment Name: At_Open_Flower_P Parameter: Plant Line Value: WS
  misc_feature: MA Experiment 20000264 PARAMETER Experiment Name: At_Open_Flower_P Parameter: Tissue Value: Open Flower vs. Whole Plant
  misc_feature: MA Experiment ID: 20000495 Result: Down-regulated in Transcription
  misc_feature: MA Experiment 20000495 PARAMETER Experiment Name: At_Guard_Cells_P Parameter: Harvest Date Value: 8/2/2002
  misc_feature: MA Experiment 20000495 PARAMETER Experiment Name: At_Guard_Cells_P Parameter: Organism Value: A. thaliana
  misc_feature: MA Experiment 20000495 PARAMETER Experiment Name: At_Guard_Cells_P Parameter: Tissue Value: Guard Cells vs. Leaves
  misc_feature: MA Experiment ID: 20000794 Result: Up-regulated in Transcription
  misc_feature: MA Experiment 20000794 PARAMETER Experiment Name: At_Petals_P Parameter: Age (day) Value: 23-25 days
  misc_feature: MA Experiment 20000794 PARAMETER Experiment Name: At_Petals_P Parameter: Plant Line Value: WS
  misc_feature: MA Experiment 20000794 PARAMETER Experiment Name: At_Petals_P Parameter: Tissue Value: Petals vs. Whole plant
  misc_feature: MA Experiment ID: 20001248 Result: Down-regulated in Transcription
  misc_feature: MA Experiment 20001248 PARAMETER Experiment Name: At_Far-red-induction_P Parameter: Age (day) Value: 7
  misc_feature: MA Experiment 20001248 PARAMETER Experiment Name: At_Far-red-induction_P Parameter: Light Value: Far-red vs. White
  misc_feature: MA Experiment 20001248 PARAMETER Experiment Name: At_Far-red-induction_P Parameter: Organism Value: A. thaliana
  misc_feature: MA Experiment 20001248 PARAMETER Experiment Name: At_Far-red-induction_P Parameter: Plant Line Value: Columbia
  misc_feature: MA Experiment 20001248 PARAMETER Experiment Name: At_Far-red-induction_P Parameter: Timepoint (hr) Value: 4
  misc_feature: MA Experiment 20001248 PARAMETER Experiment Name: At_Far-red-induction_P Parameter: Tissue Value: Whole Plant
  misc_feature: MA Experiment ID: 20001556 Result: Up-regulated in Transcription
  misc_feature: MA Experiment 20001556 PARAMETER Experiment Name: At_Drought_Soil_Dry_P Parameter: Age (day) Value: 26
  misc_feature: MA Experiment 20001556 PARAMETER Experiment Name: At_Drought_Soil_Dry_P Parameter: Organism Value: A. thaliana
  misc_feature: MA Experiment 20001556 PARAMETER Experiment Name: At_Drought_Soil_Dry_P Parameter: Plant Line Value: WS
  misc_feature: MA Experiment 20001556 PARAMETER Experiment Name: At_Drought_Soil_Dry_P Parameter: Post Timepoint (hr) Value: None
  misc_feature: MA Experiment 20001556 PARAMETER Experiment Name: At_Drought_Soil_Dry_P Parameter: Post-Treatment Value: None
  misc_feature: MA Experiment 20001556 PARAMETER Experiment Name: At_Drought_Soil_Dry_P Parameter: Timepoint (day) Value: 12
  misc_feature: MA Experiment 20001556 PARAMETER Experiment Name: At_Drought_Soil_Dry_P Parameter: Treatment Value: Drought vs. No Drought
  misc_feature: MA Experiment ID: 20001905 Result: Up-regulated in Transcription
  misc_feature: MA Experiment 20001905 PARAMETER Experiment Name: At_Drought_Reproduction_P Parameter: Age (day) Value: 40
  misc_feature: MA Experiment 20001905 PARAMETER Experiment Name: At_Drought_Reproduction_P Parameter: Organism Value: A. thaliana
  misc_feature: MA Experiment 20001905 PARAMETER Experiment Name: At_Drought_Reproduction_P Parameter: Plant Line Value: WS
  misc_feature: MA Experiment 20001905 PARAMETER Experiment Name: At_Drought_Reproduction_P Parameter: Timepoint (day) Value: 10
  misc_feature: MA Experiment 20001905 PARAMETER Experiment Name: At_Drought_Reproduction_P Parameter: Tissue Value: Rosettes
  misc_feature: MA Experiment 20001905 PARAMETER Experiment Name: At_Drought_Reproduction_P Parameter: Treatment Value: Drought vs. No Drought

SEQ ID NO: 35777 - protein, 325 aa, Arabidopsis thaliana; identical to SEQ ID NO: 21294
  peptide (1)..(325): Ceres Seq. ID no. 12391660
  misc_feature (10)..(325): Pfam Name: Caspase domain Pfam Description: Caspase domain
  misc_feature (10)..(325): Pfam Name: Caspase domain Pfam Description: Caspase domain
  misc_feature (224)..(322): Homolog of NCBI NO: 29367583 NR Description: latex-abundant protein-like protein
  misc_feature (8)..(164): Homolog of NCBI NO: 29367583 NR Description: latex-abundant protein-like protein
  misc_feature (243)..(322): Homolog of NCBI NO: 4235430 NR Description: latex-abundant protein [Hevea brasiliensis]
  misc_feature (6)..(164): Homolog of NCBI NO: 4235430 NR Description: latex-abundant protein [Hevea brasiliensis]
  misc_feature (243)..(322): Homolog of NCBI NO: 23343885 NR Description: metacaspase 1 [Lycopersicon esculentum]
  misc_feature (224)..(322): Homolog of NCBI NO: 29367583 NR Description: latex-abundant protein-like protein
  misc_feature (243)..(322): Homolog of NCBI NO: 4235430 NR Description: latex-abundant protein [Hevea brasiliensis]
  misc_feature (243)..(322): Homolog of NCBI NO: 23343885 NR Description: metacaspase 1 [Lycopersicon esculentum]
  misc_feature (1)..(325): Homolog of NCBI NO: 15237648 NR Description: hypothetical protein common family
  misc_feature (6)..(325): Homolog of NCBI NO: 21554334 NR Description: latex-abundant protein-like [Arabidopsis thaliana]
  misc_feature (6)..(236): Homolog of NCBI NO: 15219340 NR Description: hypothetical protein common family; protein id:
  misc_feature (243)..(322): Homolog of NCBI NO: 15219340 NR Description: hypothetical protein common family; protein id:
  misc_feature (15)..(163): Homolog of NCBI NO: 23343885 NR Description: metacaspase 1 [Lycopersicon esculentum]
  misc_feature (6)..(164): Homolog of NCBI NO: 4235430 NR Description: latex-abundant protein [Hevea brasiliensis]
  misc_feature (8)..(164): Homolog of NCBI NO: 29367583 NR Description: latex-abundant protein-like protein
  misc_feature (15)..(163): Homolog of NCBI NO: 23343885 NR Description: metacaspase 1 [Lycopersicon esculentum]
  misc_feature (243)..(322): Homolog of NCBI NO: 15219340 NR Description: hypothetical protein common family; protein id:
  misc_feature (6)..(236): Homolog of NCBI NO: 15219340 NR Description: hypothetical protein common family; protein id:
  misc_feature (6)..(325): Homolog of NCBI NO: 21554334 NR Description: latex-abundant protein-like [Arabidopsis thaliana]
  misc_feature (1)..(325): Homolog of NCBI NO: 15237648 NR Description: hypothetical protein common family

SEQ ID NO: 35778 - protein, 320 aa, Arabidopsis thaliana; identical to SEQ ID NO: 21295
  peptide (1)..(320): Ceres Seq. ID no. 12391661
  misc_feature (5)..(320): Pfam Name: Caspase domain Pfam Description: Caspase domain
  misc_feature (5)..(320): Pfam Name: Caspase domain Pfam Description: Caspase domain
  misc_feature (219)..(317): Homolog of NCBI NO: 29367583 NR Description: latex-abundant protein-like protein
  misc_feature (3)..(159): Homolog of NCBI NO: 29367583 NR Description: latex-abundant protein-like protein
  misc_feature (238)..(317): Homolog of NCBI NO: 4235430 NR Description: latex-abundant protein [Hevea brasiliensis]
  misc_feature (1)..(159): Homolog of NCBI NO: 4235430 NR Description: latex-abundant protein [Hevea brasiliensis]
  misc_feature (238)..(317): Homolog of NCBI NO: 23343885 NR Description: metacaspase 1 [Lycopersicon esculentum]
  misc_feature (219)..(317): Homolog of NCBI NO: 29367583 NR Description: latex-abundant protein-like protein
  misc_feature (238)..(317): Homolog of NCBI NO: 4235430 NR Description: latex-abundant protein [Hevea brasiliensis]
  misc_feature (238)..(317): Homolog of NCBI NO: 23343885 NR Description: metacaspase 1 [Lycopersicon esculentum]
  misc_feature (1)..(320): Homolog of NCBI NO: 15237648 NR Description: hypothetical protein common family
  misc_feature (1)..(320): Homolog of NCBI NO: 21554334 NR Description: latex-abundant protein-like [Arabidopsis thaliana]
  misc_feature (1)..(231): Homolog of NCBI NO: 15219340 NR Description: hypothetical protein common family; protein id:
  misc_feature (238)..(317): Homolog of NCBI NO: 15219340 NR Description: hypothetical protein common family; protein id:
  misc_feature (10)..(158): Homolog of NCBI NO: 23343885 NR Description: metacaspase 1 [Lycopersicon esculentum]
  misc_feature (1)..(159): Homolog of NCBI NO: 4235430 NR Description: latex-abundant protein [Hevea brasiliensis]
  misc_feature (3)..(159): Homolog of NCBI NO: 29367583 NR Description: latex-abundant protein-like protein
  misc_feature (10)..(158): Homolog of NCBI NO: 23343885 NR Description: metacaspase 1 [Lycopersicon esculentum]
  misc_feature (238)..(317): Homolog of NCBI NO: 15219340 NR Description: hypothetical protein common family; protein id:
  misc_feature (1)..(231): Homolog of NCBI NO: 15219340 NR Description: hypothetical protein common family; protein id:
  misc_feature (1)..(320): Homolog of NCBI NO: 21554334 NR Description: latex-abundant protein-like [Arabidopsis thaliana]
  misc_feature (1)..(320): Homolog of NCBI NO: 15237648 NR Description: hypothetical protein common family

SEQ ID NO: 35779 - protein, 290 aa, Arabidopsis thaliana; identical to SEQ ID NO: 21296
  peptide (1)..(290): Ceres Seq. ID no. 12391662
  misc_feature (1)..(290): Pfam Name: Caspase domain Pfam Description: Caspase domain
  misc_feature (1)..(290): Pfam Name: Caspase domain Pfam Description: Caspase domain
  misc_feature (189)..(287): Homolog of NCBI NO: 29367583 NR Description: latex-abundant protein-like protein
  misc_feature (1)..(129): Homolog of NCBI NO: 29367583 NR Description: latex-abundant protein-like protein
  misc_feature (208)..(287): Homolog of NCBI NO: 4235430 NR Description: latex-abundant protein [Hevea brasiliensis]
  misc_feature (1)..(129): Homolog of NCBI NO: 4235430 NR Description: latex-abundant protein [Hevea brasiliensis]
  misc_feature (208)..(287): Homolog of NCBI NO: 23343885 NR Description: metacaspase 1 [Lycopersicon esculentum]
  misc_feature (189)..(287): Homolog of NCBI NO: 29367583 NR Description: latex-abundant protein-like protein
  misc_feature (208)..(287): Homolog of NCBI NO: 4235430 NR Description: latex-abundant protein [Hevea brasiliensis]
  misc_feature (208)..(287): Homolog of NCBI NO: 23343885 NR Description: metacaspase 1 [Lycopersicon esculentum]
  misc_feature (1)..(290): Homolog of NCBI NO: 15237648 NR Description: hypothetical protein common family
  misc_feature (1)..(290): Homolog of NCBI NO: 21554334 NR Description: latex-abundant protein-like [Arabidopsis thaliana]
  misc_feature (1)..(201): Homolog of NCBI NO: 15219340 NR Description: hypothetical protein common family; protein id:
  misc_feature (208)..(287): Homolog of NCBI NO: 15219340 NR Description: hypothetical protein common family; protein id:
  misc_feature (1)..(128): Homolog of NCBI NO: 23343885 NR Description: metacaspase 1 [Lycopersicon esculentum]
  misc_feature (1)..(129): Homolog of NCBI NO: 4235430 NR Description: latex-abundant protein [Hevea brasiliensis]
  misc_feature (1)..(129): Homolog of NCBI NO: 29367583 NR Description: latex-abundant protein-like protein
  misc_feature (1)..(128): Homolog of NCBI NO: 23343885 NR Description: metacaspase 1 [Lycopersicon esculentum]
  misc_feature (208)..(287): Homolog of NCBI NO: 15219340 NR Description: hypothetical protein common family; protein id:
  misc_feature (1)..(201): Homolog of NCBI NO: 15219340 NR Description: hypothetical protein common family; protein id:
  misc_feature (1)..(290): Homolog of NCBI NO: 21554334 NR Description: latex-abundant protein-like [Arabidopsis thaliana]
  misc_feature (1)..(290): Homolog of NCBI NO: 15237648 NR Description: hypothetical protein common family

SEQ ID NO: 35780 - DNA, 1127 bp, Arabidopsis thaliana; identical to SEQ ID NO: 21963
  misc_feature (1)..(1127): Ceres Seq. ID no. 12385171
  misc_feature: MA Experiment ID: 108434 Result: Down-regulated in Transcription
  misc_feature: MA Experiment 108434 PARAMETER Experiment Name: At_Root_Tips_cDNA_P Parameter: Tissue Value: Root Tips
  misc_feature: MA Experiment ID: 108435 Result: Down-regulated in Transcription
  misc_feature: MA Experiment 108435 PARAMETER Experiment Name: At_stm_Mutants_cDNA_P Parameter: Plant Line Value: wt Landsburg vs stm
  misc_feature: MA Experiment 108435 PARAMETER Experiment Name: At_stm_Mutants_cDNA_P Parameter: Tissue Value: Shoot Apical Meristem Region
  misc_feature: MA Experiment ID: 108461 Result: Up-regulated in Transcription
  misc_feature: MA Experiment 108461 PARAMETER Experiment Name: At_Germinating_Seeds_cDNA_P Parameter: Age (day) Value: 1 vs. 0
  misc_feature: MA Experiment 108461 PARAMETER Experiment Name: At_Germinating_Seeds_cDNA_P Parameter: Tissue Value: Germinating Seeds
  misc_feature: MA Experiment ID: 108462 Result: Up-regulated in Transcription
  misc_feature: MA Experiment 108462 PARAMETER Experiment Name: At_Germinating_Seeds_cDNA_P Parameter: Age (day) Value: 2 vs. 0
  misc_feature: MA Experiment 108462 PARAMETER Experiment Name: At_Germinating_Seeds_cDNA_P Parameter: Tissue Value: Germinating Seeds
  misc_feature: MA Experiment ID: 108463 Result: Up-regulated in Transcription
  misc_feature: MA Experiment 108463 PARAMETER Experiment Name: At_Germinating_Seeds_cDNA_P Parameter: Age (day) Value: 3 vs. 0
  misc_feature: MA Experiment 108463 PARAMETER Experiment Name: At_Germinating_Seeds_cDNA_P Parameter: Tissue Value: Germinating Seeds
  misc_feature: MA Experiment ID: 108464 Result: Up-regulated in Transcription
  misc_feature: MA Experiment 108464 PARAMETER Experiment Name: At_Germinating_Seeds_cDNA_P Parameter: Age (day) Value: 4 vs. 0
  misc_feature: MA Experiment 108464 PARAMETER Experiment Name: At_Germinating_Seeds_cDNA_P Parameter: Tissue Value: Germinating Seeds
  misc_feature: MA Experiment ID: 108488 Result: Up-regulated in Transcription
  misc_feature: MA Experiment ID: 108489 Result: Down-regulated in Transcription
  misc_feature: MA Experiment ID: 108594 Result: Down-regulated in Transcription
  misc_feature: MA Experiment 108594 PARAMETER Experiment Name: At_Ler-rhl_Root_cDNA_P Parameter: Plant Line Value: null
  misc_feature: MA Experiment ID: 20000180 Result: Up-regulated in Transcription
  misc_feature: MA Experiment 20000180 PARAMETER Experiment Name: At_Germinating_Seeds_P Parameter: Age (hr) Value: 24 vs. 0
  misc_feature: MA Experiment 20000180 PARAMETER Experiment Name: At_Germinating_Seeds_P Parameter: Tissue Value: Germinating Seeds
  misc_feature: MA Experiment ID: 20000185 Result: Down-regulated in Transcription
  misc_feature: MA Experiment 20000185 PARAMETER Experiment Name: At_Roots__P Parameter: Age (day) Value: 7 vs. 21
  misc_feature: MA Experiment 20000185 PARAMETER Experiment Name: At_Roots__P Parameter: Organism Value: A. thaliana
  misc_feature: MA Experiment 20000185 PARAMETER Experiment Name: At_Roots__P Parameter: Tissue Value: Roots vs. Whole Plant
  misc_feature: MA Experiment ID: 20000264 Result: Down-regulated in Transcription
  misc_feature: MA Experiment 20000264 PARAMETER Experiment Name: At_Open_Flower_P Parameter: Age (day) Value: 21
  misc_feature: MA Experiment 20000264 PARAMETER Experiment Name: At_Open_Flower_P Parameter: Plant Line Value: WS
  misc_feature: MA Experiment 20000264 PARAMETER Experiment Name: At_Open_Flower_P Parameter: Tissue Value: Open Flower vs. Whole Plant
  misc_feature: MA Experiment ID: 20000265 Result: Down-regulated in Transcription
  misc_feature: MA Experiment 20000265 PARAMETER Experiment Name: At_Open_Flower_P Parameter: Age (day) Value: 21
  misc_feature: MA Experiment 20000265 PARAMETER Experiment Name: At_Open_Flower_P Parameter: Plant Line Value: WS
  misc_feature: MA Experiment 20000265 PARAMETER Experiment Name: At_Open_Flower_P Parameter: Tissue Value: Closed Flower vs. Whole Plant
  misc_feature: MA Experiment ID: 20000269 Result: Down-regulated in Transcription
  misc_feature: MA Experiment 20000269 PARAMETER Experiment Name: At_1mM_KNO3_L-vs-H_Roots_P Parameter: Age (day) Value: 7,10,12
  misc_feature: MA Experiment 20000269 PARAMETER Experiment Name: At_1mM_KNO3_L-vs-H_Roots_P Parameter: Organism Value: A. thaliana
  misc_feature: MA Experiment 20000269 PARAMETER Experiment Name: At_1mM_KNO3_L-vs-H_Roots_P Parameter: Plant Line Value: WS
  misc_feature: MA Experiment 20000269 PARAMETER Experiment Name: At_1mM_KNO3_L-vs-H_Roots_P Parameter: Timepoint (day) Value: 7,10,12
  misc_feature: MA Experiment 20000269 PARAMETER Experiment Name: At_1mM_KNO3_L-vs-H_Roots_P Parameter: Tissue Value: Roots
  misc_feature: MA Experiment 20000269 PARAMETER Experiment Name: At_1mM_KNO3_L-vs-H_Roots_P Parameter: Treatment Value: 1mM KNO3 vs. 50mM KNO3
  misc_feature: MA Experiment ID: 20000286 Result: Down-regulated in Transcription
  misc_feature: MA Experiment 20000286 PARAMETER Experiment Name: At_Open_Flower_P Parameter: Age (day) Value: 21
  misc_feature: MA Experiment 20000286 PARAMETER Experiment Name: At_Open_Flower_P Parameter: Plant Line Value: WS
  misc_feature: MA Experiment 20000286 PARAMETER Experiment Name: At_Open_Flower_P Parameter: Tissue Value: Half Open vs. Whole Plant
  misc_feature: MA Experiment ID: 20000439 Result: Down-regulated in Transcription
  misc_feature: MA Experiment 20000439 PARAMETER Experiment Name: At_Roots__P Parameter: Age (day) Value: 14 vs. 21
  misc_feature: MA Experiment 20000439 PARAMETER Experiment Name: At_Roots__P Parameter: Organism Value: A. thaliana
  misc_feature: MA Experiment 20000439 PARAMETER Experiment Name: At_Roots__P Parameter: Tissue Value: Roots vs. Whole Plant
  misc_feature: MA Experiment ID: 20000441 Result: Up-regulated in Transcription
  misc_feature: MA Experiment 20000441 PARAMETER Experiment Name: At_1uM_BR-BRZ__P Parameter: Tissue Value: Shoot Apices
  misc_feature: MA Experiment 20000441 PARAMETER Experiment Name: At_1uM_BR-BRZ__P Parameter: Treatment Value: 1uM BR vs. No Treatment
  misc_feature: MA Experiment ID: 20000794 Result: Down-regulated in Transcription
  misc_feature: MA Experiment 20000794 PARAMETER Experiment Name: At_Petals_P Parameter: Age (day) Value: 23-25 days
  misc_feature: MA Experiment 20000794 PARAMETER Experiment Name: At_Petals_P Parameter: Plant Line Value: WS
  misc_feature: MA Experiment 20000794 PARAMETER Experiment Name: At_Petals_P Parameter: Tissue Value: Petals vs. Whole plant
  misc_feature: MA Experiment ID: 20001757 Result: Up-regulated in Transcription
  misc_feature: MA Experiment 20001757 PARAMETER Experiment Name: At_50mM_NH4NO3_L-to-H_P Parameter: Timepoint (hr) Value: 6
  misc_feature: MA Experiment 20001757 PARAMETER Experiment Name: At_50mM_NH4NO3_L-to-H_P Parameter: Tissue Value: Leaf
  misc_feature: MA Experiment 20001757 PARAMETER Experiment Name: At_50mM_NH4NO3_L-to-H_P Parameter: Treatment Value: 50mM NH4NO3 vs 100mM Mannitol

SEQ ID NO: 35781 - protein, 273 aa, Arabidopsis thaliana; identical to SEQ ID NO: 21964
  peptide (1)..(273): Ceres Seq. ID no. 12385172
  misc_feature (61)..(244): Pfam Name: Chlorophyll A-B binding protein Pfam Description: Chlorophyll A-B binding protein
  misc_feature (61)..(244): Pfam Name: Chlorophyll A-B binding protein Pfam Description: Chlorophyll A-B binding protein
  misc_feature (109)..(273): Homolog of NCBI NO: 37780998 NR Description: chlorophyll a/b binding protein [Vitis vinifera]
  misc_feature (11)..(269): Homolog of NCBI NO: 40714511 NR Description: light-harvesting chlorophyll-a/b protein of
  misc_feature (72)..(264): Homolog of NCBI NO: 7271947 NR Description: chlorophyll a/b-binding protein type III [Alonsoa
  misc_feature (1)..(273): Homolog of NCBI NO: 99487 NR Description: chlorophyll a/b-binding protein (clone pINEab 43)
  misc_feature (1)..(273): Homolog of NCBI NO: 7443229 NR Description: probable chlorophyll a/b-binding protein type III
  misc_feature (109)..(273): Homolog of NCBI NO: 37780998 NR Description: chlorophyll a/b binding protein [Vitis vinifera]
  misc_feature (72)..(264): Homolog of NCBI NO: 7271947 NR Description: chlorophyll a/b-binding protein type III [Alonsoa
  misc_feature (1)..(273): Homolog of NCBI NO: 7443229 NR Description: probable chlorophyll a/b-binding protein type III
  misc_feature (1)..(273): Homolog of NCBI NO: 15219941 NR Description: light-harvesting chlorophyll a/b binding protein
  misc_feature (1)..(273): Homolog of NCBI NO: 430947 NR Description: PSI type III chlorophyll a/b-binding protein
  misc_feature (1)..(273): Homolog of NCBI NO: 21554335 NR Description: PSI type III chlorophyll a/b-binding protein,
  misc_feature (1)..(273): Homolog of NCBI NO: 82080 NR Description: chlorophyll a/b-binding protein type III
  misc_feature (1)..(273): Homolog of NCBI NO: 115813 NR Description: Chlorophyll A-B binding protein 8, chloroplast
  misc_feature (1)..(273): Homolog of NCBI NO: 99487 NR Description: chlorophyll a/b-binding protein (clone pINEab 43)
  misc_feature (11)..(269): Homolog of NCBI NO: 40714511 NR Description: light-harvesting chlorophyll-a/b protein of
  misc_feature (1)..(273): Homolog of NCBI NO: 115813 NR Description: Chlorophyll A-B binding protein 8, chloroplast
  misc_feature (1)..(273): Homolog of NCBI NO: 82080 NR Description: chlorophyll a/b-binding protein type III
  misc_feature (1)..(273): Homolog of NCBI NO: 21554335 NR Description: PSI type III chlorophyll a/b-binding protein,
  misc_feature (1)..(273): Homolog of NCBI NO: 430947 NR Description: PSI type III chlorophyll a/b-binding protein
  misc_feature (1)..(273): Homolog of NCBI NO: 15219941 NR Description: light-harvesting chlorophyll a/b binding protein

SEQ ID NO: 35782 - protein, 166 aa, Arabidopsis thaliana; identical to SEQ ID NO: 21965
  peptide (1)..(166): Ceres Seq. ID no. 12385173
  misc_feature (1)..(137): Pfam Name: Chlorophyll A-B binding protein Pfam Description: Chlorophyll A-B binding protein
  misc_feature (1)..(137): Pfam Name: Chlorophyll A-B binding protein Pfam Description: Chlorophyll A-B binding protein
  misc_feature (2)..(166): Homolog of NCBI NO: 37780998 NR Description: chlorophyll a/b binding protein [Vitis vinifera]
  misc_feature (1)..(162): Homolog of NCBI NO: 40714511 NR Description: light-harvesting chlorophyll-a/b protein of
  misc_feature (1)..(157): Homolog of NCBI NO: 7271947 NR Description: chlorophyll a/b-binding protein type III [Alonsoa
  misc_feature (1)..(166): Homolog of NCBI NO: 99487 NR Description: chlorophyll a/b-binding protein (clone pINEab 43)
  misc_feature (1)..(166): Homolog of NCBI NO: 7443229 NR Description: probable chlorophyll a/b-binding protein type III
  misc_feature (2)..(166): Homolog of NCBI NO: 37780998 NR Description: chlorophyll a/b binding protein [Vitis vinifera]
  misc_feature (1)..(157): Homolog of NCBI NO: 7271947 NR Description: chlorophyll a/b-binding protein type III [Alonsoa
  misc_feature (1)..(166): Homolog of NCBI NO: 7443229 NR Description: probable chlorophyll a/b-binding protein type III
  misc_feature (1)..(166): Homolog of NCBI NO: 15219941 NR Description: light-harvesting chlorophyll a/b binding protein
  misc_feature (1)..(166): Homolog of NCBI NO: 430947 NR Description: PSI type III chlorophyll a/b-binding protein
  misc_feature (1)..(166): Homolog of NCBI NO: 21554335 NR Description: PSI type III chlorophyll a/b-binding protein,
  misc_feature (1)..(166): Homolog of NCBI NO: 82080 NR Description: chlorophyll a/b-binding protein type III
  misc_feature (1)..(166): Homolog of NCBI NO: 115813 NR Description: Chlorophyll A-B binding protein 8, chloroplast
  misc_feature (1)..(166): Homolog of NCBI NO: 99487 NR Description: chlorophyll a/b-binding protein (clone pINEab 43)
  misc_feature (1)..(162): Homolog of NCBI NO: 40714511 NR Description: light-harvesting chlorophyll-a/b protein of
  misc_feature (1)..(166): Homolog of NCBI NO: 115813 NR Description: Chlorophyll A-B binding protein 8, chloroplast
  misc_feature (1)..(166): Homolog of NCBI NO: 82080 NR Description: chlorophyll a/b-binding protein type III
  misc_feature (1)..(166): Homolog of NCBI NO: 21554335 NR Description: PSI type III chlorophyll a/b-binding protein,
  misc_feature (1)..(166): Homolog of NCBI NO: 430947 NR Description: PSI type III chlorophyll a/b-binding protein
  misc_feature (1)..(166): Homolog of NCBI NO: 15219941 NR Description: light-harvesting chlorophyll a/b binding protein

SEQ ID NO: 35783 - DNA, 636 bp, Arabidopsis thaliana
  misc_feature (1)..(636): Ceres Seq. ID no. 12423268
  misc_feature: MA Experiment ID: 20000169 Result: Down-regulated in Transcription
  misc_feature: MA Experiment 20000169 PARAMETER Experiment Name: At_100uM_ABA_P Parameter: Age (day) Value: 14
  misc_feature: MA Experiment 20000169 PARAMETER Experiment Name: At_100uM_ABA_P Parameter: Organism Value: A. thaliana
  misc_feature: MA Experiment 20000169 PARAMETER Experiment Name: At_100uM_ABA_P Parameter: Plant Line Value: WS
  misc_feature: MA Experiment 20000169 PARAMETER Experiment Name: At_100uM_ABA_P Parameter: Timepoint (hr) Value: 6
  misc_feature: MA Experiment 20000169 PARAMETER Experiment Name: At_100uM_ABA_P Parameter: Tissue Value: Aerial
  misc_feature: MA Experiment 20000169 PARAMETER Experiment Name: At_100uM_ABA_P Parameter: Treatment Value: 100uM ABA vs. No Treatment
  misc_feature: MA Experiment ID: 20000180 Result: Up-regulated in Transcription
  misc_feature: MA Experiment 20000180 PARAMETER Experiment Name: At_Germinating_Seeds_P Parameter: Age (hr) Value: 24 vs. 0
  misc_feature: MA Experiment 20000180 PARAMETER Experiment Name: At_Germinating_Seeds_P Parameter: Tissue Value: Germinating Seeds
  misc_feature: MA Experiment ID: 20000182 Result: Down-regulated in Transcription
  misc_feature: MA Experiment 20000182 PARAMETER Experiment Name: At_2mM_SA_P Parameter: Age (day) Value: 14
  misc_feature: MA Experiment 20000182 PARAMETER Experiment Name: At_2mM_SA_P Parameter: Organism Value: A. thaliana
  misc_feature: MA Experiment 20000182 PARAMETER Experiment Name: At_2mM_SA_P Parameter: Plant Line Value: WS
  misc_feature: MA Experiment 20000182 PARAMETER Experiment Name: At_2mM_SA_P Parameter: Timepoint (hr) Value: 6
  misc_feature: MA Experiment 20000182 PARAMETER Experiment Name: At_2mM_SA_P Parameter: Tissue Value: Aerial
  misc_feature: MA Experiment 20000182 PARAMETER Experiment Name: At_2mM_SA_P Parameter: Treatment Value: 2mM SA vs. No Treatment
  misc_feature: MA Experiment ID: 20000184 Result: Down-regulated in Transcription
  misc_feature: MA Experiment 20000184 PARAMETER Experiment Name: At_Shoots__P Parameter: Age (day) Value: 7
  misc_feature: MA Experiment 20000184 PARAMETER Experiment Name: At_Shoots__P Parameter: Tissue Value: Shoots vs. Whole Plant
  misc_feature: MA Experiment ID: 20000214 Result: Down-regulated in Transcription
  misc_feature: MA Experiment 20000214 PARAMETER Experiment Name: At_4deg_Cold_P Parameter: Timepoint (hr) Value: 6
  misc_feature: MA Experiment ID: 20000227 Result: Up-regulated in Transcription
  misc_feature: MA Experiment 20000227 PARAMETER Experiment Name: At_Root-Tips-vs-Tops_P Parameter: Tissue Value: Root Tips vs. Root Tops
  misc_feature: MA Experiment ID: 20000234 Result: Down-regulated in Transcription
  misc_feature: MA Experiment 20000234 PARAMETER Experiment Name: At_Siliques_P Parameter: Age (day) Value: 21
  misc_feature: MA Experiment 20000234 PARAMETER Experiment Name: At_Siliques_P Parameter: Organism Value: A. thaliana
  misc_feature: MA Experiment 20000234 PARAMETER Experiment Name: At_Siliques_P Parameter: Plant Line Value: WS
  misc_feature: MA Experiment 20000234 PARAMETER Experiment Name: At_Siliques_P Parameter: Tissue Value: Less Than 5mm Siliques vs. Whole Plant
  misc_feature: MA Experiment ID: 20000437 Result: Down-regulated in Transcription
  misc_feature: MA Experiment 20000437 PARAMETER Experiment Name: At_Drought_P Parameter: Age (day) Value: 8
  misc_feature: MA Experiment 20000437 PARAMETER Experiment Name: At_Drought_P Parameter: Organism Value: A. thaliana
  misc_feature: MA Experiment 20000437 PARAMETER Experiment Name: At_Drought_P Parameter: Plant Line Value: WS
  misc_feature: MA Experiment 20000437 PARAMETER Experiment Name: At_Drought_P Parameter: Timepoint (hr) Value: 24
  misc_feature: MA Experiment 20000437 PARAMETER Experiment Name: At_Drought_P Parameter: Tissue Value: Whole Plant
  misc_feature: MA Experiment 20000437 PARAMETER Experiment Name: At_Drought_P Parameter: Treatment Value: Drought vs. No Drought
  misc_feature: MA Experiment ID: 20000438 Result: Down-regulated in Transcription
  misc_feature: MA Experiment 20000438 PARAMETER Experiment Name: At_Shoots__P Parameter: Age (day) Value: 14
  misc_feature: MA Experiment 20000438 PARAMETER Experiment Name: At_Shoots__P Parameter: Tissue Value: Shoots vs. Whole Plant
  misc_feature: MA Experiment ID: 20000495 Result: Down-regulated in Transcription
  misc_feature: MA Experiment 20000495 PARAMETER Experiment Name: At_Guard_Cells_P Parameter: Harvest Date Value: 8/2/2002
  misc_feature: MA Experiment 20000495 PARAMETER Experiment Name: At_Guard_Cells_P Parameter: Organism Value: A. thaliana
  misc_feature: MA Experiment 20000495 PARAMETER Experiment Name: At_Guard_Cells_P Parameter: Tissue Value: Guard Cells vs. Leaves
  misc_feature: MA Experiment ID: 20000527 Result: Down-regulated in Transcription
  misc_feature: MA Experiment 20000527 PARAMETER Experiment Name: At_10percent_PEG_P Parameter: Age (day) Value: 20
  misc_feature: MA Experiment 20000527 PARAMETER Experiment Name: At_10percent_PEG_P Parameter: Organism Value: A. thaliana
  misc_feature: MA Experiment 20000527 PARAMETER Experiment Name: At_10percent_PEG_P Parameter: Plant Line Value: WS
  misc_feature: MA Experiment 20000527 PARAMETER Experiment Name: At_10percent_PEG_P Parameter: Timepoint (day) Value: 20
  misc_feature: MA Experiment 20000527 PARAMETER Experiment Name: At_10percent_PEG_P Parameter: Tissue Value: Whole Plant
  misc_feature: MA Experiment 20000527 PARAMETER Experiment Name: At_10percent_PEG_P Parameter: Treatment Value: 10percent PEG vs. No Treatment
  misc_feature: MA Experiment ID: 20001247 Result: Up-regulated in Transcription
  misc_feature: MA Experiment 20001247 PARAMETER Experiment Name: At_Far-red-induction_P Parameter: Age (day) Value: 7
  misc_feature: MA Experiment 20001247 PARAMETER Experiment Name: At_Far-red-induction_P Parameter: Light Value: Far-red vs. White
  misc_feature: MA Experiment 20001247 PARAMETER Experiment Name: At_Far-red-induction_P Parameter: Organism Value: A. thaliana
  misc_feature: MA Experiment 20001247 PARAMETER Experiment Name: At_Far-red-induction_P Parameter: Plant Line Value: Columbia
  misc_feature: MA Experiment 20001247 PARAMETER Experiment Name: At_Far-red-induction_P Parameter: Timepoint (hr) Value: 1
  misc_feature: MA Experiment 20001247 PARAMETER Experiment Name: At_Far-red-induction_P Parameter: Tissue Value: Whole Plant
  misc_feature: MA Experiment ID: 20001248 Result: Up-regulated in Transcription
  misc_feature: MA Experiment 20001248 PARAMETER Experiment Name: At_Far-red-induction_P Parameter: Age (day) Value: 7
  misc_feature: MA Experiment 20001248 PARAMETER Experiment Name: At_Far-red-induction_P Parameter: Light Value: Far-red vs. White
  misc_feature: MA Experiment 20001248 PARAMETER Experiment Name: At_Far-red-induction_P Parameter: Organism Value: A. thaliana
  misc_feature: MA Experiment 20001248 PARAMETER Experiment Name: At_Far-red-induction_P Parameter: Plant Line Value: Columbia
  misc_feature: MA Experiment 20001248 PARAMETER Experiment Name: At_Far-red-induction_P Parameter: Timepoint (hr) Value: 4
  misc_feature: MA Experiment 20001248 PARAMETER Experiment Name: At_Far-red-induction_P Parameter: Tissue Value: Whole Plant
  misc_feature: MA Experiment ID: 20001450 Result: Up-regulated in Transcription
  misc_feature: MA Experiment 20001450 PARAMETER Experiment Name: At_Far-red-induction_P Parameter: Age (day) Value: 7
  misc_feature: MA Experiment 20001450 PARAMETER Experiment Name: At_Far-red-induction_P Parameter: Light Value: Far-red vs. White
  misc_feature: MA Experiment 20001450 PARAMETER Experiment Name: At_Far-red-induction_P Parameter: Organism Value: A. thaliana
  misc_feature: MA Experiment 20001450 PARAMETER Experiment Name: At_Far-red-induction_P Parameter: Plant Line Value: Columbia
  misc_feature: MA Experiment 20001450 PARAMETER Experiment Name: At_Far-red-induction_P Parameter: Timepoint (hr) Value: 8
  misc_feature: MA Experiment 20001450 PARAMETER Experiment Name: At_Far-red-induction_P Parameter: Tissue Value: Whole Plant
  misc_feature: MA Experiment ID: 20001451 Result: Up-regulated in Transcription
  misc_feature: MA Experiment 20001451 PARAMETER Experiment Name: At_Far-red-induction_P Parameter: Age (day) Value: 7
  misc_feature: MA Experiment 20001451 PARAMETER Experiment Name: At_Far-red-induction_P Parameter: Light Value: Far-red vs. White
  misc_feature: MA Experiment 20001451 PARAMETER Experiment Name: At_Far-red-induction_P Parameter: Organism Value: A. thaliana
  misc_feature: MA Experiment 20001451 PARAMETER Experiment Name: At_Far-red-induction_P Parameter: Plant Line Value: Columbia
  misc_feature: MA Experiment 20001451 PARAMETER Experiment Name: At_Far-red-induction_P Parameter: Timepoint (hr) Value: 24
  misc_feature: MA Experiment 20001451 PARAMETER Experiment Name: At_Far-red-induction_P Parameter: Tissue Value: Whole Plant
  misc_feature: MA Experiment ID: 20001555 Result: Down-regulated in Transcription
  misc_feature: MA Experiment 20001555 PARAMETER Experiment Name: At_Drought_Soil_Dry_P Parameter: Age (day) Value: 24
  misc_feature: MA Experiment 20001555 PARAMETER Experiment Name: At_Drought_Soil_Dry_P Parameter: Organism Value: A. thaliana
  misc_feature: MA Experiment 20001555 PARAMETER Experiment Name: At_Drought_Soil_Dry_P Parameter: Plant Line Value: WS
  misc_feature: MA Experiment 20001555 PARAMETER Experiment Name: At_Drought_Soil_Dry_P Parameter: Post Timepoint (hr) Value: None
  misc_feature: MA Experiment 20001555 PARAMETER Experiment Name: At_Drought_Soil_Dry_P Parameter: Post-Treatment Value: None
  misc_feature: MA Experiment 20001555 PARAMETER Experiment Name: At_Drought_Soil_Dry_P Parameter: Timepoint (day) Value: 10
  misc_feature: MA Experiment 20001555 PARAMETER Experiment Name: At_Drought_Soil_Dry_P Parameter: Treatment Value: Drought vs. No Drought
  misc_feature: MA Experiment ID: 20001556 Result: Down-regulated in Transcription
  misc_feature: MA Experiment 20001556 PARAMETER Experiment Name: At_Drought_Soil_Dry_P Parameter: Age (day) Value: 26
  misc_feature: MA Experiment 20001556 PARAMETER Experiment Name: At_Drought_Soil_Dry_P Parameter: Organism Value: A. thaliana
  misc_feature: MA Experiment 20001556 PARAMETER Experiment Name: At_Drought_Soil_Dry_P Parameter: Plant Line Value: WS
  misc_feature: MA Experiment 20001556 PARAMETER Experiment Name: At_Drought_Soil_Dry_P Parameter: Post Timepoint (hr) Value: None
  misc_feature: MA Experiment 20001556 PARAMETER Experiment Name: At_Drought_Soil_Dry_P Parameter: Post-Treatment Value: None
  misc_feature: MA Experiment 20001556 PARAMETER Experiment Name: At_Drought_Soil_Dry_P Parameter: Timepoint (day) Value: 12
  misc_feature: MA Experiment 20001556 PARAMETER Experiment Name: At_Drought_Soil_Dry_P Parameter: Treatment Value: Drought vs. No Drought
  misc_feature: MA Experiment ID: 20001558 Result: Down-regulated in Transcription
  misc_feature: MA Experiment 20001558 PARAMETER Experiment Name: At_Drought_Soil_Dry_P Parameter: Age (day) Value: 27
  misc_feature: MA Experiment 20001558 PARAMETER Experiment Name: At_Drought_Soil_Dry_P Parameter: Organism Value: A. thaliana
  misc_feature: MA Experiment 20001558 PARAMETER Experiment Name: At_Drought_Soil_Dry_P Parameter: Plant Line Value: WS
  misc_feature: MA Experiment 20001558 PARAMETER Experiment Name: At_Drought_Soil_Dry_P Parameter: Post Timepoint (hr) Value: 6
  misc_feature: MA Experiment 20001558 PARAMETER Experiment Name: At_Drought_Soil_Dry_P Parameter: Post-Treatment Value: Re-Water vs. No Drought
  misc_feature: MA Experiment 20001558 PARAMETER Experiment Name: At_Drought_Soil_Dry_P Parameter: Timepoint (day) Value: 13
  misc_feature: MA Experiment 20001558 PARAMETER Experiment Name: At_Drought_Soil_Dry_P Parameter: Treatment Value: Drought vs. No Drought
  misc_feature: MA Experiment ID: 20001911 Result: Down-regulated in Transcription
  misc_feature: MA Experiment 20001911 PARAMETER Experiment Name: At_Drought_Reproduction_P Parameter: Age (day) Value: 40
  misc_feature: MA Experiment 20001911 PARAMETER Experiment Name: At_Drought_Reproduction_P Parameter: Organism Value: A. thaliana
  misc_feature: MA Experiment 20001911 PARAMETER Experiment Name: At_Drought_Reproduction_P Parameter: Plant Line Value: WS
  misc_feature: MA Experiment 20001911 PARAMETER Experiment Name: At_Drought_Reproduction_P Parameter: Timepoint (day) Value: 10
  misc_feature: MA Experiment 20001911 PARAMETER Experiment Name: At_Drought_Reproduction_P Parameter: Tissue Value: Flowers
  misc_feature: MA Experiment 20001911 PARAMETER Experiment Name: At_Drought_Reproduction_P Parameter: Treatment Value: Drought vs. No Drought
aaaaaacatcacatacactatttttntcctctccttattgtctatatatttttcctctttagctttttcatttcgaaatggccaccgttgaggttgaacaagtcactccagtagcagtagagaacgttgaggtaccaacaaagacagtggaggagacagtggtggagacagaggtgacccaacagccggaagaatccgtccccgccgtgacagaacaaaaatccgaagcaccaattgtagaaacaaacgaagaagtggttgtggaagaggcagagaagaaagatgaagaaaccgagaagaaaacagaggagaaagacgagaagacagaagtgatcacggaaactccggtagttgaggaggaggagaagaaagctgaggaagtgaccgaaactccggcggttgtggaggaggagaagaagacagaggtggttgaggagaaacagactgaggttgcggctgctgaggaagtcgccgttgagaaggccgaggagtaaagaggaaggaagaagctatatatgaccttttttggtctcatatcgttttctgtttattttattttatcaacatttcataagtattttctatgtttgttgggtttgttatgatgaaatcagatgtttggatcttttaatggtc

SEQ ID NO: 35784 - protein, 138 aa, Arabidopsis thaliana; identical to SEQ ID NO: 26162
  peptide (1)..(138): Ceres Seq. ID no. 12423269
  misc_feature (25)..(132): Pfam Name: DREPP plasma membrane polypeptide Pfam Description: DREPP plasma membrane polypeptide
  misc_feature (1)..(138): Homolog of NCBI NO: 22999045 NR Description: hypothetical protein [Magnetococcus sp. MC-1]
  misc_feature (1)..(138): Homolog of NCBI NO: 9049359 NR Description: vacuolar calcium binding protein [Raphanus
  misc_feature (1)..(138): Homolog of NCBI NO: 9049359 NR Description: vacuolar calcium binding protein [Raphanus
  misc_feature (1)..(138): Homolog of NCBI NO: 9049359 NR Description: vacuolar calcium binding protein [Raphanus
  misc_feature (1)..(130): Homolog of NCBI NO: 18391349 NR Description: expressed protein
  misc_feature (39)..(138): Homolog of NCBI NO: 15231671 NR Description: putative protein; protein id: At3g59370.1
  misc_feature (1)..(134): Homolog of NCBI NO: 18407594 NR Description: expressed protein
  misc_feature (1)..(134): Homolog of NCBI NO: 21555836 NR Description: unknown [Arabidopsis thaliana]
  misc_feature (39)..(138): Homolog of NCBI NO: 18391349 NR Description: expressed protein
  misc_feature (1)..(138): Homolog of NCBI NO: 30682601 NR Description: expressed protein [Arabidopsis thaliana]

SEQ ID NO: 35785 - DNA, 1221 bp, Arabidopsis thaliana; identical to SEQ ID NO: 20489
  misc_feature (1)..(1221): Ceres Seq. ID no. 12562215
  misc_feature: MA Experiment ID: 108434 Result: Down-regulated in Transcription
  misc_feature: MA Experiment 108434 PARAMETER Experiment Name: At_Root_Tips_cDNA_P Parameter: Tissue Value: Root Tips
  misc_feature: MA Experiment ID: 108461 Result: Up-regulated in Transcription
  misc_feature: MA Experiment 108461 PARAMETER Experiment Name: At_Germinating_Seeds_cDNA_P Parameter: Age (day) Value: 1 vs. 0
  misc_feature: MA Experiment 108461 PARAMETER Experiment Name: At_Germinating_Seeds_cDNA_P Parameter: Tissue Value: Germinating Seeds
  misc_feature: MA Experiment ID: 108462 Result: Up-regulated in Transcription
  misc_feature: MA Experiment 108462 PARAMETER Experiment Name: At_Germinating_Seeds_cDNA_P Parameter: Age (day) Value: 2 vs. 0
  misc_feature: MA Experiment 108462 PARAMETER Experiment Name: At_Germinating_Seeds_cDNA_P Parameter: Tissue Value: Germinating Seeds
  misc_feature: MA Experiment ID: 108463 Result: Up-regulated in Transcription
  misc_feature: MA Experiment 108463 PARAMETER Experiment Name: At_Germinating_Seeds_cDNA_P Parameter: Age (day) Value: 3 vs. 0
  misc_feature: MA Experiment 108463 PARAMETER Experiment Name: At_Germinating_Seeds_cDNA_P Parameter: Tissue Value: Germinating Seeds
  misc_feature: MA Experiment ID: 108464 Result: Up-regulated in Transcription
  misc_feature: MA Experiment 108464 PARAMETER Experiment Name: At_Germinating_Seeds_cDNA_P Parameter: Age (day) Value: 4 vs. 0
  misc_feature: MA Experiment 108464 PARAMETER Experiment Name: At_Germinating_Seeds_cDNA_P Parameter: Tissue Value: Germinating Seeds
  misc_feature: MA Experiment ID: 108605 Result: Down-regulated in Transcription
  misc_feature: MA Experiment 108605 PARAMETER Experiment Name: At_100uM_ABA_cDNA_P Parameter: Timepoint (hr) Value: 6
  misc_feature: MA Experiment 108605 PARAMETER Experiment Name: At_100uM_ABA_cDNA_P Parameter: Tissue Value: Aerial
  misc_feature: MA Experiment 108605 PARAMETER Experiment Name: At_100uM_ABA_cDNA_P Parameter: Treatment Value: 100uM ABA vs. No Treatment
  misc_feature: MA Experiment ID: 108607 Result: Down-regulated in Transcription
  misc_feature: MA Experiment 108607 PARAMETER Experiment Name: At_100uM_ABA_cDNA_P Parameter: Timepoint (hr) Value: 4
  misc_feature: MA Experiment 108607 PARAMETER Experiment Name: At_100uM_ABA_cDNA_P Parameter: Tissue Value: Aerial
  misc_feature: MA Experiment 108607 PARAMETER Experiment Name: At_100uM_ABA_cDNA_P Parameter: Treatment Value: 100uM ABA vs. No Treatment
  misc_feature: MA Experiment ID: 20000071 Result: Down-regulated in Transcription
  misc_feature: MA Experiment 20000071 PARAMETER Experiment Name: At_100uM_ABA_Mutants_cDNA_P Parameter: Plant Line Value: CS8104
  misc_feature: MA Experiment 20000071 PARAMETER Experiment Name: At_100uM_ABA_Mutants_cDNA_P Parameter: Timepoint (hr) Value: 6
  misc_feature: MA Experiment 20000071 PARAMETER Experiment Name: At_100uM_ABA_Mutants_cDNA_P Parameter: Tissue Value: Aerial
  misc_feature: MA Experiment 20000071 PARAMETER Experiment Name: At_100uM_ABA_Mutants_cDNA_P Parameter: Treatment Value: 100uM ABA vs. No Treatment
  misc_feature: MA Experiment ID: 20000117 Result: Down-regulated in Transcription
  misc_feature: MA Experiment 20000117 PARAMETER Experiment Name: At_100uM_ABA_Mutants_cDNA_P Parameter: Plant Line Value: Columbia
  misc_feature: MA Experiment 20000117 PARAMETER Experiment Name: At_100uM_ABA_Mutants_cDNA_P Parameter: Timepoint (hr) Value: 6
  misc_feature: MA Experiment 20000117 PARAMETER Experiment Name: At_100uM_ABA_Mutants_cDNA_P Parameter: Tissue Value: Aerial
  misc_feature: MA Experiment 20000117 PARAMETER Experiment Name: At_100uM_ABA_Mutants_cDNA_P Parameter: Treatment Value: 100uM ABA vs. No Treatment
  misc_feature: MA Experiment ID: 20000169 Result: Down-regulated in Transcription
  misc_feature: MA Experiment 20000169 PARAMETER Experiment Name: At_100uM_ABA_P Parameter: Age (day) Value: 14
  misc_feature: MA Experiment 20000169 PARAMETER Experiment Name: At_100uM_ABA_P Parameter: Organism Value: A. thaliana
  misc_feature: MA Experiment 20000169 PARAMETER Experiment Name: At_100uM_ABA_P Parameter: Plant Line Value: WS
  misc_feature: MA Experiment 20000169 PARAMETER Experiment Name: At_100uM_ABA_P Parameter: Timepoint (hr) Value: 6
  misc_feature: MA Experiment 20000169 PARAMETER Experiment Name: At_100uM_ABA_P Parameter: Tissue Value: Aerial
  misc_feature: MA Experiment 20000169 PARAMETER Experiment Name: At_100uM_ABA_P Parameter: Treatment Value: 100uM ABA vs. No Treatment
  misc_feature: MA Experiment ID: 20000180 Result: Up-regulated in Transcription
  misc_feature: MA Experiment 20000180 PARAMETER Experiment Name: At_Germinating_Seeds_P Parameter: Age (hr) Value: 24 vs. 0
  misc_feature: MA Experiment 20000180 PARAMETER Experiment Name: At_Germinating_Seeds_P Parameter: Tissue Value: Germinating Seeds
  misc_feature: MA Experiment ID: 20000224 Result: Up-regulated in Transcription
  misc_feature: MA Experiment ID: 20000264 Result: Up-regulated in Transcription
  misc_feature: MA Experiment 20000264 PARAMETER Experiment Name: At_Open_Flower_P Parameter: Age (day) Value: 21
  misc_feature: MA Experiment 20000264 PARAMETER Experiment Name: At_Open_Flower_P Parameter: Plant Line Value: WS
  misc_feature: MA Experiment 20000264 PARAMETER Experiment Name: At_Open_Flower_P Parameter: Tissue Value: Open Flower vs. Whole Plant
  misc_feature: MA Experiment ID: 20000267 Result: Down-regulated in Transcription
  misc_feature: MA Experiment 20000267 PARAMETER Experiment Name: At_Drought_P Parameter: Age (day) Value: 7
  misc_feature: MA Experiment 20000267 PARAMETER Experiment Name: At_Drought_P Parameter: Organism Value: A. thaliana
  misc_feature: MA Experiment 20000267 PARAMETER Experiment Name: At_Drought_P Parameter: Plant Line Value: WS
  misc_feature: MA Experiment 20000267 PARAMETER Experiment Name: At_Drought_P Parameter: Timepoint (hr) Value: 6
  misc_feature: MA Experiment 20000267 PARAMETER Experiment Name: At_Drought_P Parameter: Tissue Value: Whole Plant
  misc_feature: MA Experiment 20000267 PARAMETER Experiment Name: At_Drought_P Parameter: Treatment Value: Drought vs. No Drought
  misc_feature: MA Experiment ID: 20000436 Result: Down-regulated in Transcription
  misc_feature: MA Experiment 20000436 PARAMETER Experiment Name: At_Drought_P Parameter: Age (day) Value: 7
  misc_feature: MA Experiment 20000436 PARAMETER Experiment Name: At_Drought_P Parameter: Organism Value: A. thaliana
  misc_feature: MA Experiment 20000436 PARAMETER Experiment Name: At_Drought_P Parameter: Plant Line Value: WS
  misc_feature: MA Experiment 20000436 PARAMETER Experiment Name: At_Drought_P Parameter: Timepoint (hr) Value: 12
  misc_feature: MA Experiment 20000436 PARAMETER Experiment Name: At_Drought_P Parameter: Tissue Value: Whole Plant
  misc_feature: MA Experiment 20000436 PARAMETER Experiment Name: At_Drought_P Parameter: Treatment Value: Drought vs. No Drought
  misc_feature: MA Experiment ID: 20000437 Result: Down-regulated in Transcription
  misc_feature: MA Experiment 20000437 PARAMETER Experiment Name: At_Drought_P Parameter: Age (day) Value: 8
  misc_feature: MA Experiment 20000437 PARAMETER Experiment Name: At_Drought_P Parameter: Organism Value: A. thaliana
  misc_feature: MA Experiment 20000437 PARAMETER Experiment Name: At_Drought_P Parameter: Plant Line Value: WS
  misc_feature: MA Experiment 20000437 PARAMETER Experiment Name: At_Drought_P Parameter: Timepoint (hr) Value: 24
  misc_feature: MA Experiment 20000437 PARAMETER Experiment Name: At_Drought_P Parameter: Tissue Value: Whole Plant
  misc_feature: MA Experiment 20000437 PARAMETER Experiment Name: At_Drought_P Parameter: Treatment Value: Drought vs. No Drought
  misc_feature: MA Experiment ID: 20000438 Result: Up-regulated in Transcription
  misc_feature: MA Experiment 20000438 PARAMETER Experiment Name: At_Shoots__P Parameter: Age (day) Value: 14
  misc_feature: MA Experiment 20000438 PARAMETER Experiment Name: At_Shoots__P Parameter: Tissue Value: Shoots vs. Whole Plant
  misc_feature: MA Experiment ID: 20000441 Result: Up-regulated in Transcription
  misc_feature: MA Experiment 20000441 PARAMETER Experiment Name: At_1uM_BR-BRZ__P Parameter: Tissue Value: Shoot Apices
  misc_feature: MA Experiment 20000441 PARAMETER Experiment Name: At_1uM_BR-BRZ__P Parameter: Treatment Value: 1uM BR vs. No Treatment
  misc_feature: MA Experiment ID: 20000443 Result: Up-regulated in Transcription
  misc_feature: MA Experiment 20000443 PARAMETER Experiment Name: At_1uM_BR-BRZ__P Parameter: Tissue Value: Shoot Apices
  misc_feature: MA Experiment 20000443 PARAMETER Experiment Name: At_1uM_BR-BRZ__P Parameter: Treatment Value: 1uM BRZ vs. No Treatment
  misc_feature: MA Experiment ID: 20000496 Result: Down-regulated in Transcription
  misc_feature: MA Experiment 20000496 PARAMETER Experiment Name: At_Guard_Cells_P Parameter: Harvest Date Value: 7/19/2002
  misc_feature: MA Experiment 20000496 PARAMETER Experiment Name: At_Guard_Cells_P Parameter: Organism Value: Canola
  misc_feature: MA Experiment 20000496 PARAMETER Experiment Name: At_Guard_Cells_P Parameter: Tissue Value: Guard Cells vs. Leaves
  misc_feature: MA Experiment ID: 20000794 Result: Up-regulated in Transcription
  misc_feature: MA Experiment 20000794 PARAMETER Experiment Name: At_Petals_P Parameter: Age (day) Value: 23-25 days
  misc_feature: MA Experiment 20000794 PARAMETER Experiment Name: At_Petals_P Parameter: Plant Line Value: WS
  misc_feature: MA Experiment 20000794 PARAMETER Experiment Name: At_Petals_P Parameter: Tissue Value: Petals vs. Whole plant
  misc_feature: MA Experiment ID: 20001451 Result: Down-regulated in Transcription
  misc_feature: MA Experiment 20001451 PARAMETER Experiment Name: At_Far-red-induction_P Parameter: Age (day) Value: 7
  misc_feature: MA Experiment 20001451 PARAMETER Experiment Name: At_Far-red-induction_P Parameter: Light Value: Far-red vs. White
  misc_feature: MA Experiment 20001451 PARAMETER Experiment Name: At_Far-red-induction_P Parameter: Organism Value: A. thaliana
  misc_feature: MA Experiment 20001451 PARAMETER Experiment Name: At_Far-red-induction_P Parameter: Plant Line Value: Columbia
  misc_feature: MA Experiment 20001451 PARAMETER Experiment Name: At_Far-red-induction_P Parameter: Timepoint (hr) Value: 24
  misc_feature: MA Experiment 20001451 PARAMETER Experiment Name: At_Far-red-induction_P Parameter: Tissue Value: Whole Plant
  misc_feature: MA Experiment ID: 20001554 Result: Down-regulated in Transcription
  misc_feature: MA Experiment 20001554 PARAMETER Experiment Name: At_Drought_Soil_Dry_P Parameter: Age (day) Value: 21
  misc_feature: MA Experiment 20001554 PARAMETER Experiment Name: At_Drought_Soil_Dry_P Parameter: Organism Value: A. thaliana
  misc_feature: MA Experiment 20001554 PARAMETER Experiment Name: At_Drought_Soil_Dry_P Parameter: Plant Line Value: WS
  misc_feature: MA Experiment 20001554 PARAMETER Experiment Name: At_Drought_Soil_Dry_P Parameter: Post Timepoint (hr) Value: None
  misc_feature: MA Experiment 20001554 PARAMETER Experiment Name: At_Drought_Soil_Dry_P Parameter: Post-Treatment Value: None
  misc_feature: MA Experiment 20001554 PARAMETER Experiment Name: At_Drought_Soil_Dry_P Parameter: Timepoint (day) Value: 7
  misc_feature: MA Experiment 20001554 PARAMETER Experiment Name: At_Drought_Soil_Dry_P Parameter: Treatment Value: Drought vs. No Drought
  misc_feature: MA Experiment ID: 20001555 Result: Down-regulated in Transcription
  misc_feature: MA Experiment 20001555 PARAMETER Experiment Name: At_Drought_Soil_Dry_P Parameter: Age (day) Value: 24
  misc_feature: MA Experiment 20001555 PARAMETER Experiment Name: At_Drought_Soil_Dry_P Parameter: Organism Value: A. thaliana
  misc_feature: MA Experiment 20001555 PARAMETER Experiment Name: At_Drought_Soil_Dry_P Parameter: Plant Line Value: WS
  misc_feature: MA Experiment 20001555 PARAMETER Experiment Name: At_Drought_Soil_Dry_P Parameter: Post Timepoint (hr) Value: None
  misc_feature: MA Experiment 20001555 PARAMETER Experiment Name: At_Drought_Soil_Dry_P Parameter: Post-Treatment Value: None
  misc_feature: MA Experiment 20001555 PARAMETER Experiment Name: At_Drought_Soil_Dry_P Parameter: Timepoint (day) Value: 10
  misc_feature: MA Experiment 20001555 PARAMETER Experiment Name: At_Drought_Soil_Dry_P Parameter: Treatment Value: Drought vs. No Drought
  misc_feature: MA Experiment ID: 20001556 Result: Down-regulated in Transcription
  misc_feature: MA Experiment 20001556 PARAMETER Experiment Name: At_Drought_Soil_Dry_P Parameter: Age (day) Value: 26
  misc_feature: MA Experiment 20001556 PARAMETER Experiment Name: At_Drought_Soil_Dry_P Parameter: Organism Value: A. thaliana
  misc_feature: MA Experiment 20001556 PARAMETER Experiment Name: At_Drought_Soil_Dry_P Parameter: Plant Line Value: WS
  misc_feature: MA Experiment 20001556 PARAMETER Experiment Name: At_Drought_Soil_Dry_P Parameter: Post Timepoint (hr) Value: None
  misc_feature: MA Experiment 20001556 PARAMETER Experiment Name: At_Drought_Soil_Dry_P Parameter: Post-Treatment Value: None
  misc_feature: MA Experiment 20001556 PARAMETER Experiment Name: At_Drought_Soil_Dry_P Parameter: Timepoint (day) Value: 12
  misc_feature: MA Experiment 20001556 PARAMETER Experiment Name: At_Drought_Soil_Dry_P Parameter: Treatment Value: Drought vs. No Drought
  misc_feature: MA Experiment ID: 20001559 Result: Down-regulated in Transcription
  misc_feature: MA Experiment 20001559 PARAMETER Experiment Name: At_Drought_Soil_Dry_P Parameter: Age (day) Value: 28
  misc_feature: MA Experiment 20001559 PARAMETER Experiment Name: At_Drought_Soil_Dry_P Parameter: Organism Value: A. thaliana
  misc_feature: MA Experiment 20001559 PARAMETER Experiment Name: At_Drought_Soil_Dry_P Parameter: Plant Line Value: WS
  misc_feature: MA Experiment 20001559 PARAMETER Experiment Name: At_Drought_Soil_Dry_P Parameter: Post Timepoint (hr) Value: 29
  misc_feature: MA Experiment 20001559 PARAMETER Experiment Name: At_Drought_Soil_Dry_P Parameter: Post-Treatment Value: Re-Water vs. No Drought
  misc_feature: MA Experiment 20001559 PARAMETER Experiment Name: At_Drought_Soil_Dry_P Parameter: Timepoint (day) Value: 14
  misc_feature: MA Experiment 20001559 PARAMETER Experiment Name: At_Drought_Soil_Dry_P Parameter: Treatment Value: Drought vs. No Drought
  misc_feature: MA Experiment ID: 20001771 Result: Up-regulated in Transcription
  misc_feature: MA Experiment 20001771 PARAMETER Experiment Name: At_Far-red-enriched-adult_P Parameter: Age (day) Value: 28
  misc_feature: MA Experiment 20001771 PARAMETER Experiment Name: At_Far-red-enriched-adult_P Parameter: Light Value: Far-red enriched vs. White
  misc_feature: MA Experiment 20001771 PARAMETER Experiment Name: At_Far-red-enriched-adult_P Parameter: Organism Value: A. thaliana
  misc_feature: MA Experiment 20001771 PARAMETER Experiment Name: At_Far-red-enriched-adult_P Parameter: Plant Line Value: Columbia
  misc_feature: MA Experiment 20001771 PARAMETER Experiment Name: At_Far-red-enriched-adult_P Parameter: Timepoint (hr) Value: 16
  misc_feature: MA Experiment 20001771 PARAMETER Experiment Name: At_Far-red-enriched-adult_P Parameter: Tissue Value: Aerial
  misc_feature: MA Experiment ID: 20001905 Result: Up-regulated in Transcription
  misc_feature: MA Experiment 20001905 PARAMETER Experiment Name: At_Drought_Reproduction_P Parameter: Age (day) Value: 40
  misc_feature: MA Experiment 20001905 PARAMETER Experiment Name: At_Drought_Reproduction_P Parameter: Organism Value: A. thaliana
  misc_feature: MA Experiment 20001905 PARAMETER Experiment Name: At_Drought_Reproduction_P Parameter: Plant Line Value: WS
  misc_feature: MA Experiment 20001905 PARAMETER Experiment Name: At_Drought_Reproduction_P Parameter: Timepoint (day) Value: 10
  misc_feature: MA Experiment 20001905 PARAMETER Experiment Name: At_Drought_Reproduction_P Parameter: Tissue Value: Rosettes
  misc_feature: MA Experiment 20001905 PARAMETER Experiment Name: At_Drought_Reproduction_P Parameter: Treatment Value: Drought vs. No Drought
  misc_feature: MA Experiment ID: 20001911 Result: Down-regulated in Transcription
  misc_feature: MA Experiment 20001911 PARAMETER Experiment Name: At_Drought_Reproduction_P Parameter: Age (day) Value: 40
  misc_feature: MA Experiment 20001911 PARAMETER Experiment Name: At_Drought_Reproduction_P Parameter: Organism Value: A. thaliana
  misc_feature: MA Experiment 20001911 PARAMETER Experiment Name: At_Drought_Reproduction_P Parameter: Plant Line Value: WS
  misc_feature: MA Experiment 20001911 PARAMETER Experiment Name: At_Drought_Reproduction_P Parameter: Timepoint (day) Value: 10
  misc_feature: MA Experiment 20001911 PARAMETER Experiment Name: At_Drought_Reproduction_P Parameter: Tissue Value: Flowers
  misc_feature: MA Experiment 20001911 PARAMETER Experiment Name: At_Drought_Reproduction_P Parameter: Treatment Value: Drought vs. No Drought

SEQ ID NO: 35786 - protein, 148 aa, Arabidopsis thaliana; identical to SEQ ID NO: 20490
  peptide (1)..(148): Ceres Seq. ID no. 12562216
  misc_feature (1)..(84): Pfam Name: 2OG-Fe(II) oxygenase superfamily Pfam Description: 2OG-Fe(II) oxygenase superfamily
  misc_feature (1)..(84): Pfam Name: 2OG-Fe(II) oxygenase superfamily Pfam Description: 2OG-Fe(II) oxygenase superfamily
  misc_feature (1)..(143): Homolog of NCBI NO: 1813891 NR Description: 1-aminocyclopropane-1-carboxylate oxidase [Betula
  misc_feature (1)..(143): Homolog of NCBI NO: 584711 NR Description: 1-aminocyclopropane-1-carboxylate oxidase 3 (ACC
  misc_feature (1)..(143): Homolog of NCBI NO: 18496053 NR Description: ACC oxidase 1 [Fagus sylvatica]
  misc_feature (1)..(148): Homolog of NCBI NO: 14148975 NR Description: ACC oxidase [Brassica rapa subsp. rapa]
  misc_feature (1)..(148): Homolog of NCBI NO: 7433194 NR Description: probable 1-aminocyclopropane-1-carboxylate
  misc_feature (1)..(143): Homolog of NCBI NO: 1813891 NR Description: 1-aminocyclopropane-1-carboxylate oxidase [Betula
  misc_feature (1)..(143): Homolog of NCBI NO: 18496053 NR Description: ACC oxidase 1 [Fagus sylvatica]
  misc_feature (1)..(148): Homolog of NCBI NO: 7433194 NR Description: probable 1-aminocyclopropane-1-carboxylate
  misc_feature (1)..(148): Homolog of NCBI NO: 587086 NR Description: ACC oxidase [Brassica oleracea]
  misc_feature (1)..(148): Homolog of NCBI NO: 728780 NR Description: 1-aminocyclopropane-1-carboxylate oxidase (ACC
  misc_feature (1)..(148): Homolog of NCBI NO: 7638440 NR Description: 1-aminocyclopropane-1-carboxylate oxidase
  misc_feature (1)..(148): Homolog of NCBI NO: 7433206 NR Description: probable 1-aminocyclopropane-1-carboxylate
  misc_feature (1)..(148): Homolog of NCBI NO: 15221170 NR Description: putative amino-cyclopropane-carboxylic acid
  misc_feature (1)..(148): Homolog of NCBI NO: 14148975 NR Description: ACC oxidase [Brassica rapa subsp. rapa]
  misc_feature (1)..(143): Homolog of NCBI NO: 584711 NR Description: 1-aminocyclopropane-1-carboxylate oxidase 3 (ACC
  misc_feature (1)..(148): Homolog of NCBI NO: 15221170 NR Description: putative amino-cyclopropane-carboxylic acid
  misc_feature (1)..(148): Homolog of NCBI NO: 7433206 NR Description: probable 1-aminocyclopropane-1-carboxylate
  misc_feature (1)..(148): Homolog of NCBI NO: 7638440 NR Description: 1-aminocyclopropane-1-carboxylate oxidase
  misc_feature (1)..(148): Homolog of NCBI NO: 728780 NR Description: 1-aminocyclopropane-1-carboxylate oxidase (ACC
  misc_feature (1)..(148): Homolog of NCBI NO: 587086 NR Description: ACC oxidase [Brassica oleracea]

SEQ ID NO: 35787 - protein, 148 aa, Arabidopsis thaliana; identical to SEQ ID NO: 20491
  peptide (1)..(148): Ceres Seq. ID no. 12562217
  misc_feature (7)..(148): Homolog of NCBI NO: 1813891 NR Description: 1-aminocyclopropane-1-carboxylate oxidase [Betula
  misc_feature (7)..(148): Homolog of NCBI NO: 584711 NR Description: 1-aminocyclopropane-1-carboxylate oxidase 3 (ACC
  misc_feature (7)..(148): Homolog of NCBI NO: 18496053 NR Description: ACC oxidase 1 [Fagus sylvatica]
  misc_feature (1)..(148): Homolog of NCBI NO: 14148975 NR Description: ACC oxidase [Brassica rapa subsp. rapa]
  misc_feature (1)..(148): Homolog of NCBI NO: 7433194 NR Description: probable 1-aminocyclopropane-1-carboxylate
  misc_feature (1)..(146): Homolog of NCBI NO: 15221170 NR Description: putative amino-cyclopropane-carboxylic acid
  misc_feature (1)..(148): Homolog of NCBI NO: 7433206 NR Description: probable 1-aminocyclopropane-1-carboxylate
  misc_feature (1)..(148): Homolog of NCBI NO: 7638440 NR Description: 1-aminocyclopropane-1-carboxylate oxidase
  misc_feature (1)..(148): Homolog of NCBI NO: 728780 NR Description: 1-aminocyclopropane-1-carboxylate oxidase (ACC
  misc_feature (1)..(148): Homolog of NCBI NO: 587086 NR Description: ACC oxidase [Brassica oleracea]
  misc_feature (1)..(148): Homolog of NCBI NO: 7433206 NR Description: probable 1-aminocyclopropane-1-carboxylate
  misc_feature (1)..(148): Homolog of NCBI NO: 7638440 NR Description: 1-aminocyclopropane-1-carboxylate oxidase
  misc_feature (1)..(148): Homolog of NCBI NO: 728780 NR Description: 1-aminocyclopropane-1-carboxylate oxidase (ACC
  misc_feature (1)..(148): Homolog of NCBI NO: 587086 NR Description: ACC oxidase [Brassica oleracea]
  misc_feature (7)..(148): Homolog of NCBI NO: 1813891 NR Description: 1-aminocyclopropane-1-carboxylate oxidase [Betula
  misc_feature (7)..(148): Homolog of NCBI NO: 584711 NR Description: 1-aminocyclopropane-1-carboxylate oxidase 3 (ACC
  misc_feature (7)..(148): Homolog of NCBI NO: 18496053 NR Description: ACC oxidase 1 [Fagus sylvatica]
  misc_feature (1)..(148): Homolog of NCBI NO: 14148975 NR Description: ACC oxidase [Brassica rapa subsp. rapa]
  misc_feature (1)..(148): Homolog of NCBI NO: 7433194 NR Description: probable 1-aminocyclopropane-1-carboxylate
  misc_feature (1)..(146): Homolog of NCBI NO: 15221170 NR Description: putative amino-cyclopropane-carboxylic acid

SEQ ID NO: 35788 - protein, 144 aa, Arabidopsis thaliana; identical to SEQ ID NO: 20492
  peptide (1)..(144): Ceres Seq. ID no. 12562218
  misc_feature (3)..(144): Homolog of NCBI NO: 1813891 NR Description: 1-aminocyclopropane-1-carboxylate oxidase [Betula
  misc_feature (3)..(144): Homolog of NCBI NO: 584711 NR Description: 1-aminocyclopropane-1-carboxylate oxidase 3 (ACC
  misc_feature (3)..(144): Homolog of NCBI NO: 18496053 NR Description: ACC oxidase 1 [Fagus sylvatica]
  misc_feature (1)..(144): Homolog of NCBI NO: 14148975 NR Description: ACC oxidase [Brassica rapa subsp. rapa]
  misc_feature (1)..(144): Homolog of NCBI NO: 7433194 NR Description: probable 1-aminocyclopropane-1-carboxylate
  misc_feature (1)..(142): Homolog of NCBI NO: 15221170 NR Description: putative amino-cyclopropane-carboxylic acid
  misc_feature (1)..(144): Homolog of NCBI NO: 7433206 NR Description: probable 1-aminocyclopropane-1-carboxylate
  misc_feature (1)..(144): Homolog of NCBI NO: 7638440 NR Description: 1-aminocyclopropane-1-carboxylate oxidase
  misc_feature (1)..(144): Homolog of NCBI NO: 728780 NR Description: 1-aminocyclopropane-1-carboxylate oxidase (ACC
  misc_feature (1)..(144): Homolog of NCBI NO: 587086 NR Description: ACC oxidase [Brassica oleracea]
  misc_feature (3)..(144): Homolog of NCBI NO: 1813891 NR Description: 1-aminocyclopropane-1-carboxylate oxidase [Betula
  misc_feature (3)..(144): Homolog of NCBI NO: 584711 NR Description: 1-aminocyclopropane-1-carboxylate oxidase 3 (ACC
  misc_feature (3)..(144): Homolog of NCBI NO: 18496053 NR Description: ACC oxidase 1 [Fagus sylvatica]
  misc_feature (1)..(144): Homolog of NCBI NO: 14148975 NR Description: ACC oxidase [Brassica rapa subsp. rapa]
  misc_feature (1)..(144): Homolog of NCBI NO: 7433194 NR Description: probable 1-aminocyclopropane-1-carboxylate
  misc_feature (1)..(142): Homolog of NCBI NO: 15221170 NR Description: putative amino-cyclopropane-carboxylic acid
  misc_feature (1)..(144): Homolog of NCBI NO: 7433206 NR Description: probable 1-aminocyclopropane-1-carboxylate
  misc_feature (1)..(144): Homolog of NCBI NO: 7638440 NR Description: 1-aminocyclopropane-1-carboxylate oxidase
  misc_feature (1)..(144): Homolog of NCBI NO: 728780 NR Description: 1-aminocyclopropane-1-carboxylate oxidase (ACC
  misc_feature (1)..(144): Homolog of NCBI NO: 587086 NR Description: ACC oxidase [Brassica oleracea]

SEQ ID NO: 35789 - DNA, 611 bp, Arabidopsis thaliana
  misc_feature (1)..(611): Ceres Seq. ID no. 12332262
  misc_feature: MA Experiment ID: 108434 Result: Up-regulated in Transcription
  misc_feature: MA Experiment 108434 PARAMETER Experiment Name: At_Root_Tips_cDNA_P Parameter: Tissue Value: Root Tips
  misc_feature: MA Experiment ID: 108461 Result: Down-regulated in Transcription
  misc_feature: MA Experiment 108461 PARAMETER Experiment Name: At_Germinating_Seeds_cDNA_P Parameter: Age (day) Value: 1 vs. 0
  misc_feature: MA Experiment 108461 PARAMETER Experiment Name: At_Germinating_Seeds_cDNA_P Parameter: Tissue Value: Germinating Seeds
  misc_feature: MA Experiment ID: 108462 Result: Down-regulated in Transcription
  misc_feature: MA Experiment 108462 PARAMETER Experiment Name: At_Germinating_Seeds_cDNA_P Parameter: Age (day) Value: 2 vs. 0
  misc_feature: MA Experiment 108462 PARAMETER Experiment Name: At_Germinating_Seeds_cDNA_P Parameter: Tissue Value: Germinating Seeds
  misc_feature: MA Experiment ID: 108463 Result: Down-regulated in Transcription
  misc_feature: MA Experiment 108463 PARAMETER Experiment Name: At_Germinating_Seeds_cDNA_P Parameter: Age (day) Value: 3 vs. 0
  misc_feature: MA Experiment 108463 PARAMETER Experiment Name: At_Germinating_Seeds_cDNA_P Parameter: Tissue Value: Germinating Seeds
  misc_feature: MA Experiment ID: 108464 Result: Down-regulated in Transcription
  misc_feature: MA Experiment 108464 PARAMETER Experiment Name: At_Germinating_Seeds_cDNA_P Parameter: Age (day) Value: 4 vs. 0
  misc_feature: MA Experiment 108464 PARAMETER Experiment Name: At_Germinating_Seeds_cDNA_P Parameter: Tissue Value: Germinating Seeds
  misc_feature: MA Experiment ID: 108573 Result: Down-regulated in Transcription
  misc_feature: MA Experiment 108573 PARAMETER Experiment Name: At_Drought_cDNA_P Parameter: Timepoint (hr) Value: 6
  misc_feature: MA Experiment 108573 PARAMETER Experiment Name: At_Drought_cDNA_P Parameter: Tissue Value: Aerial
  misc_feature: MA Experiment 108573 PARAMETER Experiment Name: At_Drought_cDNA_P Parameter: Treatment Value: Drought vs. No Drought
  misc_feature: MA Experiment ID: 20000234 Result: Up-regulated in Transcription
  misc_feature: MA Experiment 20000234 PARAMETER Experiment Name: At_Siliques_P Parameter: Age (day) Value: 21
  misc_feature: MA Experiment 20000234 PARAMETER Experiment Name: At_Siliques_P Parameter: Organism Value: A. thaliana
  misc_feature: MA Experiment 20000234 PARAMETER Experiment Name: At_Siliques_P Parameter: Plant Line Value: WS
  misc_feature: MA Experiment 20000234 PARAMETER Experiment Name: At_Siliques_P Parameter: Tissue Value: Less Than 5mm Siliques vs. Whole Plant
  misc_feature: MA Experiment ID: 20000264 Result: Up-regulated in Transcription
  misc_feature: MA Experiment 20000264 PARAMETER Experiment Name: At_Open_Flower_P Parameter: Age (day) Value: 21
  misc_feature: MA Experiment 20000264 PARAMETER Experiment Name: At_Open_Flower_P Parameter: Plant Line Value: WS
  misc_feature: MA Experiment 20000264 PARAMETER Experiment Name: At_Open_Flower_P Parameter: Tissue Value: Open Flower vs. Whole Plant
  misc_feature: MA Experiment ID: 20000265 Result: Up-regulated in Transcription
  misc_feature: MA Experiment 20000265 PARAMETER Experiment Name: At_Open_Flower_P Parameter: Age (day) Value: 21
  misc_feature: MA Experiment 20000265 PARAMETER Experiment Name: At_Open_Flower_P Parameter: Plant Line Value: WS
  misc_feature: MA Experiment 20000265 PARAMETER Experiment Name: At_Open_Flower_P Parameter: Tissue Value: Closed Flower vs. Whole Plant
  misc_feature: MA Experiment ID: 20001247 Result: Down-regulated in Transcription
  misc_feature: MA Experiment 20001247 PARAMETER Experiment Name: At_Far-red-induction_P Parameter: Age (day) Value: 7
  misc_feature: MA Experiment 20001247 PARAMETER Experiment Name: At_Far-red-induction_P Parameter: Light Value: Far-red vs. White
  misc_feature: MA Experiment 20001247 PARAMETER Experiment Name: At_Far-red-induction_P Parameter: Organism Value: A. thaliana
  misc_feature: MA Experiment 20001247 PARAMETER Experiment Name: At_Far-red-induction_P Parameter: Plant Line Value: Columbia
  misc_feature: MA Experiment 20001247 PARAMETER Experiment Name: At_Far-red-induction_P Parameter: Timepoint (hr) Value: 1
  misc_feature: MA Experiment 20001247 PARAMETER Experiment Name: At_Far-red-induction_P Parameter: Tissue Value: Whole Plant
  misc_feature: MA Experiment ID: 20001557 Result: Up-regulated in Transcription
  misc_feature: MA Experiment 20001557 PARAMETER Experiment Name: At_Drought_Soil_Dry_P Parameter: Age (day) Value: 27
  misc_feature: MA Experiment 20001557 PARAMETER Experiment Name: At_Drought_Soil_Dry_P Parameter: Organism Value: A. thaliana
  misc_feature: MA Experiment 20001557 PARAMETER Experiment Name: At_Drought_Soil_Dry_P Parameter: Plant Line Value: WS
  misc_feature: MA Experiment 20001557 PARAMETER Experiment Name: At_Drought_Soil_Dry_P Parameter: Post Timepoint (hr) Value: 3
  misc_feature: MA Experiment 20001557 PARAMETER Experiment Name: At_Drought_Soil_Dry_P Parameter: Post-Treatment Value: Re-Water vs. No Drought
  misc_feature: MA Experiment 20001557 PARAMETER Experiment Name: At_Drought_Soil_Dry_P Parameter: Timepoint (day) Value: 13
  misc_feature: MA Experiment 20001557 PARAMETER Experiment Name: At_Drought_Soil_Dry_P Parameter: Treatment Value: Drought vs. No Drought
  misc_feature: MA Experiment ID: 20001558 Result: Up-regulated in Transcription
  misc_feature: MA Experiment 20001558 PARAMETER Experiment Name: At_Drought_Soil_Dry_P Parameter: Age (day) Value: 27
  misc_feature: MA Experiment 20001558 PARAMETER Experiment Name: At_Drought_Soil_Dry_P Parameter: Organism Value: A. thaliana
  misc_feature: MA Experiment 20001558 PARAMETER Experiment Name: At_Drought_Soil_Dry_P Parameter: Plant Line Value: WS
  misc_feature: MA Experiment 20001558 PARAMETER Experiment Name: At_Drought_Soil_Dry_P Parameter: Post Timepoint (hr) Value: 6
  misc_feature: MA Experiment 20001558 PARAMETER Experiment Name: At_Drought_Soil_Dry_P Parameter: Post-Treatment Value: Re-Water vs. No Drought
  misc_feature: MA Experiment 20001558 PARAMETER Experiment Name: At_Drought_Soil_Dry_P Parameter: Timepoint (day) Value: 13
  misc_feature: MA Experiment 20001558 PARAMETER Experiment Name: At_Drought_Soil_Dry_P Parameter: Treatment Value: Drought vs. No Drought
  misc_feature: MA Experiment ID: 20001560 Result: Up-regulated in Transcription
  misc_feature: MA Experiment 20001560 PARAMETER Experiment Name: At_Drought_Soil_Dry_P Parameter: Age (day) Value: 28
  misc_feature: MA Experiment 20001560 PARAMETER Experiment Name: At_Drought_Soil_Dry_P Parameter: Organism Value: A. thaliana
  misc_feature: MA Experiment 20001560 PARAMETER Experiment Name: At_Drought_Soil_Dry_P Parameter: Plant Line Value: WS
  misc_feature: MA Experiment 20001560 PARAMETER Experiment Name: At_Drought_Soil_Dry_P Parameter: Post Timepoint (hr) Value: None
  misc_feature: MA Experiment 20001560 PARAMETER Experiment Name: At_Drought_Soil_Dry_P Parameter: Post-Treatment Value: None
  misc_feature: MA Experiment 20001560 PARAMETER Experiment Name: At_Drought_Soil_Dry_P Parameter: Timepoint (day) Value: 14
  misc_feature: MA Experiment 20001560 PARAMETER Experiment Name: At_Drought_Soil_Dry_P Parameter: Treatment Value: Drought vs. No Drought
  misc_feature: MA Experiment ID: 20001757 Result: Up-regulated in Transcription
  misc_feature: MA Experiment 20001757 PARAMETER Experiment Name: At_50mM_NH4NO3_L-to-H_P Parameter: Timepoint (hr) Value: 6
  misc_feature: MA Experiment 20001757 PARAMETER Experiment Name: At_50mM_NH4NO3_L-to-H_P Parameter: Tissue Value: Leaf
  misc_feature: MA Experiment 20001757 PARAMETER Experiment Name: At_50mM_NH4NO3_L-to-H_P Parameter: Treatment Value: 50mM NH4NO3 vs 100mM Mannitol
agctaaaaccctaaagccctaaaatcaaaattacgctaaacagagaaggcgacaatggatcacatcgctgcggcggaagagcaaatcgtatcggagagacttcgaagaaagcttgaagaagttaatgtagctgctcagactcagctttctcctatccaagatcacatcaatttcacccttcagcaagcttatttcaaatgtgcatatgagtgctttgacagaagaagaaagcaagaggagataagtaactgcgtcgagcactgcagtgttcccgttgtcaaatctcaacagtatttcgagaacgaaatggctcagtttcaggaaagattgaacagatcactggtggtgtgtcaagacaagtttgaggcctcaaagctccagaagataaggcctgaagcggttaacgagatggagagttgtgtgcacaaatccattgaggaaaatctcaatacattaccacatattgtgcagagaatgaagacagcatttaacataaccaactaaaagctctcgtgaaaaaccttggattccagaacttgactagccatattgtttgaaaagaccttttcttttgtcttaatatgatctataaatttgttttcctttttctt

SEQ ID NO: 35790 - protein, 149 aa, Arabidopsis thaliana
  peptide (1)..(149): Ceres Seq. ID no. 12332263
  misc_feature (15)..(145): Pfam Name: Eukaryotic protein of unknown function (DUF842) Pfam Description: Eukaryotic protein of unknown function (DUF842)
  misc_feature (23)..(146): Homolog of NCBI NO: 28482029 NR Description: similar to RIKEN cDNA 2010309E21 [Mus musculus]
  misc_feature (42)..(146): Homolog of NCBI NO: 15489002 NR Description: Unknown (protein for IMAGE:3493774) [Mus musculus]
  misc_feature (42)..(146): Homolog of NCBI NO: 13385042 NR Description: RIKEN cDNA 2010309E21 [Mus musculus]
  misc_feature (19)..(144): Homolog of NCBI NO: 14249520 NR Description: hypothetical protein FLJ14668 [Homo sapiens]
  misc_feature (19)..(144): Homolog of NCBI NO: 15929034 NR Description: hypothetical protein FLJ14668 [Homo sapiens]
  misc_feature (35)..(146): Homolog of NCBI NO: 37589716 NR Description: Unknown (protein for MGC:73247) [Danio rerio]
  misc_feature (1)..(124): Homolog of NCBI NO: 15221247 NR Description: hypothetical protein; protein id: At1g05740.1
  misc_feature (7)..(149): Homolog of NCBI NO: 15224344 NR Description: hypothetical protein
  misc_feature (1)..(149): Homolog of NCBI NO: 15221245 NR Description: hypothetical Protein; protein id: At1g05730.1
  misc_feature (1)..(149): Homolog of NCBI NO: 18402744 NR Description: expressed protein
MDHIAAAEEQIVSERLRRKLEEVNVAAQTQLSPIQDHINFTLQQAYFKCAYECFDRRRKQEEISNCVEHCSVPVVKSQQYFENEMAQFQERLNRSLVVCQDKFEASKLQKIRPEAVNEMESCVHKSIEENLNTLPHIVQRMKTAFNITN

SEQ ID NO: 35791 - DNA, 756 bp, Arabidopsis thaliana
  misc_feature (1)..(756): Ceres Seq. ID no. 13499510
  misc_feature: MA Experiment ID: 20000111 Result: Up-regulated in Transcription
  misc_feature: MA Experiment 20000111 PARAMETER Experiment Name: At_42deg_Heat_cDNA_P Parameter: Temperature (deg C) Value: 42 vs. 22
  misc_feature: MA Experiment 20000111 PARAMETER Experiment Name: At_42deg_Heat_cDNA_P Parameter: Timepoint (hr) Value: 6
  misc_feature: MA Experiment 20000111 PARAMETER Experiment Name: At_42deg_Heat_cDNA_P Parameter: Tissue Value: Aerial
  misc_feature: MA Experiment ID: 20000113 Result: Up-regulated in Transcription
  misc_feature: MA Experiment 20000113 PARAMETER Experiment Name: At_42deg_Heat_cDNA_P Parameter: Temperature (deg C) Value: 42 vs. 22
  misc_feature: MA Experiment 20000113 PARAMETER Experiment Name: At_42deg_Heat_cDNA_P Parameter: Timepoint (hr) Value: 8
  misc_feature: MA Experiment 20000113 PARAMETER Experiment Name: At_42deg_Heat_cDNA_P Parameter: Tissue Value: Aerial
  misc_feature: MA Experiment ID: 20000173 Result: Up-regulated in Transcription
  misc_feature: MA Experiment 20000173 PARAMETER Experiment Name: At_42deg_Heat_P Parameter: Age (day) Value: 14
  misc_feature: MA Experiment 20000173 PARAMETER Experiment Name: At_42deg_Heat_P Parameter: Organism Value: A. thaliana
  misc_feature: MA Experiment 20000173 PARAMETER Experiment Name: At_42deg_Heat_P Parameter: Plant Line Value: WS
  misc_feature: MA Experiment 20000173 PARAMETER Experiment Name: At_42deg_Heat_P Parameter: Temperature (deg C) Value: 42 vs. 22
  misc_feature: MA Experiment 20000173 PARAMETER Experiment Name: At_42deg_Heat_P Parameter: Timepoint (hr) Value: 6
  misc_feature: MA Experiment 20000173 PARAMETER Experiment Name: At_42deg_Heat_P Parameter: Tissue Value: Aerial
  misc_feature: MA Experiment ID: 20000227 Result: Down-regulated in Transcription
  misc_feature: MA Experiment 20000227 PARAMETER Experiment Name: At_Root-Tips-vs-Tops_P Parameter: Tissue Value: Root Tips vs. Root Tops
  misc_feature: MA Experiment ID: 20000234 Result: Down-regulated in Transcription
  misc_feature: MA Experiment 20000234 PARAMETER Experiment Name: At_Siliques_P Parameter: Age (day) Value: 21
  misc_feature: MA Experiment 20000234 PARAMETER Experiment Name: At_Siliques_P Parameter: Organism Value: A. thaliana
  misc_feature: MA Experiment 20000234 PARAMETER Experiment Name: At_Siliques_P Parameter: Plant Line Value: WS
  misc_feature: MA Experiment 20000234 PARAMETER Experiment Name: At_Siliques_P Parameter: Tissue Value: Less Than 5mm Siliques vs. Whole Plant
  misc_feature: MA Experiment ID: 20000264 Result: Down-regulated in Transcription
  misc_feature: MA Experiment 20000264 PARAMETER Experiment Name: At_Open_Flower_P Parameter: Age (day) Value: 21
  misc_feature: MA Experiment 20000264 PARAMETER Experiment Name: At_Open_Flower_P Parameter: Plant Line Value: WS
  misc_feature: MA Experiment 20000264 PARAMETER Experiment Name: At_Open_Flower_P Parameter: Tissue Value: Open Flower vs. Whole Plant
  misc_feature: MA Experiment ID: 20000265 Result: Down-regulated in Transcription
  misc_feature: MA Experiment 20000265 PARAMETER Experiment Name: At_Open_Flower_P Parameter: Age (day) Value: 21
  misc_feature: MA Experiment 20000265 PARAMETER Experiment Name: At_Open_Flower_P Parameter: Plant Line Value: WS
  misc_feature: MA Experiment 20000265 PARAMETER Experiment Name: At_Open_Flower_P Parameter: Tissue Value: Closed Flower vs. Whole Plant
  misc_feature: MA Experiment ID: 20000495 Result: Down-regulated in Transcription
  misc_feature: MA Experiment 20000495 PARAMETER Experiment Name: At_Guard_Cells_P Parameter: Harvest Date Value: 8/2/2002
  misc_feature: MA Experiment 20000495 PARAMETER Experiment Name: At_Guard_Cells_P Parameter: Organism Value: A. thaliana
  misc_feature: MA Experiment 20000495 PARAMETER Experiment Name: At_Guard_Cells_P Parameter: Tissue Value: Guard Cells vs. Leaves
  misc_feature: MA Experiment ID: 20000496 Result: Down-regulated in Transcription
  misc_feature: MA Experiment 20000496 PARAMETER Experiment Name: At_Guard_Cells_P Parameter: Harvest Date Value: 7/19/2002
  misc_feature: MA Experiment 20000496 PARAMETER Experiment Name: At_Guard_Cells_P Parameter: Organism Value: Canola
  misc_feature: MA Experiment 20000496 PARAMETER Experiment Name: At_Guard_Cells_P Parameter: Tissue Value: Guard Cells vs. Leaves
  misc_feature: MA Experiment ID: 20000794 Result: Down-regulated in Transcription
  misc_feature: MA Experiment 20000794 PARAMETER Experiment Name: At_Petals_P Parameter: Age (day) Value: 23-25 days
  misc_feature: MA Experiment 20000794 PARAMETER Experiment Name: At_Petals_P Parameter: Plant Line Value: WS
  misc_feature: MA Experiment 20000794 PARAMETER Experiment Name: At_Petals_P Parameter: Tissue Value: Petals vs. Whole plant
  misc_feature: MA Experiment ID: 20001560 Result: Down-regulated in Transcription
  misc_feature: MA Experiment 20001560 PARAMETER Experiment Name: At_Drought_Soil_Dry_P Parameter: Age (day) Value: 28
  misc_feature: MA Experiment 20001560 PARAMETER Experiment Name: At_Drought_Soil_Dry_P Parameter: Organism Value: A. thaliana
  misc_feature: MA Experiment 20001560 PARAMETER Experiment Name: At_Drought_Soil_Dry_P Parameter: Plant Line Value: WS
  misc_feature: MA Experiment 20001560 PARAMETER Experiment Name: At_Drought_Soil_Dry_P Parameter: Post Timepoint (hr) Value: None
  misc_feature: MA Experiment 20001560 PARAMETER Experiment Name: At_Drought_Soil_Dry_P Parameter: Post-Treatment Value: None
  misc_feature: MA Experiment 20001560 PARAMETER Experiment Name: At_Drought_Soil_Dry_P Parameter: Timepoint (day) Value: 14
  misc_feature: MA Experiment 20001560 PARAMETER Experiment Name: At_Drought_Soil_Dry_P Parameter: Treatment Value: Drought vs. No Drought
ctttcccctaagtcttggttcttcttctctctaatacgagaagaaaaaggcgaaaacctcgccaatccgattacgcgaaaaatcaaaggtttttggatatggcgtcgaagcggatcttgaaggaattgaaggatctccagaaggatccacctacatcatgtagcgcaggtcctgttgctgaagacatgtttcactggcaggcaacgataatgggtccttcagagagtccttatgctggaggtgttttccttgtaaccatccatttccctccggattacccattcaagcctcctaaggtggcctttaggaccaaggtgttccatcccaacattaacagcaacggtagcatttgcctcgacatcttgaaggagcagtggagtcctgcgctcaccatttccaaggtgctgctatcgatctgttctttgttaaccgatccaaacccggatgatcctttggtgcccgagatagctcacatgtacaagactgacaagaacaagtacgagtccactgcacgaagctggactcagaagtatgccatgggctaaatggaaaatcccacctactaaattatctctttatgaagaaaaaaatctgccttaatttctatgtatgattcgatagacatctctttgtgtccttttaactttctgaagacaggaccaaatgaagtgggtcttgttttaaacgaaacaaaaaaaaacatcatctttgtgaaaactagaatctgatcatcttctgttgtttcttcttgtggtg

SEQ ID NO: 35792 - protein, 148 aa, Arabidopsis thaliana; identical to SEQ ID NO: 24844
  peptide (1)..(148): Ceres Seq. ID no. 13499511
  misc_feature (1)..(148): Homolog of NCBI NO: 456568 NR Description: ubiquitin conjugating enzyme
  misc_feature (1)..(148): Homolog of NCBI NO: 19347859 NR Description: putative E2, ubiquitin-conjugating enzyme UBC9
  misc_feature (1)..(148): Homolog of NCBI NO: 18408001 NR Description: ubiquitin-conjugating enzyme [Arabidopsis
  misc_feature (1)..(148): Homolog of NCBI NO: 5762457 NR Description: ubiquitin-conjugating enzyme UBC2
  misc_feature (1)..(148): Homolog of NCBI NO: 40287554 NR Description: ubiquitin-conjugating enzyme 8 [Capsicum annuum]
  misc_feature (1)..(148): Homolog of NCBI NO: 30687803 NR Description: ubiquitin-conjugating enzyme 9 (UBC9)
  misc_feature (1)..(148): Homolog of NCBI NO: 21554343 NR Description: E2, ubiquitin-conjugating enzyme 10 (UBC10)
  misc_feature (1)..(148): Homolog of NCBI NO: 18417097 NR Description: ubiquitin-conjugating enzyme 9 (UBC9)
  misc_feature (1)..(148): Homolog of NCBI NO: 11762186 NR Description: AT4g27960 [Arabidopsis thaliana]
  misc_feature (1)..(148): Homolog of NCBI NO: 18423494 NR Description: ubiquitin-conjugating enzyme 10 (UBC10)

SEQ ID NO: 35793 - protein, 119 aa, Arabidopsis thaliana; identical to SEQ ID NO: 24845
  peptide (1)..(119): Ceres Seq. ID no. 13499512
  misc_feature (1)..(119): Homolog of NCBI NO: 456568 NR Description: ubiquitin conjugating enzyme
  misc_feature (1)..(119): Homolog of NCBI NO: 19347859 NR Description: putative E2, ubiquitin-conjugating enzyme UBC9
  misc_feature (1)..(119): Homolog of NCBI NO: 18408001 NR Description: ubiquitin-conjugating enzyme [Arabidopsis
  misc_feature (1)..(119): Homolog of NCBI NO: 5762457 NR Description: ubiquitin-conjugating enzyme UBC2
  misc_feature (1)..(119): Homolog of NCBI NO: 40287554 NR Description: ubiquitin-conjugating enzyme 8 [Capsicum annuum]
  misc_feature (1)..(119): Homolog of NCBI NO: 30687803 NR Description: ubiquitin-conjugating enzyme 9 (UBC9)
  misc_feature (1)..(119): Homolog of NCBI NO: 21554343 NR Description: E2, ubiquitin-conjugating enzyme 10 (UBC10)
  misc_feature (1)..(119): Homolog of NCBI NO: 18417097 NR Description: ubiquitin-conjugating enzyme 9 (UBC9)
  misc_feature (1)..(119): Homolog of NCBI NO: 11762186 NR Description: AT4g27960 [Arabidopsis thaliana]
  misc_feature (1)..(119): Homolog of NCBI NO: 18423494 NR Description: ubiquitin-conjugating enzyme 10 (UBC10)

SEQ ID NO: 35794 - protein, 111 aa, Arabidopsis thaliana; identical to SEQ ID NO: 24846
  peptide (1)..(111): Ceres Seq. ID no. 13499513
  misc_feature (1)..(111): Homolog of NCBI NO: 456568 NR Description: ubiquitin conjugating enzyme
  misc_feature (1)..(111): Homolog of NCBI NO: 19347859 NR Description: putative E2, ubiquitin-conjugating enzyme UBC9
  misc_feature (1)..(111): Homolog of NCBI NO: 18408001 NR Description: ubiquitin-conjugating enzyme [Arabidopsis
  misc_feature (1)..(111): Homolog of NCBI NO: 5762457 NR Description: ubiquitin-conjugating enzyme UBC2
  misc_feature (1)..(111): Homolog of NCBI NO: 40287554 NR Description: ubiquitin-conjugating enzyme 8 [Capsicum annuum]
  misc_feature (1)..(111): Homolog of NCBI NO: 30687803 NR Description: ubiquitin-conjugating enzyme 9 (UBC9)
  misc_feature (1)..(111): Homolog of NCBI NO: 21554343 NR Description: E2, ubiquitin-conjugating enzyme 10 (UBC10)
  misc_feature (1)..(111): Homolog of NCBI NO: 18417097 NR Description: ubiquitin-conjugating enzyme 9 (UBC9)
  misc_feature (1)..(111): Homolog of NCBI NO: 11762186 NR Description: AT4g27960 [Arabidopsis thaliana]
  misc_feature (1)..(111): Homolog of NCBI NO: 18423494 NR Description: ubiquitin-conjugating enzyme 10 (UBC10)

SEQ ID NO: 35795 - DNA, 979 bp, Arabidopsis thaliana
  misc_feature (1)..(979): Ceres Seq. ID no. 13493781
  misc_feature: MA Experiment ID: 108434 Result: Up-regulated in Transcription
  misc_feature: MA Experiment 108434 PARAMETER Experiment Name: At_Root_Tips_cDNA_P Parameter: Tissue Value: Root Tips
  misc_feature: MA Experiment ID: 108463 Result: Down-regulated in Transcription
  misc_feature: MA Experiment 108463 PARAMETER Experiment Name: At_Germinating_Seeds_cDNA_P Parameter: Age (day) Value: 3 vs. 0
  misc_feature: MA Experiment 108463 PARAMETER Experiment Name: At_Germinating_Seeds_cDNA_P Parameter: Tissue Value: Germinating Seeds
  misc_feature: MA Experiment ID: 108576 Result: Up-regulated in Transcription
  misc_feature: MA Experiment 108576 PARAMETER Experiment Name: At_42deg_Heat_cDNA_P Parameter: Temperature (deg C) Value: 42 vs. 22
  misc_feature: MA Experiment 108576 PARAMETER Experiment Name: At_42deg_Heat_cDNA_P Parameter: Timepoint (hr) Value: 1
  misc_feature: MA Experiment 108576 PARAMETER Experiment Name: At_42deg_Heat_cDNA_P Parameter: Tissue Value: Aerial
  misc_feature: MA Experiment ID: 108577 Result: Up-regulated in Transcription
  misc_feature: MA Experiment 108577 PARAMETER Experiment Name: At_42deg_Heat_cDNA_P Parameter: Temperature (deg C) Value: 42 vs. 22
  misc_feature: MA Experiment 108577 PARAMETER Experiment Name: At_42deg_Heat_cDNA_P Parameter: Timepoint (hr) Value: 6
  misc_feature: MA Experiment 108577 PARAMETER Experiment Name: At_42deg_Heat_cDNA_P Parameter: Tissue Value: Aerial
  misc_feature: MA Experiment ID: 20000111 Result: Up-regulated in Transcription
  misc_feature: MA Experiment 20000111 PARAMETER Experiment Name: At_42deg_Heat_cDNA_P Parameter: Temperature (deg C) Value: 42 vs. 22
  misc_feature: MA Experiment 20000111 PARAMETER Experiment Name: At_42deg_Heat_cDNA_P Parameter: Timepoint (hr) Value: 6
  misc_feature: MA Experiment 20000111 PARAMETER Experiment Name: At_42deg_Heat_cDNA_P Parameter: Tissue Value: Aerial
  misc_feature: MA Experiment ID: 20000112 Result: Up-regulated in Transcription
  misc_feature: MA Experiment 20000112 PARAMETER Experiment Name: At_42deg_Heat_cDNA_P Parameter: Temperature (deg C) Value: 42 vs. 22
  misc_feature: MA Experiment 20000112 PARAMETER Experiment Name: At_42deg_Heat_cDNA_P Parameter: Timepoint (hr) Value: 2
  misc_feature: MA Experiment 20000112 PARAMETER Experiment Name: At_42deg_Heat_cDNA_P Parameter: Tissue Value: Aerial
  misc_feature: MA Experiment ID: 20000113 Result: Up-regulated in Transcription
  misc_feature: MA Experiment 20000113 PARAMETER Experiment Name: At_42deg_Heat_cDNA_P Parameter: Temperature (deg C) Value: 42 vs. 22
  misc_feature: MA Experiment 20000113 PARAMETER Experiment Name: At_42deg_Heat_cDNA_P Parameter: Timepoint (hr) Value: 8
  misc_feature: MA Experiment 20000113 PARAMETER Experiment Name: At_42deg_Heat_cDNA_P Parameter: Tissue Value: Aerial
  misc_feature: MA Experiment ID: 20000117 Result: Down-regulated in Transcription
  misc_feature: MA Experiment 20000117 PARAMETER Experiment Name: At_100uM_ABA_Mutants_cDNA_P Parameter: Plant Line Value: Columbia
  misc_feature: MA Experiment 20000117 PARAMETER Experiment Name: At_100uM_ABA_Mutants_cDNA_P Parameter: Timepoint (hr) Value: 6
  misc_feature: MA Experiment 20000117 PARAMETER Experiment Name: At_100uM_ABA_Mutants_cDNA_P Parameter: Tissue Value: Aerial
  misc_feature: MA Experiment 20000117 PARAMETER Experiment Name: At_100uM_ABA_Mutants_cDNA_P Parameter: Treatment Value: 100uM ABA vs. No Treatment
  misc_feature: MA Experiment ID: 20000144 Result: Up-regulated in Transcription
  misc_feature: MA Experiment 20000144 PARAMETER Experiment Name: At_42deg_Heat_cDNA_P Parameter: Temperature (deg C) Value: 42 vs. 22
  misc_feature: MA Experiment 20000144 PARAMETER Experiment Name: At_42deg_Heat_cDNA_P Parameter: Timepoint (hr) Value: 1
  misc_feature: MA Experiment 20000144 PARAMETER Experiment Name: At_42deg_Heat_cDNA_P Parameter: Tissue Value: Aerial
  misc_feature: MA Experiment ID: 20000171 Result: Up-regulated in Transcription
  misc_feature: MA Experiment 20000171 PARAMETER Experiment Name: At_42deg_Heat_P Parameter: Age (day) Value: 14
  misc_feature: MA Experiment 20000171 PARAMETER Experiment Name: At_42deg_Heat_P Parameter: Organism Value: A. thaliana
  misc_feature: MA Experiment 20000171 PARAMETER Experiment Name: At_42deg_Heat_P Parameter: Plant Line Value: WS
  misc_feature: MA Experiment 20000171 PARAMETER Experiment Name: At_42deg_Heat_P Parameter: Temperature (deg C) Value: 42 vs. 22
  misc_feature: MA Experiment 20000171 PARAMETER Experiment Name: At_42deg_Heat_P Parameter: Timepoint (hr) Value: 1
  misc_feature: MA Experiment 20000171 PARAMETER Experiment Name: At_42deg_Heat_P Parameter: Tissue Value: Aerial
  misc_feature: MA Experiment ID: 20000173 Result: Up-regulated in Transcription
  misc_feature: MA Experiment 20000173 PARAMETER Experiment Name: At_42deg_Heat_P Parameter: Age (day) Value: 14
  misc_feature: MA Experiment 20000173 PARAMETER Experiment Name: At_42deg_Heat_P Parameter: Organism Value: A. thaliana
  misc_feature: MA Experiment 20000173 PARAMETER Experiment Name: At_42deg_Heat_P Parameter: Plant Line Value: WS
  misc_feature: MA Experiment 20000173 PARAMETER Experiment Name: At_42deg_Heat_P Parameter: Temperature (deg C) Value: 42 vs. 22
  misc_feature: MA Experiment 20000173 PARAMETER Experiment Name: At_42deg_Heat_P Parameter: Timepoint (hr) Value: 6
  misc_feature: MA Experiment 20000173 PARAMETER Experiment Name: At_42deg_Heat_P Parameter: Tissue Value: Aerial
  misc_feature: MA Experiment ID: 20000265 Result: Up-regulated in Transcription
  misc_feature: MA Experiment 20000265 PARAMETER Experiment Name: At_Open_Flower_P Parameter: Age (day) Value: 21
  misc_feature: MA Experiment 20000265 PARAMETER Experiment Name: At_Open_Flower_P Parameter: Plant Line Value: WS
  misc_feature: MA Experiment 20000265 PARAMETER Experiment Name: At_Open_Flower_P Parameter: Tissue Value: Closed Flower vs. Whole Plant
  misc_feature: MA Experiment ID: 20000437 Result: Down-regulated in Transcription
  misc_feature: MA Experiment 20000437 PARAMETER Experiment Name: At_Drought_P Parameter: Age (day) Value: 8
  misc_feature: MA Experiment 20000437 PARAMETER Experiment Name: At_Drought_P Parameter: Organism Value: A. thaliana
  misc_feature: MA Experiment 20000437 PARAMETER Experiment Name: At_Drought_P Parameter: Plant Line Value: WS
  misc_feature: MA Experiment 20000437 PARAMETER Experiment Name: At_Drought_P Parameter: Timepoint (hr) Value: 24
  misc_feature: MA Experiment 20000437 PARAMETER Experiment Name: At_Drought_P Parameter: Tissue Value: Whole Plant
  misc_feature: MA Experiment 20000437 PARAMETER Experiment Name: At_Drought_P Parameter: Treatment Value: Drought vs. No Drought
  misc_feature: MA Experiment ID: 20001560 Result: Up-regulated in Transcription
  misc_feature: MA Experiment 20001560 PARAMETER Experiment Name: At_Drought_Soil_Dry_P Parameter: Age (day) Value: 28
  misc_feature: MA Experiment 20001560 PARAMETER Experiment Name: At_Drought_Soil_Dry_P Parameter: Organism Value: A. thaliana
  misc_feature: MA Experiment 20001560 PARAMETER Experiment Name: At_Drought_Soil_Dry_P Parameter: Plant Line Value: WS
  misc_feature: MA Experiment 20001560 PARAMETER Experiment Name: At_Drought_Soil_Dry_P Parameter: Post Timepoint (hr) Value: None
  misc_feature: MA Experiment 20001560 PARAMETER Experiment Name: At_Drought_Soil_Dry_P Parameter: Post-Treatment Value: None
  misc_feature: MA Experiment 20001560 PARAMETER Experiment Name: At_Drought_Soil_Dry_P Parameter: Timepoint (day) Value: 14
  misc_feature: MA Experiment 20001560 PARAMETER Experiment Name: At_Drought_Soil_Dry_P Parameter: Treatment Value: Drought vs. No Drought
gaaccgtctctgaatctgaccgaccaccattcttctcgcgccggcgatttcactgtttacagagaaatctcgagaaccctaacctgggtctctctagatttctttgaaatttcgagaatctagggtttcaaactaaaatcgagtccttgagttttcccaatttaaatcgttatgagctctatcaatatcactaacgtcaccgtcttggacaatcctgctccgtttgtgaatccattccagttcgagatttcttacgaatgcttgacctctctcaaagacgatttggaatggaagcttatatacgtagggtcagctgaagacgaaacgtatgatcaagttttggaaagtgttcttgttggtcctgttaacgttgggaactatcgatttgtgttgcaggctgactctccagatccgttaaagattcgtgaggaagatattattggtgttactgtgttattgttgacttgctcatacatggatcaagagtttataagagttggctattatgtgaacaatgactatgatgatgaacagctcagggaagagcctcctaccaaggttttgattgataaggtccaaaggaacatactcacagacaaacctagagtaactaagttccctatcaactttcatcctgagaatgagcagactcttggtgatgggcctgcacctactgaaccatttgctgattctgttgtaaatggagaagctccggtgtttcttgagcagccacaaaagcttcaggagatagaacaatttgatgattctgatgtaaatggagaagctatagcgttgcttgatcagccacaaaatctccaggagacatgattcttgtttgactcaagcttaactggaaactggattagaactatcatctcaattctaatcgaaagatttgtatttttgtttcttttatctggaacttgaactccagttgtgttactgtttgtagaaatttaagttcttcttgcaacatccc

SEQ ID NO: 35796 - protein, 218 aa, Arabidopsis thaliana
  peptide (1)..(218): Ceres Seq. ID no. 13493782
  misc_feature (1)..(155): Pfam Name: Anti-silencing protein, ASF1-like Pfam Description: Anti-silencing protein, ASF1-like
  misc_feature (1)..(163): Homolog of NCBI NO: 33416731 NR Description: Unknown (protein for MGC:69151) [Xenopus laevis]
  misc_feature (1)..(180): Homolog of NCBI NO: 13384964 NR Description: ASF1 anti-silencing function 1 homolog A [Mus
  misc_feature (1)..(180): Homolog of NCBI NO: 27705326 NR Description: similar to RIKEN cDNA 2310079C17
  misc_feature (1)..(180): Homolog of NCBI NO: 7661592 NR Description: ASF1 anti-silencing function 1 homolog A
  misc_feature (1)..(180): Homolog of NCBI NO: 6841514 NR Description: HSPC146 [Homo sapiens]
  misc_feature (1)..(189): Homolog of NCBI NO: 17737649 NR Description: anti-silencing factor 1 CG9383-PA [Drosophila
  misc_feature (25)..(162): Homolog of NCBI NO: 34911252 NR Description: putative anti-silencing factor 1-like protein
  misc_feature (12)..(187): Homolog of NCBI NO: 6069498 NR Description: S-locus protein 7 [Brassica rapa]
  misc_feature (1)..(186): Homolog of NCBI NO: 15219729 NR Description: (ASF1a) anti-silencing function 1a protein
  misc_feature (1)..(218): Homolog of NCBI NO: 15240842 NR Description: anti-silencing factor 1-related protein
MSSINITNVTVLDNPAPFVNPFQFEISYECLTSLKDDLEWKLIYVGSAEDETYDQVLESVLVGPVNVGNYRFVLQADSPDPLKIREEDIIGVTVLLLTCSYMDQEFIRVGYYVNNDYDDEQLREEPPTKVLIDKVQRNILTDKPRVTKFPINFHPENEQTLGDGPAPTEPFADSVVNGEAPVFLEQPQKLQEIEQFDDSDVNGEAIALLDQPQNLQET

SEQ ID NO: 35797 - protein, 117 aa, Arabidopsis thaliana
  peptide (1)..(117): Ceres Seq. ID no. 13493783
  misc_feature (1)..(54): Pfam Name: Anti-silencing protein, ASF1-like Pfam Description: Anti-silencing protein, ASF1-like
  misc_feature (1)..(62): Homolog of NCBI NO: 33416731 NR Description: Unknown (protein for MGC:69151) [Xenopus laevis]
  misc_feature (1)..(79): Homolog of NCBI NO: 13384964 NR Description: ASF1 anti-silencing function 1 homolog A [Mus
  misc_feature (1)..(79): Homolog of NCBI NO: 27705326 NR Description: similar to RIKEN cDNA 2310079C17
  misc_feature (1)..(79): Homolog of NCBI NO: 7661592 NR Description: ASF1 anti-silencing function 1 homolog A
  misc_feature (1)..(79): Homolog of NCBI NO: 6841514 NR Description: HSPC146 [Homo sapiens]
  misc_feature (1)..(88): Homolog of NCBI NO: 17737649 NR Description: anti-silencing factor 1 CG9383-PA [Drosophila
  misc_feature (1)..(61): Homolog of NCBI NO: 34911252 NR Description: putative anti-silencing factor 1-like protein
  misc_feature (1)..(86): Homolog of NCBI NO: 6069498 NR Description: S-locus protein 7 [Brassica rapa]
  misc_feature (1)..(85): Homolog of NCBI NO: 15219729 NR Description: (ASF1a) anti-silencing function 1a protein
  misc_feature (1)..(117): Homolog of NCBI NO: 15240842 NR Description: anti-silencing factor 1-related protein
MDQEFIRVGYYVNNDYDDEQLREEPPTKVLIDKVQRNILTDKPRVTKFPINFHPENEQTLGDGPAPTEPFADSVVNGEAPVFLEQPQKLQEIEQFDDSDVNGEAIALLDQPQNLQET

SEQ ID NO: 35798 - DNA, 989 bp, Arabidopsis thaliana
  misc_feature (1)..(989): Ceres Seq. ID no. 12332944
  misc_feature: MA Experiment ID: 108462 Result: Down-regulated in Transcription
  misc_feature: MA Experiment 108462 PARAMETER Experiment Name: At_Germinating_Seeds_cDNA_P Parameter: Age (day) Value: 2 vs. 0
  misc_feature: MA Experiment 108462 PARAMETER Experiment Name: At_Germinating_Seeds_cDNA_P Parameter: Tissue Value: Germinating Seeds
  misc_feature: MA Experiment ID: 108463 Result: Down-regulated in Transcription
  misc_feature: MA Experiment 108463 PARAMETER Experiment Name: At_Germinating_Seeds_cDNA_P Parameter: Age (day) Value: 3 vs. 0
  misc_feature: MA Experiment 108463 PARAMETER Experiment Name: At_Germinating_Seeds_cDNA_P Parameter: Tissue Value: Germinating Seeds
  misc_feature: MA Experiment ID: 108464 Result: Down-regulated in Transcription
  misc_feature: MA Experiment 108464 PARAMETER Experiment Name: At_Germinating_Seeds_cDNA_P Parameter: Age (day) Value: 4 vs. 0
  misc_feature: MA Experiment 108464 PARAMETER Experiment Name: At_Germinating_Seeds_cDNA_P Parameter: Tissue Value: Germinating Seeds
  misc_feature: MA Experiment ID: 20000184 Result: Down-regulated in Transcription
  misc_feature: MA Experiment 20000184 PARAMETER Experiment Name: At_Shoots__P Parameter: Age (day) Value: 7
  misc_feature: MA Experiment 20000184 PARAMETER Experiment Name: At_Shoots__P Parameter: Tissue Value: Shoots vs. Whole Plant
  misc_feature: MA Experiment ID: 20000224 Result: Up-regulated in Transcription
atttttcggatcggaccaattcgactaatcggttccggtttctttcccggggcaaggtagagctagagatttcgaagaagaaacgaaagggagagagagagatagacaagttccgcgatgaacgaaggctcgagcgaagaagtaacgaggacggtaatggaagagaaaccagaacagcaacaaagaggatctctggagaaaggaagatcgtgcaaaggctatttatattactcttccactctcaaatccaagtctaagaaccctcgctgcgtcggaatccctcgtactctccgtcaagttcctgattatgttgttggacaatctgaagctgaagcttctaaagacggaaggaccttagctgatttttactatggatgtttgggttattccgtctacatgactgataaagactcatctgccatcaagcaacatacgaagactcaacttcccgtttgtgtcggtcttgagatattagcagatagaagagcagcttctggcaatacttcatctgttccagcccgtgttcaaaatagaaaagattcccgggaggtgcctgtgcctcagcaccagaacaataaaccagccactgccacaaacacagaaaacggcttcttaaccaggttcacaagaaacgcaaacctggtagcagcaggggtgatgaagaacatgaagagagttggtaactatgtgaaagaaactgtggatgattccttggacccatatcgcaagcgaccaaaataaagaaactttttacattagatgtggagacaacaaacccaaaaaaaatgaccgacagacgacaggatatgaatcttatttgacacttttttggattctcttgaatcatcaaaaaataaaatcaaccaaaaaaaatggctgtatgatttgtttaagcaggccatgtcccaaagaccaaagtaatgtgtacaccttcctcagttttggtttactgatattatacatatgccaatgaggttcacttttattgc

SEQ ID NO: 35799 - protein, 207 aa, Arabidopsis thaliana
  peptide (1)..(207): Ceres Seq. ID no. 12332945
  misc_feature (1)..(207): Homolog of NCBI NO: 15230397 NR Description: putative protein; protein id: At3g51100.1
MNEGSSEEVTRTVMEEKPEQQQRGSLEKGRSCKGYLYYSSTLKSKSKNPRCVGIPRTLRQVPDYVVGQSEAEASKDGRTLADFYYGCLGYSVYMTDKDSSAIKQHTKTQLPVCVGLEILADRRAASGNTSSVPARVQNRKDSREVPVPQHQNNKPATATNTENGFLTRFTRNANLVAAGVMKNMKRVGNYVKETVDDSLDPYRKRPK

SEQ ID NO: 35800 - protein, 194 aa, Arabidopsis thaliana
  peptide (1)..(194): Ceres Seq. ID no. 12332946
  misc_feature (1)..(194): Homolog of NCBI NO: 15230397 NR Description: putative protein; protein id: At3g51100.1
MEEKPEQQQRGSLEKGRSCKGYLYYSSTLKSKSKNPRCVGIPRTLRQVPDYVVGQSEAEASKDGRTLADFYYGCLGYSVYMTDKDSSAIKQHTKTQLPVCVGLEILADRRAASGNTSSVPARVQNRKDSREVPVPQHQNNKPATATNTENGFLTRFTRNANLVAAGVMKNMKRVGNYVKETVDDSLDPYRKRPK

SEQ ID NO: 35801 - protein, 114 aa, Arabidopsis thaliana
  peptide (1)..(114): Ceres Seq. ID no. 12332947
  misc_feature (1)..(114): Homolog of NCBI NO: 15230397 NR Description: putative protein; protein id: At3g51100.1
MTDKDSSAIKQHTKTQLPVCVGLEILADRRAASGNTSSVPARVQNRKDSREVPVPQHQNNKPATATNTENGFLTRFTRNANLVAAGVMKNMKRVGNYVKETVDDSLDPYRKRPK

SEQ ID NO: 35802 - DNA, 1645 bp, Arabidopsis thaliana
  misc_feature (1)..(1645): Ceres Seq. ID no. 13593234
  misc_feature: MA Experiment ID: 108462 Result: Up-regulated in Transcription
  misc_feature: MA Experiment 108462 PARAMETER Experiment Name: At_Germinating_Seeds_cDNA_P Parameter: Age (day) Value: 2 vs. 0
  misc_feature: MA Experiment 108462 PARAMETER Experiment Name: At_Germinating_Seeds_cDNA_P Parameter: Tissue Value: Germinating Seeds
  misc_feature: MA Experiment ID: 20000089 Result: Down-regulated in Transcription
  misc_feature: MA Experiment ID: 20000180 Result: Up-regulated in Transcription
  misc_feature: MA Experiment 20000180 PARAMETER Experiment Name: At_Germinating_Seeds_P Parameter: Age (hr) Value: 24 vs. 0
  misc_feature: MA Experiment 20000180 PARAMETER Experiment Name: At_Germinating_Seeds_P Parameter: Tissue Value: Germinating Seeds
  misc_feature: MA Experiment ID: 20000185 Result: Down-regulated in Transcription
  misc_feature: MA Experiment 20000185 PARAMETER Experiment Name: At_Roots__P Parameter: Age (day) Value: 7 vs. 21
  misc_feature: MA Experiment 20000185 PARAMETER Experiment Name: At_Roots__P Parameter: Organism Value: A. thaliana
  misc_feature: MA Experiment 20000185 PARAMETER Experiment Name: At_Roots__P Parameter: Tissue Value: Roots vs. Whole Plant
  misc_feature: MA Experiment ID: 20000227 Result: Down-regulated in Transcription
  misc_feature: MA Experiment 20000227 PARAMETER Experiment Name: At_Root-Tips-vs-Tops_P Parameter: Tissue Value: Root Tips vs. Root Tops
  misc_feature: MA Experiment ID: 20000438 Result: Up-regulated in Transcription
  misc_feature: MA Experiment 20000438 PARAMETER Experiment Name: At_Shoots__P Parameter: Age (day) Value: 14
  misc_feature: MA Experiment 20000438 PARAMETER Experiment Name: At_Shoots__P Parameter: Tissue Value: Shoots vs. Whole Plant
  misc_feature: MA Experiment ID: 20000439 Result: Down-regulated in Transcription
  misc_feature: MA Experiment 20000439 PARAMETER Experiment Name: At_Roots__P Parameter: Age (day) Value: 14 vs. 21
  misc_feature: MA Experiment 20000439 PARAMETER Experiment Name: At_Roots__P Parameter: Organism Value: A. thaliana
  misc_feature: MA Experiment 20000439 PARAMETER Experiment Name: At_Roots__P Parameter: Tissue Value: Roots vs. Whole Plant
  misc_feature: MA Experiment ID: 20001248 Result: Down-regulated in Transcription
  misc_feature: MA Experiment 20001248 PARAMETER Experiment Name: At_Far-red-induction_P Parameter: Age (day) Value: 7
  misc_feature: MA Experiment 20001248 PARAMETER Experiment Name: At_Far-red-induction_P Parameter: Light Value: Far-red vs. White
  misc_feature: MA Experiment 20001248 PARAMETER Experiment Name: At_Far-red-induction_P Parameter: Organism Value: A. thaliana
  misc_feature: MA Experiment 20001248 PARAMETER Experiment Name: At_Far-red-induction_P Parameter: Plant Line Value: Columbia
  misc_feature: MA Experiment 20001248 PARAMETER Experiment Name: At_Far-red-induction_P Parameter: Timepoint (hr) Value: 4
  misc_feature: MA Experiment 20001248 PARAMETER Experiment Name: At_Far-red-induction_P Parameter: Tissue Value: Whole Plant
  misc_feature: MA Experiment ID: 20001450 Result: Down-regulated in Transcription
  misc_feature: MA Experiment 20001450 PARAMETER Experiment Name: At_Far-red-induction_P Parameter: Age (day) Value: 7
  misc_feature: MA Experiment 20001450 PARAMETER Experiment Name: At_Far-red-induction_P Parameter: Light Value: Far-red vs. White
  misc_feature: MA Experiment 20001450 PARAMETER Experiment Name: At_Far-red-induction_P Parameter: Organism Value: A. thaliana
  misc_feature: MA Experiment 20001450 PARAMETER Experiment Name: At_Far-red-induction_P Parameter: Plant Line Value: Columbia
  misc_feature: MA Experiment 20001450 PARAMETER Experiment Name: At_Far-red-induction_P Parameter: Timepoint (hr) Value: 8
  misc_feature: MA Experiment 20001450 PARAMETER Experiment Name: At_Far-red-induction_P Parameter: Tissue Value: Whole Plant
actctgtcgcttggcgcgctctctctccatagttccagttctgaaatctcactttcacagtttgtgtctgtgcgataatggccatggcagagctctcaacccccaaaacgacgtcgccttttctcaactcttcgtctcggcttcgtctctcttcaaaattgcacctttcaaaccactttcgccatcttcttcttccacctctccacacaacaactcccaactccaaaatctcttgctccgtttctcaaaatagccaagctcctgttgctgtgcaagaaaatggattggtgaagacgaagaaagagtgttatggagtgttctgcctcacctatgatcttaaagctgaagaagagacaagatcatggaagaagttaattaatattgcagtttcaggtgctgcaggaatgatttctaaccatcttctcttcaaacttgcttcaggggaagtatttggtccagatcaacccattgcattgaaactgctaggatcagagagatcaattcaagctcttgaaggtgttgcaatggaactggaggattcattgttcccattgttgagagaagttgatataggaacagatccaaatgaagtgttccaagatgtggagtgggctattctgattggagcaaaacctcgaggccctggaatggaacgtgctgacttgttggacatcaatggccaaatctttgctgagcagggcaaagctctgaacaaagctgcctctcctaacgtcaaggttcttgtagtgggaaacccttgcaacaccaatgccttgatttgtcttaaaaatgctcccaacattcctgcaaagaacttccatgccctcacgaggttagacgaaaatcgtgccaaatgccagcttgctcttaaagccggtgttttctatgacaaagtgtctaatatgaccatatggggaaatcactccacgactcaggtgccagacttcttaaatgccagaattaatggcctgcctgtgaaggaggttattacagatcacaaatggttagaagagggattcactgagagtgtgcagaagagaggtgggttattaattcagaaatggggtcgatcttctgctgcttctactgctgtttccattgttgatgctataaagtctcttgtaactcctactcctgagggtgattggttttcgactggggtgtacacggatggaaatccttatggtattgaagagggccttgtcttcagtatgccatgccggtcgaagggagatggagattatgaacttgtcaaggatgtagaaattgatgactaccttcgccaacgaatcgccaagtcggaagcggaactgttggctgagaagagatgtgttgcacacctcactggagagggcattgcctactgtgatcttggtccggtagatactatgcttcctggggaagtttgatttttgcaggacgttgaacatctcaagtaagcattctcttccgggttgttagctgtacagagcacagccacattacttatgatgattgttcagaataagaaaatgaaactcttatttcttatttacatgcatctgtatgtgatttttcttgagcaatgctccaaaagtcatatacagtagtatttgtaaacacttgaaacgtttctatgctttattccagtttcagaactcaaact

SEQ ID NO: 35803 - protein, 443 aa, Arabidopsis thaliana; identical to SEQ ID NO: 25547
  peptide (1)..(443): Ceres Seq. ID no. 13593235
  misc_feature (251)..(423): Pfam Name: lactate/malate dehydrogenase, alpha/beta Pfam Description: lactate/malate dehydrogenase, alpha/beta
  misc_feature (251)..(423): Pfam Name: lactate/malate dehydrogenase, alpha/beta Pfam Description: lactate/malate dehydrogenase, alpha/beta
  misc_feature (52)..(443): Homolog of NCBI NO: 7546191 NR Description: Chain A, Chloroplast Nadp-Dependent Malate
  misc_feature (45)..(443): Homolog of NCBI NO: 726334 NR Description: NADP-malate dehydrogenase
  misc_feature (7)..(443): Homolog of NCBI NO: 1170895 NR Description: Malate dehydrogenase [NADP], chloroplast
  misc_feature (1)..(443): Homolog of NCBI NO: 462578 NR Description: Malate dehydrogenase [NADP], chloroplast
  misc_feature (1)..(443): Homolog of NCBI NO: 462579 NR Description: Malate dehydrogenase [NADP], chloroplast
  misc_feature (52)..(443): Homolog of NCBI NO: 7546191 NR Description: Chain A, Chloroplast Nadp-Dependent Malate
  misc_feature (7)..(443): Homolog of NCBI NO: 1170895 NR Description: Malate dehydrogenase [NADP], chloroplast
  misc_feature (1)..(443): Homolog of NCBI NO: 462579 NR Description: Malate dehydrogenase [NADP], chloroplast
  misc_feature (1)..(443): Homolog of NCBI NO: 30697049 NR Description: malate dehydrogenase
  misc_feature (1)..(443): Homolog of NCBI NO: 18377751 NR Description: putative NADP-dependent malate dehydrogenase
  misc_feature (1)..(443): Homolog of NCBI NO: 30697051 NR Description: malate dehydrogenase
  misc_feature (3)..(443): Homolog of NCBI NO: 21554349 NR Description: NADP-dependent malate dehydrogenase [Arabidopsis
  misc_feature (1)..(443): Homolog of NCBI NO: 11133370 NR Description: Malate dehydrogenase [NADP], chloroplast
  misc_feature (1)..(443): Homolog of NCBI NO: 462578 NR Description: Malate dehydrogenase [NADP], chloroplast
  misc_feature (45)..(443): Homolog of NCBI NO: 726334 NR Description: NADP-malate dehydrogenase
  misc_feature (1)..(443): Homolog of NCBI NO: 11133370 NR Description: Malate dehydrogenase [NADP], chloroplast
  misc_feature (3)..(443): Homolog of NCBI NO: 21554349 NR Description: NADP-dependent malate dehydrogenase [Arabidopsis
  misc_feature (1)..(443): Homolog of NCBI NO: 30697051 NR Description: malate dehydrogenase
  misc_feature (1)..(443): Homolog of NCBI NO: 18377751 NR Description: putative NADP-dependent malate dehydrogenase
  misc_feature (1)..(443): Homolog of NCBI NO: 30697049 NR Description: malate dehydrogenase

SEQ ID NO: 35804 - protein, 441 aa, Arabidopsis thaliana; identical to SEQ ID NO: 25548
  peptide (1)..(441): Ceres Seq. ID no. 13593236
  misc_feature (249)..(421): Pfam Name: lactate/malate dehydrogenase, alpha/beta Pfam Description: lactate/malate dehydrogenase, alpha/beta
  misc_feature (249)..(421): Pfam Name: lactate/malate dehydrogenase, alpha/beta Pfam Description: lactate/malate dehydrogenase, alpha/beta
  misc_feature (50)..(441): Homolog of NCBI NO: 7546191 NR Description: Chain A, Chloroplast Nadp-Dependent Malate
  misc_feature (43)..(441): Homolog of NCBI NO: 726334 NR Description: NADP-malate dehydrogenase
  misc_feature (5)..(441): Homolog of NCBI NO: 1170895 NR Description: Malate dehydrogenase [NADP], chloroplast
  misc_feature (1)..(441): Homolog of NCBI NO: 462578 NR Description: Malate dehydrogenase [NADP], chloroplast
  misc_feature (1)..(441): Homolog of NCBI NO: 462579 NR Description: Malate dehydrogenase [NADP], chloroplast
  misc_feature (50)..(441): Homolog of NCBI NO: 7546191 NR Description: Chain A, Chloroplast Nadp-Dependent Malate
  misc_feature (5)..(441): Homolog of NCBI NO: 1170895 NR Description: Malate dehydrogenase [NADP], chloroplast
  misc_feature (1)..(441): Homolog of NCBI NO: 462579 NR Description: Malate dehydrogenase [NADP], chloroplast
  misc_feature (1)..(441): Homolog of NCBI NO: 30697049 NR Description: malate dehydrogenase
  misc_feature (1)..(441): Homolog of NCBI NO: 18377751 NR Description: putative NADP-dependent malate dehydrogenase
  misc_feature (1)..(441): Homolog of NCBI NO: 30697051 NR Description: malate dehydrogenase
  misc_feature (1)..(441): Homolog of NCBI NO: 21554349 NR Description: NADP-dependent malate dehydrogenase [Arabidopsis
  misc_feature (1)..(441): Homolog of NCBI NO: 11133370 NR Description: Malate dehydrogenase [NADP], chloroplast
  misc_feature (1)..(441): Homolog of NCBI NO: 462578 NR Description: Malate dehydrogenase [NADP], chloroplast
  misc_feature (43)..(441): Homolog of NCBI NO: 726334 NR Description: NADP-malate dehydrogenase
  misc_feature (1)..(441): Homolog of NCBI NO: 11133370 NR Description: Malate dehydrogenase [NADP], chloroplast
  misc_feature (1)..(441): Homolog of NCBI NO: 21554349 NR Description: NADP-dependent malate dehydrogenase [Arabidopsis
  misc_feature (1)..(441): Homolog of NCBI NO: 30697051 NR Description: malate dehydrogenase
  misc_feature (1)..(441): Homolog of NCBI NO: 18377751 NR Description: putative NADP-dependent malate dehydrogenase
  misc_feature (1)..(441): Homolog of NCBI NO: 30697049 NR Description: malate dehydrogenase

SEQ ID NO: 35805 - protein, 334 aa, Arabidopsis thaliana; identical to SEQ ID NO: 25549
  peptide (1)..(334): Ceres Seq. ID no. 13593237
  misc_feature (142)..(314): Pfam Name: lactate/malate dehydrogenase, alpha/beta Pfam Description: lactate/malate dehydrogenase, alpha/beta
  misc_feature (142)..(314): Pfam Name: lactate/malate dehydrogenase, alpha/beta Pfam Description: lactate/malate dehydrogenase, alpha/beta
  misc_feature (1)..(334): Homolog of NCBI NO: 7546191 NR Description: Chain A, Chloroplast Nadp-Dependent Malate
  misc_feature (1)..(334): Homolog of NCBI NO: 726334 NR Description: NADP-malate dehydrogenase
  misc_feature (1)..(334): Homolog of NCBI NO: 1170895 NR Description: Malate dehydrogenase [NADP], chloroplast
  misc_feature (1)..(334): Homolog of NCBI NO: 462578 NR Description: Malate dehydrogenase [NADP], chloroplast
  misc_feature (1)..(334): Homolog of NCBI NO: 462579 NR Description: Malate dehydrogenase [NADP], chloroplast
  misc_feature (1)..(334): Homolog of NCBI NO: 7546191 NR Description: Chain A, Chloroplast Nadp-Dependent Malate
  misc_feature (1)..(334): Homolog of NCBI NO: 1170895 NR Description: Malate dehydrogenase [NADP], chloroplast
  misc_feature (1)..(334): Homolog of NCBI NO: 462579 NR Description: Malate dehydrogenase [NADP], chloroplast
  misc_feature (1)..(334): Homolog of NCBI NO: 30697049 NR Description: malate dehydrogenase
  misc_feature (1)..(334): Homolog of NCBI NO: 18377751 NR Description: putative NADP-dependent malate dehydrogenase
  misc_feature (1)..(334): Homolog of NCBI NO: 30697051 NR Description: malate dehydrogenase
  misc_feature (1)..(334): Homolog of NCBI NO: 21554349 NR Description: NADP-dependent malate dehydrogenase [Arabidopsis
  misc_feature (1)..(334): Homolog of NCBI NO: 11133370 NR Description: Malate dehydrogenase [NADP], chloroplast
  misc_feature (1)..(334): Homolog of NCBI NO: 462578 NR Description: Malate dehydrogenase [NADP], chloroplast
  misc_feature (1)..(334): Homolog of NCBI NO: 726334 NR Description: NADP-malate dehydrogenase
  misc_feature (1)..(334): Homolog of NCBI NO: 11133370 NR Description: Malate dehydrogenase [NADP], chloroplast
  misc_feature (1)..(334): Homolog of NCBI NO: 21554349 NR Description: NADP-dependent malate dehydrogenase [Arabidopsis
  misc_feature (1)..(334): Homolog of NCBI NO: 30697051 NR Description: malate dehydrogenase
  misc_feature (1)..(334): Homolog of NCBI NO: 18377751 NR Description: putative NADP-dependent malate dehydrogenase
  misc_feature (1)..(334): Homolog of NCBI NO: 30697049 NR Description: malate dehydrogenase

SEQ ID NO: 35806 - DNA, 1068 bp, Arabidopsis thaliana
  misc_feature (1)..(1068): Ceres Seq. ID no. 12334919
  misc_feature: MA Experiment ID: 108573 Result: Up-regulated in Transcription
  misc_feature: MA Experiment 108573 PARAMETER Experiment Name: At_Drought_cDNA_P Parameter: Timepoint (hr) Value: 6
  misc_feature: MA Experiment 108573 PARAMETER Experiment Name: At_Drought_cDNA_P Parameter: Tissue Value: Aerial
  misc_feature: MA Experiment 108573 PARAMETER Experiment Name: At_Drought_cDNA_P Parameter: Treatment Value: Drought vs. No Drought
  misc_feature: MA Experiment ID: 108585 Result: Up-regulated in Transcription
  misc_feature: MA Experiment 108585 PARAMETER Experiment Name: At_5mM_NaNP_cDNA_P Parameter: Timepoint (hr) Value: 6
  misc_feature: MA Experiment 108585 PARAMETER Experiment Name: At_5mM_NaNP_cDNA_P Parameter: Tissue Value: Aerial
  misc_feature: MA Experiment 108585 PARAMETER Experiment Name: At_5mM_NaNP_cDNA_P Parameter: Treatment Value: null
  misc_feature: MA Experiment ID: 20001905 Result: Up-regulated in Transcription
  misc_feature: MA Experiment 20001905 PARAMETER Experiment Name: At_Drought_Reproduction_P Parameter: Age (day) Value: 40
  misc_feature: MA Experiment 20001905 PARAMETER Experiment Name: At_Drought_Reproduction_P Parameter: Organism Value: A. thaliana
  misc_feature: MA Experiment 20001905 PARAMETER Experiment Name: At_Drought_Reproduction_P Parameter: Plant Line Value: WS
  misc_feature: MA Experiment 20001905 PARAMETER Experiment Name: At_Drought_Reproduction_P Parameter: Timepoint (day) Value: 10
  misc_feature: MA Experiment 20001905 PARAMETER Experiment Name: At_Drought_Reproduction_P Parameter: Tissue Value: Rosettes
  misc_feature: MA Experiment 20001905 PARAMETER Experiment Name: At_Drought_Reproduction_P Parameter: Treatment Value: Drought vs. No Drought
aatgatctgatctgatctcccaaaaattcccaaatccaaatctacgaatctccgtctcctccgtcgcattttccgaggtagagagagagatcaaaccaaagagacacagagagagtatccaccgatggaatccgcagcaacggctgttgtacctccggcagccgccgccaccaccgccaccgccaccgatgataatctccaatcaagcgactcatcatctcccgccgacgccgttaaccgattgatccacgccttttcgcagcgacaacaacatcttctcgacaaaacggttcctcacgttctctatcgatggatcgcatgtctctgtgttgtattgatctacatcgttcgtgtttactttgtggaaggcttctacatcatcacttacgccatcggcatctaccttttgaatctcatcattgcttttctatctcctcaagaagatcccgaagcttctctcacttccggtggttctcttcctactcggagatccgatgagtatcgtcctttcgttcgccgtctccctgagttcaaattctggttatcgatcataagggctttcatcatcggatttatgatgacgttcttcgaggtgtttgatgtacctgtattctggccaatacttctcttctactgggtgatgttgtttttccttacgatgaggaaacagatacagcatatgatcaaatacagatatgtccctttctcttttgggaaaaagcagtatggaaagaaaccggctccaacagagagcagtgaatgatcaatcaaaactgttcaggtcagcaattttacagtcttttgagagaagtagcatttgaaaaggtcggtcttttgttctcttttgatggcctatatctttgttagggatgaagtagagatagacatattttgctcttttatcatcctgactattttactggtttcacctgaactcaatgtacaatcttatttttttacatccttttttcagtgagaaaataatgtttcatacttgacccttttgtaatcatcatggtggaaaactaaagactaatcagtaatcactgtccggttctatcgatgttc

SEQ ID NO: 35807 - protein, 212 aa, Arabidopsis thaliana
  peptide (1)..(212): Ceres Seq. ID no. 12334920
  misc_feature (23)..(204): Pfam Name: Rer1 family Pfam Description: Rer1 family
  misc_feature (4)..(200): Homolog of NCBI NO: 34894094 NR Description: putative Rer1A protein (AtRer1A)
  misc_feature (29)..(204): Homolog of NCBI NO: 15226596 NR Description: AtRer1B
  misc_feature (141)..(199): Homolog of NCBI NO: 35210534 NR Description: putative endoplasmatic reticulum retrieval
  misc_feature (3)..(144): Homolog of NCBI NO: 35210534 NR Description: putative endoplasmatic reticulum retrieval
  misc_feature (29)..(204): Homolog of NCBI NO: 11281669 NR Description: endoplasmatic reticulum retrieval protein Rer1B
  misc_feature (29)..(202): Homolog of NCBI NO: 15234975 NR Description: AtRer1A
  misc_feature (1)..(140): Homolog of NCBI NO: 27817215 NR Description: putative endoplasmic reticulum retrieval protein
  misc_feature (1)..(199): Homolog of NCBI NO: 7488292 NR Description: probable integral membrane protein At2g23310
  misc_feature (1)..(212): Homolog of NCBI NO: 30682033 NR Description: integral membrane protein -related [Arabidopsis
  misc_feature (1)..(212): Homolog of NCBI NO: 18400234 NR Description: putative integral membrane protein
MESAATAVVPPAAAATTATATDDNLQSSDSSSPADAVNRLIHAFSQRQQHLLDKTVPHVLYRWIACLCVVLIYIVRVYFVEGFYIITYAIGIYLLNLIIAFLSPQEDPEASLTSGGSLPTRRSDEYRPFVRRLPEFKFWLSIIRAFIIGFMMTFFEVFDVPVFWPILLFYWVMLFFLTMRKQIQHMIKYRYVPFSFGKKQYGKKPAPTESSE

SEQ ID NO: 35808 - DNA, 1221 bp, Arabidopsis thaliana
  misc_feature (1)..(1221): Ceres Seq. ID no. 13490479
  misc_feature: MA Experiment ID: 108576 Result: Up-regulated in Transcription
  misc_feature: MA Experiment 108576 PARAMETER Experiment Name: At_42deg_Heat_cDNA_P Parameter: Temperature (deg C) Value: 42 vs. 22
  misc_feature: MA Experiment 108576 PARAMETER Experiment Name: At_42deg_Heat_cDNA_P Parameter: Timepoint (hr) Value: 1
  misc_feature: MA Experiment 108576 PARAMETER Experiment Name: At_42deg_Heat_cDNA_P Parameter: Tissue Value: Aerial
  misc_feature: MA Experiment ID: 20000144 Result: Up-regulated in Transcription
  misc_feature: MA Experiment 20000144 PARAMETER Experiment Name: At_42deg_Heat_cDNA_P Parameter: Temperature (deg C) Value: 42 vs. 22
  misc_feature: MA Experiment 20000144 PARAMETER Experiment Name: At_42deg_Heat_cDNA_P Parameter: Timepoint (hr) Value: 1
  misc_feature: MA Experiment 20000144 PARAMETER Experiment Name: At_42deg_Heat_cDNA_P Parameter: Tissue Value: Aerial
  misc_feature: MA Experiment ID: 20000496 Result: Up-regulated in Transcription
  misc_feature: MA Experiment 20000496 PARAMETER Experiment Name: At_Guard_Cells_P Parameter: Harvest Date Value: 7/19/2002
  misc_feature: MA Experiment 20000496 PARAMETER Experiment Name: At_Guard_Cells_P Parameter: Organism Value: Canola
  misc_feature: MA Experiment 20000496 PARAMETER Experiment Name: At_Guard_Cells_P Parameter: Tissue Value: Guard Cells vs. Leaves
aatttcgacacaaaaagccctaatctctgcttctgtaaagttcaacatttggcggagtcaaagaaacagagtgattctctgatccgattccggcgaaagaggacgaaacaaacggaacttgttcatcatcttctccagaaatgacgtcgtttcaggtgatgcgttcttcaaattcgagaaactcggatctatctcgtcgcatctcttctgcttctacttcttcttcgtctataagacctcaacaacagttccggcgagatctaacaagtgtcggttacggcggaagaaacgacggattatacagttcaaattcgatgacggtcgaagggattttacacgatactttcgcatcagatccaccagcaccaacggaatcttcactcttagatgcgtcgataaatctgatggatgcttctccagcaccaatggagataacaacaacgacggcttctgatgttgtggatcacggcggaggaacggagacgacgcgtggtgggaagagtgttgatgagatttggagagagatggtatcaggagaaggtaaagggatgaaggaagagacgtcggaagagataatgacgttagaggattttctagcgaaagctgcggtggaagacgaaacagcggtgacggcgtcggcggaggatttggatgtgaagattccggtgacgaattacggattcgatcattctgcaccgccgcataatccgtttcagatgattgataaagtagaaggatcaatagttgcgtttgggaatggtttagatgtttacggaggaggagctagagggaagagagcgagagtgatggttgagccattggataaagcagctgcacagagacagagaaggatgattaagaatcgtgaatctgcagctaggtctagagagaggaaacaagcttatcaagttgagttagaagctttggctgcgaagcttgaggaagagaatgagttgctttctaaggagattgaagataagaggaaagagagataccagaagttgatggagtttgtgattcctgttgttgagaaaccgaagcagcagccaccacggtttttacgcaggattcggtctttggaatggtgataagaggtatagacttttgaggattttagggtcttaatgttacttactttgtgtatgtgtgtgtgagagttgattcataatctgcagtagagtgtaatgattatggttaataacttatatattatattagatt

SEQ ID NO: 35809 - protein, 315 aa, Arabidopsis thaliana
  peptide (1)..(315): Ceres Seq. ID no. 13490480
  misc_feature (229)..(293): Pfam Name: bZIP transcription factor Pfam Description: bZIP transcription factor
  misc_feature (120)..(278): Homolog of NCBI NO: 7487620 NR Description: probable bZIP transcription factor
  misc_feature (120)..(278): Homolog of NCBI NO: 26451276 NR Description: putative bZIP transcription factor AtbZIP12 /
  misc_feature (116)..(312): Homolog of NCBI NO: 33146493 NR Description: putative bZIP protein DPBF3
  misc_feature (120)..(315): Homolog of NCBI NO: 34908608 NR Description: putative DNA binding protein
  misc_feature (212)..(315): Homolog of NCBI NO: 29367541 NR Description: OSE2-like protein [Oryza sativa (japonica
  misc_feature (120)..(315): Homolog of NCBI NO: 7638404 NR Description: OSE2 [Oryza sativa]
  misc_feature (120)..(315): Homolog of NCBI NO: 7489466 NR Description: DNA binding protein - rice
  misc_feature (103)..(315): Homolog of NCBI NO: 15219608 NR Description: G-box binding factor 4, GBF4 [Arabidopsis
  misc_feature (1)..(315): Homolog of NCBI NO: 21554353 NR Description: unknown [Arabidopsis thaliana]
  misc_feature (1)..(315): Homolog of NCBI NO: 15240086 NR Description: bZIP transcription factor, G-box binding factor
MTSFQVMRSSNSRNSDLSRRISSASTSSSSIRPQQQFRRDLTSVGYGGRNDGLYSSNSMTVEGILHDTFASDPPAPTESSLLDASINLMDASPAPMEITTTTASDVVDHGGGTETTRGGKSVDEIWREMVSGEGKGMKEETSEEIMTLEDFLAKAAVEDETAVTASAEDLDVKIPVTNYGFDHSAPPHNPFQMIDKVEGSIVAFGNGLDVYGGGARGKRARVMVEPLDKAAAQRQRRMIKNRESAARSRERKQAYQVELEALAAKLEEENELLSKEIEDKRKERYQKLMEFVIPVVEKPKQQPPRFLRRIRSLEW

SEQ ID NO: 35810 - protein, 309 aa, Arabidopsis thaliana
  peptide (1)..(309): Ceres Seq. ID no. 13490481
  misc_feature (223)..(287): Pfam Name: bZIP transcription factor Pfam Description: bZIP transcription factor
  misc_feature (114)..(272): Homolog of NCBI NO: 7487620 NR Description: probable bZIP transcription factor
  misc_feature (114)..(272): Homolog of NCBI NO: 26451276 NR Description: putative bZIP transcription factor AtbZIP12 /
  misc_feature (110)..(306): Homolog of NCBI NO: 33146493 NR Description: putative bZIP protein DPBF3
  misc_feature (114)..(309): Homolog of NCBI NO: 34908608 NR Description: putative DNA binding protein
  misc_feature (206)..(309): Homolog of NCBI NO: 29367541 NR Description: OSE2-like protein [Oryza sativa (japonica
  misc_feature (114)..(309): Homolog of NCBI NO: 7638404 NR Description: OSE2 [Oryza sativa]
  misc_feature (114)..(309): Homolog of NCBI NO: 7489466 NR Description: DNA binding protein - rice
  misc_feature (97)..(309): Homolog of NCBI NO: 15219608 NR Description: G-box binding factor 4, GBF4 [Arabidopsis
  misc_feature (1)..(309): Homolog of NCBI NO: 21554353 NR Description: unknown [Arabidopsis thaliana]
  misc_feature (1)..(309): Homolog of NCBI NO: 15240086 NR Description: bZIP transcription factor, G-box binding factor
MRSSNSRNSDLSRRISSASTSSSSIRPQQQFRRDLTSVGYGGRNDGLYSSNSMTVEGILHDTFASDPPAPTESSLLDASINLMDASPAPMEITTTTASDVVDHGGGTETTRGGKSVDEIWREMVSGEGKGMKEETSEEIMTLEDFLAKAAVEDETAVTASAEDLDVKIPVTNYGFDHSAPPHNPFQMIDKVEGSIVAFGNGLDVYGGGARGKRARVMVEPLDKAAAQRQRRMIKNRESAARSRERKQAYQVELEALAAKLEEENELLSKEIEDKRKERYQKLMEFVIPVVEKPKQQPPRFLRRIRSLEW

SEQ ID NO: 35811 - protein, 257 aa, Arabidopsis thaliana
  peptide (1)..(257): Ceres Seq. ID no. 13490482
  misc_feature (171)..(235): Pfam Name: bZIP transcription factor Pfam Description: bZIP transcription factor
  misc_feature (62)..(220): Homolog of NCBI NO: 7487620 NR Description: probable bZIP transcription factor
  misc_feature (62)..(220): Homolog of NCBI NO: 26451276 NR Description: putative bZIP transcription factor AtbZIP12 /
  misc_feature (58)..(254): Homolog of NCBI NO: 33146493 NR Description: putative bZIP protein DPBF3
  misc_feature (62)..(257): Homolog of NCBI NO: 34908608 NR Description: putative DNA binding protein
  misc_feature (154)..(257): Homolog of NCBI NO: 29367541 NR Description: OSE2-like protein [Oryza sativa (japonica
  misc_feature (62)..(257): Homolog of NCBI NO: 7638404 NR Description: OSE2 [Oryza sativa]
  misc_feature (62)..(257): Homolog of NCBI NO: 7489466 NR Description: DNA binding protein - rice
  misc_feature (45)..(257): Homolog of NCBI NO: 15219608 NR Description: G-box binding factor 4, GBF4 [Arabidopsis
  misc_feature (1)..(257): Homolog of NCBI NO: 21554353 NR Description: unknown [Arabidopsis thaliana]
  misc_feature (1)..(257): Homolog of NCBI NO: 15240086 NR Description: bZIP transcription factor, G-box binding factor
MTVEGILHDTFASDPPAPTESSLLDASINLMDASPAPMEITTTTASDVVDHGGGTETTRGGKSVDEIWREMVSGEGKGMKEETSEEIMTLEDFLAKAAVEDETAVTASAEDLDVKIPVTNYGFDHSAPPHNPFQMIDKVEGSIVAFGNGLDVYGGGARGKRARVMVEPLDKAAAQRQRRMIKNRESAARSRERKQAYQVELEALAAKLEEENELLSKEIEDKRKERYQKLMEFVIPVVEKPKQQPPRFLRRIRSLEW

SEQ ID NO: 35812 - DNA, 1693 bp, Arabidopsis thaliana
  misc_feature (1)..(1693): Ceres Seq. ID no. 13490475
  misc_feature: MA Experiment ID: 108434 Result: Down-regulated in Transcription
  misc_feature: MA Experiment 108434 PARAMETER Experiment Name: At_Root_Tips_cDNA_P Parameter: Tissue Value: Root Tips
  misc_feature: MA Experiment ID: 108462 Result: Up-regulated in Transcription
  misc_feature: MA Experiment 108462 PARAMETER Experiment Name: At_Germinating_Seeds_cDNA_P Parameter: Age (day) Value: 2 vs. 0
  misc_feature: MA Experiment 108462 PARAMETER Experiment Name: At_Germinating_Seeds_cDNA_P Parameter: Tissue Value: Germinating Seeds
  misc_feature: MA Experiment ID: 108463 Result: Up-regulated in Transcription
  misc_feature: MA Experiment 108463 PARAMETER Experiment Name: At_Germinating_Seeds_cDNA_P Parameter: Age (day) Value: 3 vs. 0
  misc_feature: MA Experiment 108463 PARAMETER Experiment Name: At_Germinating_Seeds_cDNA_P Parameter: Tissue Value: Germinating Seeds
  misc_feature: MA Experiment ID: 108464 Result: Up-regulated in Transcription
  misc_feature: MA Experiment 108464 PARAMETER Experiment Name: At_Germinating_Seeds_cDNA_P Parameter: Age (day) Value: 4 vs. 0
  misc_feature: MA Experiment 108464 PARAMETER Experiment Name: At_Germinating_Seeds_cDNA_P Parameter: Tissue Value: Germinating Seeds
  misc_feature: MA Experiment ID: 108488 Result: Up-regulated in Transcription
  misc_feature: MA Experiment ID: 108489 Result: Up-regulated in Transcription
  misc_feature: MA Experiment ID: 108572 Result: Down-regulated in Transcription
  misc_feature: MA Experiment 108572 PARAMETER Experiment Name: At_Drought_cDNA_P Parameter: Timepoint (hr) Value: 1
  misc_feature: MA Experiment 108572 PARAMETER Experiment Name: At_Drought_cDNA_P Parameter: Tissue Value: Aerial
  misc_feature: MA Experiment 108572 PARAMETER Experiment Name: At_Drought_cDNA_P Parameter: Treatment Value: Drought vs. No Drought
  misc_feature: MA Experiment ID: 108573 Result: Up-regulated in Transcription
  misc_feature: MA Experiment 108573 PARAMETER Experiment Name: At_Drought_cDNA_P Parameter: Timepoint (hr) Value: 6
  misc_feature: MA Experiment 108573 PARAMETER Experiment Name: At_Drought_cDNA_P Parameter: Tissue Value: Aerial
  misc_feature: MA Experiment 108573 PARAMETER Experiment Name: At_Drought_cDNA_P Parameter: Treatment Value: Drought vs. No Drought
  misc_feature: MA Experiment ID: 108577 Result: Down-regulated in Transcription
  misc_feature: MA Experiment 108577 PARAMETER Experiment Name: At_42deg_Heat_cDNA_P Parameter: Temperature (deg C) Value: 42 vs. 22
  misc_feature: MA Experiment 108577 PARAMETER Experiment Name: At_42deg_Heat_cDNA_P Parameter: Timepoint (hr) Value: 6
  misc_feature: MA Experiment 108577 PARAMETER Experiment Name: At_42deg_Heat_cDNA_P Parameter: Tissue Value: Aerial
  misc_feature: MA Experiment ID: 108595 Result: Down-regulated in Transcription
  misc_feature: MA Experiment 108595 PARAMETER Experiment Name: At_Ler-pi_Ovule_cDNA_P Parameter: Plant Line Value: null
  misc_feature: MA Experiment ID: 108608 Result: Down-regulated in Transcription
  misc_feature: MA Experiment 108608 PARAMETER Experiment Name: At_100uM_ABA_cDNA_P Parameter: Timepoint (hr) Value: 1
  misc_feature: MA Experiment 108608 PARAMETER Experiment Name: At_100uM_ABA_cDNA_P Parameter: Tissue Value: Aerial
  misc_feature: MA Experiment 108608 PARAMETER Experiment Name: At_100uM_ABA_cDNA_P Parameter: Treatment Value: 100uM ABA vs. No Treatment
  misc_feature: MA Experiment ID: 20000089 Result: Down-regulated in Transcription
  misc_feature: MA Experiment ID: 20000112 Result: Up-regulated in Transcription
  misc_feature: MA Experiment 20000112 PARAMETER Experiment Name: At_42deg_Heat_cDNA_P Parameter: Temperature (deg C) Value: 42 vs. 22
  misc_feature: MA Experiment 20000112 PARAMETER Experiment Name: At_42deg_Heat_cDNA_P Parameter: Timepoint (hr) Value: 2
  misc_feature: MA Experiment 20000112 PARAMETER Experiment Name: At_42deg_Heat_cDNA_P Parameter: Tissue Value: Aerial
  misc_feature: MA Experiment ID: 20000224 Result: Down-regulated in Transcription
  misc_feature: MA Experiment ID: 20000348 Result: Down-regulated in Transcription
  misc_feature: MA Experiment 20000348 PARAMETER Experiment Name: At_100uM_ABA_Sub_P Parameter: Age (day) Value: 14
  misc_feature: MA Experiment 20000348 PARAMETER Experiment Name: At_100uM_ABA_Sub_P Parameter: Organism Value: A. thaliana
  misc_feature: MA Experiment 20000348 PARAMETER Experiment Name: At_100uM_ABA_Sub_P Parameter: Plant Line Value: WS
  misc_feature: MA Experiment 20000348 PARAMETER Experiment Name: At_100uM_ABA_Sub_P Parameter: Timepoint (hr) Value: 1
  misc_feature: MA Experiment 20000348 PARAMETER Experiment Name: At_100uM_ABA_Sub_P Parameter: Tissue Value: Aerial
  misc_feature: MA Experiment 20000348 PARAMETER Experiment Name: At_100uM_ABA_Sub_P Parameter: Treatment Value: 100uM ABA vs. No Treatment
  misc_feature: MA Experiment ID: 20000355 Result: Down-regulated in Transcription
  misc_feature: MA Experiment 20000355 PARAMETER Experiment Name: At_Siliques_Sub_P Parameter: Age (day) Value: 21
  misc_feature: MA Experiment 20000355 PARAMETER Experiment Name: At_Siliques_Sub_P Parameter: Organism Value: A. thaliana
  misc_feature: MA Experiment 20000355 PARAMETER Experiment Name: At_Siliques_Sub_P Parameter: Plant Line Value: WS
  misc_feature: MA Experiment 20000355 PARAMETER Experiment Name: At_Siliques_Sub_P Parameter: Tissue Value: Less Than 5mm Siliques vs. Whole Plant
  misc_feature: MA Experiment ID: 20000440 Result: Down-regulated in Transcription
  misc_feature: MA Experiment 20000440 PARAMETER Experiment Name: At_Closed-Flower__Sub_P Parameter: Tissue Value: Closed Flower vs. Whole Plant
  misc_feature: MA Experiment ID: 20001806 Result: Up-regulated in Transcription
  misc_feature: MA Experiment 20001806 PARAMETER Experiment Name: At_50mM_NH4NO3_L-to-H_Sub_P Parameter: Timepoint (hr) Value: 4
  misc_feature: MA Experiment 20001806 PARAMETER Experiment Name: At_50mM_NH4NO3_L-to-H_Sub_P Parameter: Tissue Value: Leaf
  misc_feature: MA Experiment 20001806 PARAMETER Experiment Name: At_50mM_NH4NO3_L-to-H_Sub_P Parameter: Treatment Value: 50mM NH4NO3 vs 100mM Mannitol
  misc_feature: MA Experiment ID: 20001807 Result: Up-regulated in Transcription
  misc_feature: MA Experiment 20001807 PARAMETER Experiment Name: At_50mM_NH4NO3_L-to-H_Sub_P Parameter: Timepoint (hr) Value: 6
  misc_feature: MA Experiment 20001807 PARAMETER Experiment Name: At_50mM_NH4NO3_L-to-H_Sub_P Parameter: Tissue Value: Leaf
  misc_feature: MA Experiment 20001807 PARAMETER Experiment Name: At_50mM_NH4NO3_L-to-H_Sub_P Parameter: Treatment Value: 50mM NH4NO3 vs 100mM Mannitol
ataaaaatcccaacatctcctaaaatctcccaaactttcaaaaagttaaccaaaacccccaaacagaaaaatgagaaacaatttcgtccctataattctctccttcatcatcttcttgactccatcaatcgcagaacaagaaccttcaattctttctcccgtcgatcaactcctcaacaaaacaagctcatacctcgatttttcaacaaaattcaaccaaccaagaatcgaactaacaacatcaacgatcatcgccggcatactctctttcctagcttcatcaatctcaagcgccggtggaatcggcggtggaggtttatatgttccgataatgacaatcgtggccggtctcgatctaaagacagcttcaagcttctcagcttttatggttactggtggatctatagctaacgtgggatgcaatctattcgttagaaaccctaaatctggtggcaaaaccctaatcgacttcgatttagctcttttattggaaccatgtatgcttcttggagttagtattggtgtgatctgtaatcttgttttcccgaactggttgattacgagtctcttcgctgtttttcttgcgtggtcgacgttgaagacttttggaaatggactttattattggagattggaatcggagatggtgaagattagagaatcgaatagaatagaagaagatgatgatgaagaagataagattgagagtctaaagttgcctctcttggaggattatcagagaccaaagaggtttccatggattaagcttggagctttggtcattatttggctttcttactttgcagtttatcttcttcgaggaaacaaatatggcgagggaatcatatcgatcgagccatgtggaaacgcctactggctcatttcatcgtctcaaataccactaactctcttcttcactctctggatctgcttcagtgacaatgttcaaagccaacaacaatcagattaccatgtctcagtaaaggatgtagaagatttgagatcaaatgatggagcaagatcaaacaagtgtatgttccctgtaatggctctattagctggagttttgggtggtgtgttcggtattggaggtggaatgctcattagtcctcttcttcttcaagtcggtatcgctcccgaggtaactgcagcgacatgttctttcatggttcttttttcatcaacaatgtctgcgattcaatacttattactaggcatggaacataccggaaccgcaagtatatttacggtcatatgttttgtggcgtcactcgtgggactaaaggtggttcaaaaggtaataaccgagtatggaagggcttcgatcattgtgttctcggttggtatcgtcatggcattgagtattgtgttgatgacaagctatggagctcttgatgtttggaatgattatgtctctggtcgttacatgggtttcaagttaccttgttgagaccaagaaaagaaagttttggtttcttgggttacaagtttcataatacatgtgtatatcatatcaccatgttgttgctctttcatccatttggtcatttagagttaagaagctttctgtttctttcttttgtatgatttttatatcactattcagaatgcacatctcgtgcattcgaatatatggtcaaataaaagttatgttgtgaacctaaattcatatttcaatatcaaatttctatgc

SEQ ID NO: 35813 - protein, 459 aa, Arabidopsis thaliana
  peptide (1)..(459): Ceres Seq. ID no. 13490476
  misc_feature (60)..(459): Homolog of NCBI NO: 40253412 NR Description: membrane protein-like [Oryza sativa (japonica
  misc_feature (87)..(200): Homolog of NCBI NO: 15233581 NR Description: hypothetical protein [Arabidopsis thaliana]
  misc_feature (330)..(459): Homolog of NCBI NO: 15233581 NR Description: hypothetical protein [Arabidopsis thaliana]
  misc_feature (50)..(441): Homolog of NCBI NO: 34908752 NR Description: P0415A04.9 [Oryza sativa (japonica
  misc_feature (1)..(459): Homolog of NCBI NO: 34908754 NR Description: P0415A04.10 [Oryza sativa (japonica
  misc_feature (1)..(419): Homolog of NCBI NO: 15233579 NR Description: hypothetical protein [Arabidopsis thaliana]
  misc_feature (33)..(459): Homolog of NCBI NO: 6554197 NR Description: T23J18.20 [Arabidopsis thaliana]
  misc_feature (1)..(459): Homolog of NCBI NO: 15220419 NR Description: expressed protein [Arabidopsis thaliana]
  misc_feature (70)..(459): Homolog of NCBI NO: 11358507 NR Description: membrane protein [imported] - Arabidopsis
  misc_feature (1)..(459): Homolog of NCBI NO: 15220600 NR Description: expressed protein [Arabidopsis thaliana]
MRNNFVPIILSFIIFLTPSIAEQEPSILSPVDQLLNKTSSYLDFSTKFNQPRIELTTSTIIAGILSFLASSISSAGGIGGGGLYVPIMTIVAGLDLKTASSFSAFMVTGGSIANVGCNLFVRNPKSGGKTLIDFDLALLLEPCMLLGVSIGVICNLVFPNWLITSLFAVFLAWSTLKTFGNGLYYWRLESEMVKIRESNRIEEDDDEEDKIESLKLPLLEDYQRPKRFPWIKLGALVIIWLSYFAVYLLRGNKYGEGIISIEPCGNAYWLISSSQIPLTLFFTLWICFSDNVQSQQQSDYHVSVKDVEDLRSNDGARSNKCMFPVMALLAGVLGGVFGIGGGMLISPLLLQVGIAPEVTAATCSFMVLFSSTMSAIQYLLLGMEHTGTASIFTVICFVASLVGLKVVQKVITEYGRASIIVFSVGIVMALSIVLMTSYGALDVWNDYVSGRYMGFKLPC

SEQ ID NO: 35814 - protein, 372 aa, Arabidopsis thaliana
  peptide (1)..(372): Ceres Seq. ID no. 13490477
  misc_feature (1)..(372): Homolog of NCBI NO: 40253412 NR Description: membrane protein-like [Oryza sativa (japonica
  misc_feature (1)..(113): Homolog of NCBI NO: 15233581 NR Description: hypothetical protein [Arabidopsis thaliana]
  misc_feature (243)..(372): Homolog of NCBI NO: 15233581 NR Description: hypothetical protein [Arabidopsis thaliana]
  misc_feature (1)..(354): Homolog of NCBI NO: 34908752 NR Description: P0415A04.9 [Oryza sativa (japonica
  misc_feature (1)..(372): Homolog of NCBI NO: 34908754 NR Description: P0415A04.10 [Oryza sativa (japonica
  misc_feature (1)..(332): Homolog of NCBI NO: 15233579 NR Description: hypothetical protein [Arabidopsis thaliana]
  misc_feature (1)..(372): Homolog of NCBI NO: 6554197 NR Description: T23J18.20 [Arabidopsis thaliana]
  misc_feature (1)..(372): Homolog of NCBI NO: 15220419 NR Description: expressed protein [Arabidopsis thaliana]
  misc_feature (1)..(372): Homolog of NCBI NO: 11358507 NR Description: membrane protein [imported] - Arabidopsis
  misc_feature (1)..(372): Homolog of NCBI NO: 15220600 NR Description: expressed protein [Arabidopsis thaliana]
MTIVAGLDLKTASSFSAFMVTGGSIANVGCNLFVRNPKSGGKTLIDFDLALLLEPCMLLGVSIGVICNLVFPNWLITSLFAVFLAWSTLKTFGNGLYYWRLESEMVKIRESNRIEEDDDEEDKIESLKLPLLEDYQRPKRFPWIKLGALVIIWLSYFAVYLLRGNKYGEGIISIEPCGNAYWLISSSQIPLTLFFTLWICFSDNVQSQQQSDYHVSVKDVEDLRSNDGARSNKCMFPVMALLAGVLGGVFGIGGGMLISPLLLQVGIAPEVTAATCSFMVLFSSTMSAIQYLLLGMEHTGTASIFTVICFVASLVGLKVVQKVITEYGRASIIVFSVGIVMALSIVLMTSYGALDVWNDYVSGRYMGFKLPC

SEQ ID NO: 35815 - protein, 354 aa, Arabidopsis thaliana
  peptide (1)..(354): Ceres Seq. ID no. 13490478
  misc_feature (1)..(354): Homolog of NCBI NO: 40253412 NR Description: membrane protein-like [Oryza sativa (japonica
  misc_feature (1)..(95): Homolog of NCBI NO: 15233581 NR Description: hypothetical protein [Arabidopsis thaliana]
  misc_feature (225)..(354): Homolog of NCBI NO: 15233581 NR Description: hypothetical protein [Arabidopsis thaliana]
  misc_feature (1)..(336): Homolog of NCBI NO: 34908752 NR Description: P0415A04.9 [Oryza sativa (japonica
  misc_feature (1)..(354): Homolog of NCBI NO: 34908754 NR Description: P0415A04.10 [Oryza sativa (japonica
  misc_feature (1)..(314): Homolog of NCBI NO: 15233579 NR Description: hypothetical protein [Arabidopsis thaliana]
  misc_feature (1)..(354): Homolog of NCBI NO: 6554197 NR Description: T23J18.20 [Arabidopsis thaliana]
  misc_feature (1)..(354): Homolog of NCBI NO: 15220419 NR Description: expressed protein [Arabidopsis thaliana]
  misc_feature (1)..(354): Homolog of NCBI NO: 11358507 NR Description: membrane protein [imported] - Arabidopsis
  misc_feature (1)..(354): Homolog of NCBI NO: 15220600 NR Description: expressed protein [Arabidopsis thaliana]
MVTGGSIANVGCNLFVRNPKSGGKTLIDFDLALLLEPCMLLGVSIGVICNLVFPNWLITSLFAVFLAWSTLKTFGNGLYYWRLESEMVKIRESNRIEEDDDEEDKIESLKLPLLEDYQRPKRFPWIKLGALVIIWLSYFAVYLLRGNKYGEGIISIEPCGNAYWLISSSQIPLTLFFTLWICFSDNVQSQQQSDYHVSVKDVEDLRSNDGARSNKCMFPVMALLAGVLGGVFGIGGGMLISPLLLQVGIAPEVTAATCSFMVLFSSTMSAIQYLLLGMEHTGTASIFTVICFVASLVGLKVVQKVITEYGRASIIVFSVGIVMALSIVLMTSYGALDVWNDYVSGRYMGFKLPC

SEQ ID NO: 35816 - DNA, 1317 bp, Arabidopsis thaliana
  misc_feature (1)..(1317): Ceres Seq. ID no. 12421574
  misc_feature: MA Experiment ID: 108434 Result: Up-regulated in Transcription
  misc_feature: MA Experiment 108434 PARAMETER Experiment Name: At_Root_Tips_cDNA_P Parameter: Tissue Value: Root Tips
  misc_feature: MA Experiment ID: 108462 Result: Down-regulated in Transcription
  misc_feature: MA Experiment 108462 PARAMETER Experiment Name: At_Germinating_Seeds_cDNA_P Parameter: Age (day) Value: 2 vs. 0
  misc_feature: MA Experiment 108462 PARAMETER Experiment Name: At_Germinating_Seeds_cDNA_P Parameter: Tissue Value: Germinating Seeds
  misc_feature: MA Experiment ID: 108463 Result: Down-regulated in Transcription
  misc_feature: MA Experiment 108463 PARAMETER Experiment Name: At_Germinating_Seeds_cDNA_P Parameter: Age (day) Value: 3 vs. 0
  misc_feature: MA Experiment 108463 PARAMETER Experiment Name: At_Germinating_Seeds_cDNA_P Parameter: Tissue Value: Germinating Seeds
  misc_feature: MA Experiment ID: 108464 Result: Down-regulated in Transcription
  misc_feature: MA Experiment 108464 PARAMETER Experiment Name: At_Germinating_Seeds_cDNA_P Parameter: Age (day) Value: 4 vs. 0
  misc_feature: MA Experiment 108464 PARAMETER Experiment Name: At_Germinating_Seeds_cDNA_P Parameter: Tissue Value: Germinating Seeds
  misc_feature: MA Experiment ID: 108561 Result: Down-regulated in Transcription
  misc_feature: MA Experiment 108561 PARAMETER Experiment Name: At_100uM_ABA_cDNA_P Parameter: Timepoint (hr) Value: 6
  misc_feature: MA Experiment 108561 PARAMETER Experiment Name: At_100uM_ABA_cDNA_P Parameter: Tissue Value: Aerial
  misc_feature: MA Experiment 108561 PARAMETER Experiment Name: At_100uM_ABA_cDNA_P Parameter: Treatment Value: 100uM ABA vs. No Treatment
  misc_feature: MA Experiment ID: 108572 Result: Down-regulated in Transcription
  misc_feature: MA Experiment 108572 PARAMETER Experiment Name: At_Drought_cDNA_P Parameter: Timepoint (hr) Value: 1
  misc_feature: MA Experiment 108572 PARAMETER Experiment Name: At_Drought_cDNA_P Parameter: Tissue Value: Aerial
  misc_feature: MA Experiment 108572 PARAMETER Experiment Name: At_Drought_cDNA_P Parameter: Treatment Value: Drought vs. No Drought
  misc_feature: MA Experiment ID: 108607 Result: Down-regulated in Transcription
  misc_feature: MA Experiment 108607 PARAMETER Experiment Name: At_100uM_ABA_cDNA_P Parameter: Timepoint (hr) Value: 4
  misc_feature: MA Experiment 108607 PARAMETER Experiment Name: At_100uM_ABA_cDNA_P Parameter: Tissue Value: Aerial
  misc_feature: MA Experiment 108607 PARAMETER Experiment Name: At_100uM_ABA_cDNA_P Parameter: Treatment Value: 100uM ABA vs. No Treatment
  misc_feature: MA Experiment ID: 20000069 Result: Down-regulated in Transcription
  misc_feature: MA Experiment 20000069 PARAMETER Experiment Name: At_100uM_ABA_Mutants_cDNA_P Parameter: Plant Line Value: CS23
  misc_feature: MA Experiment 20000069 PARAMETER Experiment Name: At_100uM_ABA_Mutants_cDNA_P Parameter: Timepoint (hr) Value: 6
  misc_feature: MA Experiment 20000069 PARAMETER Experiment Name: At_100uM_ABA_Mutants_cDNA_P Parameter: Tissue Value: Aerial
  misc_feature: MA Experiment 20000069 PARAMETER Experiment Name: At_100uM_ABA_Mutants_cDNA_P Parameter: Treatment Value: 100uM ABA vs. No Treatment
  misc_feature: MA Experiment ID: 20000111 Result: Down-regulated in Transcription
  misc_feature: MA Experiment 20000111 PARAMETER Experiment Name: At_42deg_Heat_cDNA_P Parameter: Temperature (deg C) Value: 42 vs. 22
  misc_feature: MA Experiment 20000111 PARAMETER Experiment Name: At_42deg_Heat_cDNA_P Parameter: Timepoint (hr) Value: 6
  misc_feature: MA Experiment 20000111 PARAMETER Experiment Name: At_42deg_Heat_cDNA_P Parameter: Tissue Value: Aerial
  misc_feature: MA Experiment ID: 20000113 Result: Down-regulated in Transcription
  misc_feature: MA Experiment 20000113 PARAMETER Experiment Name: At_42deg_Heat_cDNA_P Parameter: Temperature (deg C) Value: 42 vs. 22
  misc_feature: MA Experiment 20000113 PARAMETER Experiment Name: At_42deg_Heat_cDNA_P Parameter: Timepoint (hr) Value: 8
  misc_feature: MA Experiment 20000113 PARAMETER Experiment Name: At_42deg_Heat_cDNA_P Parameter: Tissue Value: Aerial
  misc_feature: MA Experiment ID: 20000144 Result: Down-regulated in Transcription
  misc_feature: MA Experiment 20000144 PARAMETER Experiment Name: At_42deg_Heat_cDNA_P Parameter: Temperature (deg C) Value: 42 vs. 22
  misc_feature: MA Experiment 20000144 PARAMETER Experiment Name: At_42deg_Heat_cDNA_P Parameter: Timepoint (hr) Value: 1
  misc_feature: MA Experiment 20000144 PARAMETER Experiment Name: At_42deg_Heat_cDNA_P Parameter: Tissue Value: Aerial
  misc_feature: MA Experiment ID: 20001558 Result: Up-regulated in Transcription
  misc_feature: MA Experiment 20001558 PARAMETER Experiment Name: At_Drought_Soil_Dry_P Parameter: Age (day) Value: 27
  misc_feature: MA Experiment 20001558 PARAMETER Experiment Name: At_Drought_Soil_Dry_P Parameter: Organism Value: A. thaliana
  misc_feature: MA Experiment 20001558 PARAMETER Experiment Name: At_Drought_Soil_Dry_P Parameter: Plant Line Value: WS
  misc_feature: MA Experiment 20001558 PARAMETER Experiment Name: At_Drought_Soil_Dry_P Parameter: Post Timepoint (hr) Value: 6
  misc_feature: MA Experiment 20001558 PARAMETER Experiment Name: At_Drought_Soil_Dry_P Parameter: Post-Treatment Value: Re-Water vs. No Drought
  misc_feature: MA Experiment 20001558 PARAMETER Experiment Name: At_Drought_Soil_Dry_P Parameter: Timepoint (day) Value: 13
  misc_feature: MA Experiment 20001558 PARAMETER Experiment Name: At_Drought_Soil_Dry_P Parameter: Treatment Value: Drought vs. No Drought
aagaagcctattcgacttcctacttttctccgtgtttctaggactcgcatgtctctgtttatctccgattccggaacagctcggaaactcaggttcagtgttaacggcgagttcaagatactacaagtggcggatatgcattttgctaacggcgctaagacgcagtgtcaaaatgttcttcctagccagagagctcattgctcagacctcaacaccaccatcttcatgtcgcgagtcatcgccgccgagaagcctgatcttatcgtcttcaccggtgataacatatttgggtttgatgtaaaagacgctttgaaatccataaacgctgcgtttgctccagcgattgcgtctaaaatcccatgggttgctattttgggaaaccatgaccaagaatctacatttacaagacaacaagttatgaatcacattgtgaagcttcccaacactttgtctcaagtgaatcctcctgaagctgctcattacattgatggttttggtaattacaatctccaaatccatggagctgctgattcgaaactacagaacaaatctgttcttaatctttattttctcgatagtggagattattctagtgttccttacatggaaggttatgattggatcaaaacttctcagcagttttggttcgaccgcacttcaaaacgtctcaagagggagtacaacgcaaagcctaatcctcaagaaggtatagctccaggactagcttacttccacattccattaccggagtttttgagttttgactcaaagaacgctacaaaaggagtgagacaagaaggtacatccgcggcttctacaaactcgggtttcttcacaacattgatagctagaggagatgtgaaatctgtgtttgtgggtcacgaccatgtcaacgacttctgcggtgaacttaaaggtttgaatctatgttatggtggtggatttgggtatcatgcttatggtaaagctggatgggaaagaagagcgagagttgtggttgttgatttgaataagaagagaaaaggaaagtggggagctgtgaaatcgattaagacatggaagaggcttgatgataagcatctctctgttattgactctcaagttctttggaacaattctgcaaacaaattagttgttcgttgatattgattccatgtgttgttgttttgatctgtctactaaatgttctgttttagttggttttgggtttcatagaaactgtttaagtgtttatcattgagttagttttaaactccatttgatgtaattttgtttggtttaagactttaaggcaagaaagtgaaaaactaaactttc

SEQ ID NO: 35817 - protein, 380 aa, Arabidopsis thaliana
  peptide (1)..(380): Ceres Seq. ID no. 12421575
  misc_feature (38)..(298): Pfam Name: Calcineurin-like phosphoesterase Pfam Description: Calcineurin-like phosphoesterase
  misc_feature (76)..(344): Homolog of NCBI NO: 29349293 NR Description: putative phosphohydrolase, Icc family
  misc_feature (31)..(365): Homolog of NCBI NO: 40740622 NR Description: hypothetical protein AN3604.2 [Aspergillus
  misc_feature (23)..(373): Homolog of NCBI NO: 6323393 NR Description: Dose-Dependent Cell cycle Regulator; Dcr2p
  misc_feature (30)..(373): Homolog of NCBI NO: 15242042 NR Description: putative protein; protein id: At5g57140.1
  misc_feature (9)..(316): Homolog of NCBI NO: 30267809 NR Description: hypothetical protein [Arabidopsis thaliana]
  misc_feature (9)..(373): Homolog of NCBI NO: 30267807 NR Description: hypothetical protein [Arabidopsis thaliana]
  misc_feature (9)..(373): Homolog of NCBI NO: 15226455 NR Description: hypothetical protein; protein id: At2g46880.1
  misc_feature (9)..(376): Homolog of NCBI NO: 25763519 NR Description: probable phosphoesterase (EC 3.1.-.-) At2g46880 -
  misc_feature (28)..(373): Homolog of NCBI NO: 7208777 NR Description: putative PTS protein [Cicer arietinum]
  misc_feature (28)..(380): Homolog of NCBI NO: 15242654 NR Description: putative protein; protein id: At5g63140.1
KKPIRLPTFLRVSRTRMSLFISDSGTARKLRFSVNGEFKILQVADMHFANGAKTQCQNVLPSQRAHCSDLNTTIFMSRVIAAEKPDLIVFTGDNIFGFDVKDALKSINAAFAPAIASKIPWVAILGNHDQESTFTRQQVMNHIVKLPNTLSQVNPPEAAHYIDGFGNYNLQIHGAADSKLQNKSVLNLYFLDSGDYSSVPYMEGYDWIKTSQQFWFDRTSKRLKREYNAKPNPQEGIAPGLAYFHIPLPEFLSFDSKNATKGVRQEGTSAASTNSGFFTTLIARGDVKSVFVGHDHVNDFCGELKGLNLCYGGGFGYHAYGKAGWERRARVVVVDLNKKRKGKWGAVKSIKTWKRLDDKHLSVIDSQVLWNNSANKLVVR

SEQ ID NO: 35818 - protein, 364 aa, Arabidopsis thaliana
  peptide (1)..(364): Ceres Seq. ID no. 12421576
  misc_feature (22)..(282): Pfam Name: Calcineurin-like phosphoesterase Pfam Description: Calcineurin-like phosphoesterase
  misc_feature (60)..(328): Homolog of NCBI NO: 29349293 NR Description: putative phosphohydrolase, Icc family
  misc_feature (15)..(349): Homolog of NCBI NO: 40740622 NR Description: hypothetical protein AN3604.2 [Aspergillus
  misc_feature (7)..(357): Homolog of NCBI NO: 6323393 NR Description: Dose-Dependent Cell cycle Regulator; Dcr2p
  misc_feature (14)..(357): Homolog of NCBI NO: 15242042 NR Description: putative protein; protein id: At5g57140.1
  misc_feature (1)..(300): Homolog of NCBI NO: 30267809 NR Description: hypothetical protein [Arabidopsis thaliana]
  misc_feature (1)..(357): Homolog of NCBI NO: 30267807 NR Description: hypothetical protein [Arabidopsis thaliana]
  misc_feature (1)..(357): Homolog of NCBI NO: 15226455 NR Description: hypothetical protein; protein id: At2g46880.1
  misc_feature (1)..(360): Homolog of NCBI NO: 25763519 NR Description: probable phosphoesterase (EC 3.1.-.-) At2g46880 -
  misc_feature (12)..(357): Homolog of NCBI NO: 7208777 NR Description: putative PTS protein [Cicer arietinum]
  misc_feature (12)..(364): Homolog of NCBI NO: 15242654 NR Description: putative protein; protein id: At5g63140.1
MSLFISDSGTARKLRFSVNGEFKILQVADMHFANGAKTQCQNVLPSQRAHCSDLNTTIFMSRVIAAEKPDLIVFTGDNIFGFDVKDALKSINAAFAPAIASKIPWVAILGNHDQESTFTRQQVMNHIVKLPNTLSQVNPPEAAHYIDGFGNYNLQIHGAADSKLQNKSVLNLYFLDSGDYSSVPYMEGYDWIKTSQQFWFDRTSKRLKREYNAKPNPQEGIAPGLAYFHIPLPEFLSFDSKNATKGVRQEGTSAASTNSGFFTTLIARGDVKSVFVGHDHVNDFCGELKGLNLCYGGGFGYHAYGKAGWERRARVVVVDLNKKRKGKWGAVKSIKTWKRLDDKHLSVIDSQVLWNNSANKLVVR

SEQ ID NO: 35819 - protein, 335 aa, Arabidopsis thaliana
  peptide (1)..(335): Ceres Seq. ID no. 12421577
  misc_feature (1)..(253): Pfam Name: Calcineurin-like phosphoesterase Pfam Description: Calcineurin-like phosphoesterase
  misc_feature (31)..(299): Homolog of NCBI NO: 29349293 NR Description: putative phosphohydrolase, Icc family
  misc_feature (1)..(320): Homolog of NCBI NO: 40740622 NR Description: hypothetical protein AN3604.2 [Aspergillus
  misc_feature (1)..(328): Homolog of NCBI NO: 6323393 NR Description: Dose-Dependent Cell cycle Regulator; Dcr2p
  misc_feature (1)..(328): Homolog of NCBI NO: 15242042 NR Description: putative protein; protein id: At5g57140.1
  misc_feature (1)..(271): Homolog of NCBI NO: 30267809 NR Description: hypothetical protein [Arabidopsis thaliana]
  misc_feature (1)..(328): Homolog of NCBI NO: 30267807 NR Description: hypothetical protein [Arabidopsis thaliana]
  misc_feature (1)..(328): Homolog of NCBI NO: 15226455 NR Description: hypothetical protein; protein id: At2g46880.1
  misc_feature (1)..(331): Homolog of NCBI NO: 25763519 NR Description: probable phosphoesterase (EC 3.1.-.-) At2g46880 -
  misc_feature (1)..(328): Homolog of NCBI NO: 7208777 NR Description: putative PTS protein [Cicer arietinum]
  misc_feature (1)..(335): Homolog of NCBI NO: 15242654 NR Description: putative protein; protein id: At5g63140.1
MHFANGAKTQCQNVLPSQRAHCSDLNTTIFMSRVIAAEKPDLIVFTGDNIFGFDVKDALKSINAAFAPAIASKIPWVAILGNHDQESTFTRQQVMNHIVKLPNTLSQVNPPEAAHYIDGFGNYNLQIHGAADSKLQNKSVLNLYFLDSGDYSSVPYMEGYDWIKTSQQFWFDRTSKRLKREYNAKPNPQEGIAPGLAYFHIPLPEFLSFDSKNATKGVRQEGTSAASTNSGFFTTLIARGDVKSVFVGHDHVNDFCGELKGLNLCYGGGFGYHAYGKAGWERRARVVVVDLNKKRKGKWGAVKSIKTWKRLDDKHLSVIDSQVLWNNSANKLVVR

SEQ ID NO: 35820 - DNA, 1143 bp, Arabidopsis thaliana
  misc_feature (1)..(1143): Ceres Seq. ID no. 12321414
  misc_feature: MA Experiment ID: 108434 Result: Down-regulated in Transcription
  misc_feature: MA Experiment 108434 PARAMETER Experiment Name: At_Root_Tips_cDNA_P Parameter: Tissue Value: Root Tips
  misc_feature: MA Experiment ID: 108462 Result: Up-regulated in Transcription
  misc_feature: MA Experiment 108462 PARAMETER Experiment Name: At_Germinating_Seeds_cDNA_P Parameter: Age (day) Value: 2 vs. 0
  misc_feature: MA Experiment 108462 PARAMETER Experiment Name: At_Germinating_Seeds_cDNA_P Parameter: Tissue Value: Germinating Seeds
  misc_feature: MA Experiment ID: 108463 Result: Up-regulated in Transcription
  misc_feature: MA Experiment 108463 PARAMETER Experiment Name: At_Germinating_Seeds_cDNA_P Parameter: Age (day) Value: 3 vs. 0
  misc_feature: MA Experiment 108463 PARAMETER Experiment Name: At_Germinating_Seeds_cDNA_P Parameter: Tissue Value: Germinating Seeds
  misc_feature: MA Experiment ID: 108464 Result: Up-regulated in Transcription
  misc_feature: MA Experiment 108464 PARAMETER Experiment Name: At_Germinating_Seeds_cDNA_P Parameter: Age (day) Value: 4 vs. 0
  misc_feature: MA Experiment 108464 PARAMETER Experiment Name: At_Germinating_Seeds_cDNA_P Parameter: Tissue Value: Germinating Seeds
  misc_feature: MA Experiment ID: 108569 Result: Up-regulated in Transcription
  misc_feature: MA Experiment 108569 PARAMETER Experiment Name: At_0.001%_MeJA__cDNA_P Parameter: Timepoint (hr) Value: 6
  misc_feature: MA Experiment 108569 PARAMETER Experiment Name: At_0.001%_MeJA__cDNA_P Parameter: Tissue Value: Aerial
  misc_feature: MA Experiment 108569 PARAMETER Experiment Name: At_0.001%_MeJA__cDNA_P Parameter: Treatment Value: 0.001% MeJA vs. No Treatment
  misc_feature: MA Experiment ID: 108572 Result: Up-regulated in Transcription
  misc_feature: MA Experiment 108572 PARAMETER Experiment Name: At_Drought_cDNA_P Parameter: Timepoint (hr) Value: 1
  misc_feature: MA Experiment 108572 PARAMETER Experiment Name: At_Drought_cDNA_P Parameter: Tissue Value: Aerial
  misc_feature: MA Experiment 108572 PARAMETER Experiment Name: At_Drought_cDNA_P Parameter: Treatment Value: Drought vs. No Drought
  misc_feature: MA Experiment ID: 108573 Result: Up-regulated in Transcription
  misc_feature: MA Experiment 108573 PARAMETER Experiment Name: At_Drought_cDNA_P Parameter: Timepoint (hr) Value: 6
  misc_feature: MA Experiment 108573 PARAMETER Experiment Name: At_Drought_cDNA_P Parameter: Tissue Value: Aerial
  misc_feature: MA Experiment 108573 PARAMETER Experiment Name: At_Drought_cDNA_P Parameter: Treatment Value: Drought vs. No Drought
  misc_feature: MA Experiment ID: 108576 Result: Up-regulated in Transcription
  misc_feature: MA Experiment 108576 PARAMETER Experiment Name: At_42deg_Heat_cDNA_P Parameter: Temperature (deg C) Value: 42 vs. 22
  misc_feature: MA Experiment 108576 PARAMETER Experiment Name: At_42deg_Heat_cDNA_P Parameter: Timepoint (hr) Value: 1
  misc_feature: MA Experiment 108576 PARAMETER Experiment Name: At_42deg_Heat_cDNA_P Parameter: Tissue Value: Aerial
  misc_feature: MA Experiment ID: 108577 Result: Up-regulated in Transcription
  misc_feature: MA Experiment 108577 PARAMETER Experiment Name: At_42deg_Heat_cDNA_P Parameter: Temperature (deg C) Value: 42 vs. 22
  misc_feature: MA Experiment 108577 PARAMETER Experiment Name: At_42deg_Heat_cDNA_P Parameter: Timepoint (hr) Value: 6
  misc_feature: MA Experiment 108577 PARAMETER Experiment Name: At_42deg_Heat_cDNA_P Parameter: Tissue Value: Aerial
  misc_feature: MA Experiment ID: 108579 Result: Down-regulated in Transcription
  misc_feature: MA Experiment 108579 PARAMETER Experiment Name: At_4deg_Cold_cDNA_P Parameter: Temperature (deg C) Value: 4 vs. 22
  misc_feature: MA Experiment 108579 PARAMETER Experiment Name: At_4deg_Cold_cDNA_P Parameter: Timepoint (hr) Value: 6
  misc_feature: MA Experiment 108579 PARAMETER Experiment Name: At_4deg_Cold_cDNA_P Parameter: Tissue Value: Aerial
  misc_feature: MA Experiment ID: 108594 Result: Down-regulated in Transcription
  misc_feature: MA Experiment 108594 PARAMETER Experiment Name: At_Ler-rhl_Root_cDNA_P Parameter: Plant Line Value: null
  misc_feature: MA Experiment ID: 108668 Result: Up-regulated in Transcription
  misc_feature: MA Experiment 108668 PARAMETER Experiment Name: At_2mM_SA_cDNA_P Parameter: Plant Line Value: WS
  misc_feature: MA Experiment 108668 PARAMETER Experiment Name: At_2mM_SA_cDNA_P Parameter: Timepoint (hr) Value: 6
  misc_feature: MA Experiment 108668 PARAMETER Experiment Name: At_2mM_SA_cDNA_P Parameter: Treatment Value: 2mM SA vs. No Treatment
  misc_feature: MA Experiment ID: 20000069 Result: Down-regulated in Transcription
  misc_feature: MA Experiment 20000069 PARAMETER Experiment Name: At_100uM_ABA_Mutants_cDNA_P Parameter: Plant Line Value: CS23
  misc_feature: MA Experiment 20000069 PARAMETER Experiment Name: At_100uM_ABA_Mutants_cDNA_P Parameter: Timepoint (hr) Value: 6
  misc_feature: MA Experiment 20000069 PARAMETER Experiment Name: At_100uM_ABA_Mutants_cDNA_P Parameter: Tissue Value: Aerial
  misc_feature: MA Experiment 20000069 PARAMETER Experiment Name: At_100uM_ABA_Mutants_cDNA_P Parameter: Treatment Value: 100uM ABA vs. No Treatment
  misc_feature: MA Experiment ID: 20000089 Result: Down-regulated in Transcription
  misc_feature: MA Experiment ID: 20000113 Result: Up-regulated in Transcription
  misc_feature: MA Experiment 20000113 PARAMETER Experiment Name: At_42deg_Heat_cDNA_P Parameter: Temperature (deg C) Value: 42 vs. 22
  misc_feature: MA Experiment 20000113 PARAMETER Experiment Name: At_42deg_Heat_cDNA_P Parameter: Timepoint (hr) Value: 8
  misc_feature: MA Experiment 20000113 PARAMETER Experiment Name: At_42deg_Heat_cDNA_P Parameter: Tissue Value: Aerial
  misc_feature: MA Experiment ID: 20000144 Result: Up-regulated in Transcription
  misc_feature: MA Experiment 20000144 PARAMETER Experiment Name: At_42deg_Heat_cDNA_P Parameter: Temperature (deg C) Value: 42 vs. 22
  misc_feature: MA Experiment 20000144 PARAMETER Experiment Name: At_42deg_Heat_cDNA_P Parameter: Timepoint (hr) Value: 1
  misc_feature: MA Experiment 20000144 PARAMETER Experiment Name: At_42deg_Heat_cDNA_P Parameter: Tissue Value: Aerial
  misc_feature: MA Experiment ID: 20000171 Result: Up-regulated in Transcription
  misc_feature: MA Experiment 20000171 PARAMETER Experiment Name: At_42deg_Heat_P Parameter: Age (day) Value: 14
  misc_feature: MA Experiment 20000171 PARAMETER Experiment Name: At_42deg_Heat_P Parameter: Organism Value: A. thaliana
  misc_feature: MA Experiment 20000171 PARAMETER Experiment Name: At_42deg_Heat_P Parameter: Plant Line Value: WS
  misc_feature: MA Experiment 20000171 PARAMETER Experiment Name: At_42deg_Heat_P Parameter: Temperature (deg C) Value: 42 vs. 22
  misc_feature: MA Experiment 20000171 PARAMETER Experiment Name: At_42deg_Heat_P Parameter: Timepoint (hr) Value: 1
  misc_feature: MA Experiment 20000171 PARAMETER Experiment Name: At_42deg_Heat_P Parameter: Tissue Value: Aerial
  misc_feature: MA Experiment ID: 20000173 Result: Up-regulated in Transcription
  misc_feature: MA Experiment 20000173 PARAMETER Experiment Name: At_42deg_Heat_P Parameter: Age (day) Value: 14
  misc_feature: MA Experiment 20000173 PARAMETER Experiment Name: At_42deg_Heat_P Parameter: Organism Value: A. thaliana
  misc_feature: MA Experiment 20000173 PARAMETER Experiment Name: At_42deg_Heat_P Parameter: Plant Line Value: WS
  misc_feature: MA Experiment 20000173 PARAMETER Experiment Name: At_42deg_Heat_P Parameter: Temperature (deg C) Value: 42 vs. 22
  misc_feature: MA Experiment 20000173 PARAMETER Experiment Name: At_42deg_Heat_P Parameter: Timepoint (hr) Value: 6
  misc_feature: MA Experiment 20000173 PARAMETER Experiment Name: At_42deg_Heat_P Parameter: Tissue Value: Aerial
  misc_feature: MA Experiment ID: 20000180 Result: Up-regulated in Transcription
  misc_feature: MA Experiment 20000180 PARAMETER Experiment Name: At_Germinating_Seeds_P Parameter: Age (hr) Value: 24 vs. 0
  misc_feature: MA Experiment 20000180 PARAMETER Experiment Name: At_Germinating_Seeds_P Parameter: Tissue Value: Germinating Seeds
  misc_feature: MA Experiment ID: 20000182 Result: Up-regulated in Transcription
  misc_feature: MA Experiment 20000182 PARAMETER Experiment Name: At_2mM_SA_P Parameter: Age (day) Value: 14
  misc_feature: MA Experiment 20000182 PARAMETER Experiment Name: At_2mM_SA_P Parameter: Organism Value: A. thaliana
  misc_feature: MA Experiment 20000182 PARAMETER Experiment Name: At_2mM_SA_P Parameter: Plant Line Value: WS
  misc_feature: MA Experiment 20000182 PARAMETER Experiment Name: At_2mM_SA_P Parameter: Timepoint (hr) Value: 6
  misc_feature: MA Experiment 20000182 PARAMETER Experiment Name: At_2mM_SA_P Parameter: Tissue Value: Aerial
  misc_feature: MA Experiment 20000182 PARAMETER Experiment Name: At_2mM_SA_P Parameter: Treatment Value: 2mM SA vs. No Treatment
  misc_feature: MA Experiment ID: 20000184 Result: Up-regulated in Transcription
  misc_feature: MA Experiment 20000184 PARAMETER Experiment Name: At_Shoots__P Parameter: Age (day) Value: 7
  misc_feature: MA Experiment 20000184 PARAMETER Experiment Name: At_Shoots__P Parameter: Tissue Value: Shoots vs. Whole Plant
  misc_feature: MA Experiment ID: 20000185 Result: Up-regulated in Transcription
  misc_feature: MA Experiment 20000185 PARAMETER Experiment Name: At_Roots__P Parameter: Age (day) Value: 7 vs. 21
  misc_feature: MA Experiment 20000185 PARAMETER Experiment Name: At_Roots__P Parameter: Organism Value: A. thaliana
  misc_feature: MA Experiment 20000185 PARAMETER Experiment Name: At_Roots__P Parameter: Tissue Value: Roots vs. Whole Plant
  misc_feature: MA Experiment ID: 20000234 Result: Down-regulated in Transcription
  misc_feature: MA Experiment 20000234 PARAMETER Experiment Name: At_Siliques_P Parameter: Age (day) Value: 21
  misc_feature: MA Experiment 20000234 PARAMETER Experiment Name: At_Siliques_P Parameter: Organism Value: A. thaliana
  misc_feature: MA Experiment 20000234 PARAMETER Experiment Name: At_Siliques_P Parameter: Plant Line Value: WS
  misc_feature: MA Experiment 20000234 PARAMETER Experiment Name: At_Siliques_P Parameter: Tissue Value: Less Than 5mm Siliques vs. Whole Plant
  misc_feature: MA Experiment ID: 20000235 Result: Down-regulated in Transcription
  misc_feature: MA Experiment 20000235 PARAMETER Experiment Name: At_Siliques_P Parameter: Age (day) Value: 21
  misc_feature: MA Experiment 20000235 PARAMETER Experiment Name: At_Siliques_P Parameter: Organism Value: A. thaliana
  misc_feature: MA Experiment 20000235 PARAMETER Experiment Name: At_Siliques_P Parameter: Plant Line Value: WS
  misc_feature: MA Experiment 20000235 PARAMETER Experiment Name: At_Siliques_P Parameter: Tissue Value: 5-10mm Siliques vs. Whole Plant
  misc_feature: MA Experiment ID: 20000264 Result: Down-regulated in Transcription
  misc_feature: MA Experiment 20000264 PARAMETER Experiment Name: At_Open_Flower_P Parameter: Age (day) Value: 21
  misc_feature: MA Experiment 20000264 PARAMETER Experiment Name: At_Open_Flower_P Parameter: Plant Line Value: WS
  misc_feature: MA Experiment 20000264 PARAMETER Experiment Name: At_Open_Flower_P Parameter: Tissue Value: Open Flower vs. Whole Plant
  misc_feature: MA Experiment ID: 20000265 Result: Down-regulated in Transcription
  misc_feature: MA Experiment 20000265 PARAMETER Experiment Name: At_Open_Flower_P Parameter: Age (day) Value: 21
  misc_feature: MA Experiment 20000265 PARAMETER Experiment Name: At_Open_Flower_P Parameter: Plant Line Value: WS
  misc_feature: MA Experiment 20000265 PARAMETER Experiment Name: At_Open_Flower_P Parameter: Tissue Value: Closed Flower vs. Whole Plant
  misc_feature: MA Experiment ID: 20000286 Result: Down-regulated in Transcription
  misc_feature: MA Experiment 20000286 PARAMETER Experiment Name: At_Open_Flower_P Parameter: Age (day) Value: 21
  misc_feature: MA Experiment 20000286 PARAMETER Experiment Name: At_Open_Flower_P Parameter: Plant Line Value: WS
  misc_feature: MA Experiment 20000286 PARAMETER Experiment Name: At_Open_Flower_P Parameter: Tissue Value: Half Open vs. Whole Plant
  misc_feature: MA Experiment ID: 20000437 Result: Down-regulated in Transcription
  misc_feature: MA Experiment 20000437 PARAMETER Experiment Name: At_Drought_P Parameter: Age (day) Value: 8
  misc_feature: MA Experiment 20000437 PARAMETER Experiment Name: At_Drought_P Parameter: Organism Value: A. thaliana
  misc_feature: MA Experiment 20000437 PARAMETER Experiment Name: At_Drought_P Parameter: Plant Line Value: WS
  misc_feature: MA Experiment 20000437 PARAMETER Experiment Name: At_Drought_P Parameter: Timepoint (hr) Value: 24
  misc_feature: MA Experiment 20000437 PARAMETER Experiment Name: At_Drought_P Parameter: Tissue Value: Whole Plant
  misc_feature: MA Experiment 20000437 PARAMETER Experiment Name: At_Drought_P Parameter: Treatment Value: Drought vs. No Drought
  misc_feature: MA Experiment ID: 20000438 Result: Up-regulated in Transcription
  misc_feature: MA Experiment 20000438 PARAMETER Experiment Name: At_Shoots__P Parameter: Age (day) Value: 14
  misc_feature: MA Experiment 20000438 PARAMETER Experiment Name: At_Shoots__P Parameter: Tissue Value: Shoots vs. Whole Plant
  misc_feature: MA Experiment ID: 20000439 Result: Up-regulated in Transcription
  misc_feature: MA Experiment 20000439 PARAMETER Experiment Name: At_Roots__P Parameter: Age (day) Value: 14 vs. 21
  misc_feature: MA Experiment 20000439 PARAMETER Experiment Name: At_Roots__P Parameter: Organism Value: A. thaliana
  misc_feature: MA Experiment 20000439 PARAMETER Experiment Name: At_Roots__P Parameter: Tissue Value: Roots vs. Whole Plant
  misc_feature: MA Experiment ID: 20000709 Result: Down-regulated in Transcription
  misc_feature: MA Experiment 20000709 PARAMETER Experiment Name: At_15mM_NH4NO3_L-to-H_P Parameter: Age (hr) Value: 14
  misc_feature: MA Experiment 20000709 PARAMETER Experiment Name: At_15mM_NH4NO3_L-to-H_P Parameter: Organism Value: A. thaliana
  misc_feature: MA Experiment 20000709 PARAMETER Experiment Name: At_15mM_NH4NO3_L-to-H_P Parameter: Plant Line Value: WS
  misc_feature: MA Experiment 20000709 PARAMETER Experiment Name: At_15mM_NH4NO3_L-to-H_P Parameter: Timepoint (hr) Value: 4
  misc_feature: MA Experiment 20000709 PARAMETER Experiment Name: At_15mM_NH4NO3_L-to-H_P Parameter: Tissue Value: Aerial
  misc_feature: MA Experiment 20000709 PARAMETER Experiment Name: At_15mM_NH4NO3_L-to-H_P Parameter: Treatment Value: 15mM NH4NO3 vs. 30mM Mannitol
  misc_feature: MA Experiment ID: 20000794 Result: Down-regulated in Transcription
  misc_feature: MA Experiment 20000794 PARAMETER Experiment Name: At_Petals_P Parameter: Age (day) Value: 23-25 days
  misc_feature: MA Experiment 20000794 PARAMETER Experiment Name: At_Petals_P Parameter: Plant Line Value: WS
  misc_feature: MA Experiment 20000794 PARAMETER Experiment Name: At_Petals_P Parameter: Tissue Value: Petals vs. Whole plant
  misc_feature: MA Experiment ID: 20001555 Result: Down-regulated in Transcription
  misc_feature: MA Experiment 20001555 PARAMETER Experiment Name: At_Drought_Soil_Dry_P Parameter: Age (day) Value: 24
  misc_feature: MA Experiment 20001555 PARAMETER Experiment Name: At_Drought_Soil_Dry_P Parameter: Organism Value: A. thaliana
  misc_feature: MA Experiment 20001555 PARAMETER Experiment Name: At_Drought_Soil_Dry_P Parameter: Plant Line Value: WS
  misc_feature: MA Experiment 20001555 PARAMETER Experiment Name: At_Drought_Soil_Dry_P Parameter: Post Timepoint (hr) Value: None
  misc_feature: MA Experiment 20001555 PARAMETER Experiment Name: At_Drought_Soil_Dry_P Parameter: Post-Treatment Value: None
  misc_feature: MA Experiment 20001555 PARAMETER Experiment Name: At_Drought_Soil_Dry_P Parameter: Timepoint (day) Value: 10
  misc_feature: MA Experiment 20001555 PARAMETER Experiment Name: At_Drought_Soil_Dry_P Parameter: Treatment Value: Drought vs. No Drought
  misc_feature: MA Experiment ID: 20001556 Result: Down-regulated in Transcription
  misc_feature: MA Experiment 20001556 PARAMETER Experiment Name: At_Drought_Soil_Dry_P Parameter: Age (day) Value: 26
  misc_feature: MA Experiment 20001556 PARAMETER Experiment Name: At_Drought_Soil_Dry_P Parameter: Organism Value: A. thaliana
  misc_feature: MA Experiment 20001556 PARAMETER Experiment Name: At_Drought_Soil_Dry_P Parameter: Plant Line Value: WS
  misc_feature: MA Experiment 20001556 PARAMETER Experiment Name: At_Drought_Soil_Dry_P Parameter: Post Timepoint (hr) Value: None
  misc_feature: MA Experiment 20001556 PARAMETER Experiment Name: At_Drought_Soil_Dry_P Parameter: Post-Treatment Value: None
  misc_feature: MA Experiment 20001556 PARAMETER Experiment Name: At_Drought_Soil_Dry_P Parameter: Timepoint (day) Value: 12
  misc_feature: MA Experiment 20001556 PARAMETER Experiment Name: At_Drought_Soil_Dry_P Parameter: Treatment Value: Drought vs. No Drought
  misc_feature: MA Experiment ID: 20001905 Result: Down-regulated in Transcription
  misc_feature: MA Experiment 20001905 PARAMETER Experiment Name: At_Drought_Reproduction_P Parameter: Age (day) Value: 40
  misc_feature: MA Experiment 20001905 PARAMETER Experiment Name: At_Drought_Reproduction_P Parameter: Organism Value: A. thaliana
  misc_feature: MA Experiment 20001905 PARAMETER Experiment Name: At_Drought_Reproduction_P Parameter: Plant Line Value: WS
  misc_feature: MA Experiment 20001905 PARAMETER Experiment Name: At_Drought_Reproduction_P Parameter: Timepoint (day) Value: 10
  misc_feature: MA Experiment 20001905 PARAMETER Experiment Name: At_Drought_Reproduction_P Parameter: Tissue Value: Rosettes
  misc_feature: MA Experiment 20001905 PARAMETER Experiment Name: At_Drought_Reproduction_P Parameter: Treatment Value: Drought vs. No Drought
  misc_feature: MA Experiment ID: 20001911 Result: Down-regulated in Transcription
  misc_feature: MA Experiment 20001911 PARAMETER Experiment Name: At_Drought_Reproduction_P Parameter: Age (day) Value: 40
  misc_feature: MA Experiment 20001911 PARAMETER Experiment Name: At_Drought_Reproduction_P Parameter: Organism Value: A. thaliana
  misc_feature: MA Experiment 20001911 PARAMETER Experiment Name: At_Drought_Reproduction_P Parameter: Plant Line Value: WS
  misc_feature: MA Experiment 20001911 PARAMETER Experiment Name: At_Drought_Reproduction_P Parameter: Timepoint (day) Value: 10
  misc_feature: MA Experiment 20001911 PARAMETER Experiment Name: At_Drought_Reproduction_P Parameter: Tissue Value: Flowers
  misc_feature: MA Experiment 20001911 PARAMETER Experiment Name: At_Drought_Reproduction_P Parameter: Treatment Value: Drought vs. No Drought
aacaaacacaacatatccacaatacaaaacacaactttcatatataacaaaaaaagttatagaaatggccaaagacgtggaaggacctgagggatttcagacaagagactacgaagatccgccaccaactccgtttttcgatgcggacgagcttaccaagtggtctttatacagagccgtcattgccgagttcgtagccactctcctcttcttgtacatcaccgttttgactgttatcggttacaagattcagtccgacacaaaagctggtggagttgactgtggcggtgtcggaatccttggcatcgcgtgggcttttggtggcatgatcttcattcttgtctactgcaccgccggtatctcaggtggtcatataaacccggcggtgacatttggtttattcttagcccggaaggtgtcgctgattagggcggtgctttacatggtggctcagtgtttgggtgctatttgtggagttgggtttcgtcaaagctttcaaagctcttactatgatcgttacggtggaggagccaactctctagcagacggctacaacacaggcaccggactagccgcagagatcattggaacattcgttctcgtctacacagtcttctccgctactgatcccaaacgtaacgctagagactcccacgttccggttttggcgccacttccgattgggtttgcggtgtttatggtacatttggccactattccgatcaccggaaccggcatcaacccggctaggagtttcggagcgtccgtaatctataacaagagcaagccatgggatgaccactggatattctgggtgggaccattcattggagctgcgatagctgcattttatcaccaatttgtcctaagggcttcaggttccaagtcacttggatccttcagaagtgcagccaacgtttgagtttttgccacacaaaaaaaaacctatcataataacaacaattacaaaatggttgtgttattatgtatgtacaaaaattggcaactttgcttgtaaaactatgcactatatttcttcttgctttttctgttttcattgtggtgtaatactttgatatgtgccaatgccaatgtttgtgtactcgggaaaacaattaatgaaaaccaaattctttttgccct

SEQ ID NO: 35821 - protein, 306 aa, Arabidopsis thaliana
  peptide (1)..(306): Ceres Seq. ID no. 12321415
  misc_feature (50)..(285): Pfam Name: Major intrinsic protein Pfam Description: Major intrinsic protein
  misc_feature (22)..(306): Homolog of NCBI NO: 5081421 NR Description: plasma membrane intrinsic protein 1 [Brassica
  misc_feature (22)..(306): Homolog of NCBI NO: 15231810 NR Description: plasma membrane intrinsic protein 2a
  misc_feature (22)..(304): Homolog of NCBI NO: 7209562 NR Description: Plasma membrane aquaporin 2c [Raphanus sativus]
  misc_feature (22)..(304): Homolog of NCBI NO: 5081423 NR Description: plasma membrane intrinsic protein 2 [Brassica
  misc_feature (22)..(304): Homolog of NCBI NO: 7209560 NR Description: Plasma membrane aquaporin 2b [Raphanus sativus]
  misc_feature (22)..(306): Homolog of NCBI NO: 21537097 NR Description: aquaporin (plasma membrane intrinsic protein 2C)
  misc_feature (22)..(306): Homolog of NCBI NO: 15228096 NR Description: aquaporin (plasma membrane intrinsic protein 2C)
  misc_feature (22)..(306): Homolog of NCBI NO: 21554356 NR Description: aquaporin (plasma membrane intrinsic protein 2B)
  misc_feature (22)..(306): Homolog of NCBI NO: 15228095 NR Description: aquaporin (plasma membrane intrinsic protein 2B)
  misc_feature (22)..(306): Homolog of NCBI NO: 629543 NR Description: plasma membrane intrinsic protein 2b -
TNTTYPQYKTQLSYITKKVIEMAKDVEGPEGFQTRDYEDPPPTPFFDADELTKWSLYRAVIAEFVATLLFLYITVLTVIGYKIQSDTKAGGVDCGGVGILGIAWAFGGMIFILVYCTAGISGGHINPAVTFGLFLARKVSLIRAVLYMVAQCLGAICGVGFRQSFQSSYYDRYGGGANSLADGYNTGTGLAAEIIGTFVLVYTVFSATDPKRNARDSHVPVLAPLPIGFAVFMVHLATIPITGTGINPARSFGASVIYNKSKPWDDHWIFWVGPFIGAAIAAFYHQFVLRASGSKSLGSFRSAANV

SEQ ID NO: 35822 - protein, 285 aa, Arabidopsis thaliana
  peptide (1)..(285): Ceres Seq. ID no. 12321416
  misc_feature (29)..(264): Pfam Name: Major intrinsic protein Pfam Description: Major intrinsic protein
  misc_feature (1)..(285): Homolog of NCBI NO: 5081421 NR Description: plasma membrane intrinsic protein 1 [Brassica
  misc_feature (1)..(285): Homolog of NCBI NO: 15231810 NR Description: plasma membrane intrinsic protein 2a
  misc_feature (1)..(283): Homolog of NCBI NO: 7209562 NR Description: Plasma membrane aquaporin 2c [Raphanus sativus]
  misc_feature (1)..(283): Homolog of NCBI NO: 5081423 NR Description: plasma membrane intrinsic protein 2 [Brassica
  misc_feature (1)..(283): Homolog of NCBI NO: 7209560 NR Description: Plasma membrane aquaporin 2b [Raphanus sativus]
  misc_feature (1)..(285): Homolog of NCBI NO: 21537097 NR Description: aquaporin (plasma membrane intrinsic protein 2C)
  misc_feature (1)..(285): Homolog of NCBI NO: 15228096 NR Description: aquaporin (plasma membrane intrinsic protein 2C)
  misc_feature (1)..(285): Homolog of NCBI NO: 21554356 NR Description: aquaporin (plasma membrane intrinsic protein 2B)
  misc_feature (1)..(285): Homolog of NCBI NO: 15228095 NR Description: aquaporin (plasma membrane intrinsic protein 2B)
  misc_feature (1)..(285): Homolog of NCBI NO: 629543 NR Description: plasma membrane intrinsic protein 2b -
MAKDVEGPEGFQTRDYEDPPPTPFFDADELTKWSLYRAVIAEFVATLLFLYITVLTVIGYKIQSDTKAGGVDCGGVGILGIAWAFGGMIFILVYCTAGISGGHINPAVTFGLFLARKVSLIRAVLYMVAQCLGAICGVGFRQSFQSSYYDRYGGGANSLADGYNTGTGLAAEIIGTFVLVYTVFSATDPKRNARDSHVPVLAPLPIGFAVFMVHLATIPITGTGINPARSFGASVIYNKSKPWDDHWIFWVGPFIGAAIAAFYHQFVLRASGSKSLGSFRSAANV

SEQ ID NO: 35823 - protein, 198 aa, Arabidopsis thaliana
  peptide (1)..(198): Ceres Seq. ID no. 12321417
  misc_feature (1)..(177): Pfam Name: Major intrinsic protein Pfam Description: Major intrinsic protein
  misc_feature (1)..(198): Homolog of NCBI NO: 5081421 NR Description: plasma membrane intrinsic protein 1 [Brassica
  misc_feature (1)..(198): Homolog of NCBI NO: 15231810 NR Description: plasma membrane intrinsic protein 2a
  misc_feature (1)..(196): Homolog of NCBI NO: 7209562 NR Description: Plasma membrane aquaporin 2c [Raphanus sativus]
  misc_feature (1)..(196): Homolog of NCBI NO: 5081423 NR Description: plasma membrane intrinsic protein 2 [Brassica
  misc_feature (1)..(196): Homolog of NCBI NO: 7209560 NR Description: Plasma membrane aquaporin 2b [Raphanus sativus]
  misc_feature (1)..(198): Homolog of NCBI NO: 21537097 NR Description: aquaporin (plasma membrane intrinsic protein 2C)
  misc_feature (1)..(198): Homolog of NCBI NO: 15228096 NR Description: aquaporin (plasma membrane intrinsic protein 2C)
  misc_feature (1)..(198): Homolog of NCBI NO: 21554356 NR Description: aquaporin (plasma membrane intrinsic protein 2B)
  misc_feature (1)..(198): Homolog of NCBI NO: 15228095 NR Description: aquaporin (plasma membrane intrinsic protein 2B)
  misc_feature (1)..(198): Homolog of NCBI NO: 629543 NR Description: plasma membrane intrinsic protein 2b -
MIFILVYCTAGISGGHINPAVTFGLFLARKVSLIRAVLYMVAQCLGAICGVGFRQSFQSSYYDRYGGGANSLADGYNTGTGLAAEIIGTFVLVYTVFSATDPKRNARDSHVPVLAPLPIGFAVFMVHLATIPITGTGINPARSFGASVIYNKSKPWDDHWIFWVGPFIGAAIAAFYHQFVLRASGSKSLGSFRSAANV

SEQ ID NO: 35824 - DNA, 1530 bp, Arabidopsis thaliana
  misc_feature (1)..(1530): Ceres Seq. ID no. 13487891
  misc_feature: MA Experiment ID: 108595 Result: Down-regulated in Transcription
  misc_feature: MA Experiment 108595 PARAMETER Experiment Name: At_Ler-pi_Ovule_cDNA_P Parameter: Plant Line Value: null
  misc_feature: MA Experiment ID: 20000314 Result: Down-regulated in Transcription
  misc_feature: MA Experiment 20000314 PARAMETER Experiment Name: At_14day_Shoots-Roots_Sub_P Parameter: Age (day) Value: 14
  misc_feature: MA Experiment 20000314 PARAMETER Experiment Name: At_14day_Shoots-Roots_Sub_P Parameter: Organism Value: A. thaliana
  misc_feature: MA Experiment 20000314 PARAMETER Experiment Name: At_14day_Shoots-Roots_Sub_P Parameter: Plant Line Value: WS
  misc_feature: MA Experiment 20000314 PARAMETER Experiment Name: At_14day_Shoots-Roots_Sub_P Parameter: Tissue Value: Roots vs. Whole Plant
aacttgccaataattttttcaactgttacagattactacatcaacgaaatattaaacatttaaccatatataaaagttggagatatatgatataagcttttcttagcagtcccacccttcctctctcgagagagctccattccaatcaaagctgtaaacacacttcagaagatggagatcactaacgttaccgagtatgatgcaatcgcaaaggcgaagttgcctaagatggtatatgactactatgcatctggtgcagaagatcaatggactcttcaagagaacagaaacgcttttgcaagaatcctcttccggcctcggattttgattgatgtgaacaaaattgatatggcgactaccgtcttggggttcaagatctcgatgccgatcatggttgctcctactgcctttcaaaagatggctcaccctgatggggaatatgctacggctagagctgcgtctgctgctggaaccatcatgacactatcttcatgggctacttcaagtgttgaagaagttgcttccacagggccaggaatccgattcttccagctctatgtatacaagaacaggaaggtggttgagcagctcgtgagaagagccgagaaagctgggttcaaagccattgctctcactgtagacaccccaaggctaggtcgcagagagtctgatatcaagaacagattcactttgcctccaaacctgacattgaagaactttgaaggtcttgaccttggaaagatggacgaggccaatgactctggcttggcttcgtatgttgctggtcaaattgaccgtaccttgagctggaaggatatccagtggctccaaacaatcaccaacatgccaattcttgtcaagggtgttcttacaggagaggatgcaaggatagcgattcaagctggagcagcagggatcattgtgtcaaatcatggagctcgccagcttgattatgtcccagcaacaatctcagcccttgaagaggttgtcaaagcaacacaaggacgagttcctgtcttcttggatggtggtgttcgacgtggcactgatgtcttcaaggcacttgcacttggagcctctggaatatttattggaagaccagtggtttttgcactagctgctgaaggagaagccggagtcaaaaaggtgcttcaaatgttgcgtgatgagttcgagctaaccatggcactaagtgggtgccggtcactcagtgaaatcacccgtaaccacattgtcacggaatgggacactccacgccatttgcccaggttatagagaagaaaaaaaaaacagagaacagaaacaacacggcaccaaaacgtattcatattctgattgatcactttgcttctactctgctatatttatatctcgaaaaacttgtttctccctatatcggatcacaaaaacgtgcgtagagattctctgtaatgctatttggctacattttacctttccgtttattcttattgcttgtacaatagatgttgattcctacaataccaatgaatactaaaatctgttcccggg

SEQ ID NO: 35825 - protein, 367 aa, Arabidopsis thaliana
  peptide (1)..(367): Ceres Seq. ID no. 13487892
  misc_feature (13)..(356): Pfam Name: FMN-dependent dehydrogenase Pfam Description: FMN-dependent dehydrogenase
  misc_feature (1)..(359): Homolog of NCBI NO: 2554675 NR Description: Three-Dimensional Structure Of Glycolate Oxidase
  misc_feature (1)..(367): Homolog of NCBI NO: 999542 NR Description: Chain A, Glycolate Oxidase (E.C.1.1.3.15) Mutant
  misc_feature (1)..(367): Homolog of NCBI NO: 121530 NR Description: (S)-2-hydroxy-acid oxidase, peroxisomal
  misc_feature (1)..(366): Homolog of NCBI NO: 228403 NR Description: glycolate oxidase
  misc_feature (1)..(367): Homolog of NCBI NO: 27549566 NR Description: glycolate oxidase [Zantedeschia aethiopica]
  misc_feature (1)..(367): Homolog of NCBI NO: 1773330 NR Description: glycolate oxidase [Mesembryanthemum crystallinum]
  misc_feature (1)..(367): Homolog of NCBI NO: 7431428 NR Description: (S)-2-hydroxy-acid oxidase (EC 1.1.3.15) -
  misc_feature (1)..(367): Homolog of NCBI NO: 16226772 NR Description: AT3g14420/MOA2_2 [Arabidopsis thaliana]
  misc_feature (1)..(367): Homolog of NCBI NO: 15231850 NR Description: glycolate oxidase -related [Arabidopsis thaliana]
  misc_feature (1)..(367): Homolog of NCBI NO: 15229497 NR Description: glycolate oxidase [Arabidopsis thaliana]
MEITNVTEYDAIAKAKLPKMVYDYYASGAEDQWTLQENRNAFARILFRPRILIDVNKIDMATTVLGFKISMPIMVAPTAFQKMAHPDGEYATARAASAAGTIMTLSSWATSSVEEVASTGPGIRFFQLYVYKNRKVVEQLVRRAEKAGFKAIALTVDTPRLGRRESDIKNRFTLPPNLTLKNFEGLDLGKMDEANDSGLASYVAGQIDRTLSWKDIQWLQTITNMPILVKGVLTGEDARIAIQAGAAGIIVSNHGARQLDYVPATISALEEVVKATQGRVPVFLDGGVRRGTDVFKALALGASGIFIGRPVVFALAAEGEAGVKKVLQMLRDEFELTMALSGCRSLSEITRNHIVTEWDTPRHLPRL

SEQ ID NO: 35826 - protein, 348 aa, Arabidopsis thaliana
  peptide (1)..(348): Ceres Seq. ID no. 13487893
  misc_feature (1)..(337): Pfam Name: FMN-dependent dehydrogenase Pfam Description: FMN-dependent dehydrogenase
  misc_feature (1)..(340): Homolog of NCBI NO: 2554675 NR Description: Three-Dimensional Structure Of Glycolate Oxidase
  misc_feature (1)..(348): Homolog of NCBI NO: 999542 NR Description: Chain A, Glycolate Oxidase (E.C.1.1.3.15) Mutant
  misc_feature (1)..(348): Homolog of NCBI NO: 121530 NR Description: (S)-2-hydroxy-acid oxidase, peroxisomal
  misc_feature (1)..(347): Homolog of NCBI NO: 228403 NR Description: glycolate oxidase
  misc_feature (1)..(348): Homolog of NCBI NO: 27549566 NR Description: glycolate oxidase [Zantedeschia aethiopica]
  misc_feature (1)..(348): Homolog of NCBI NO: 1773330 NR Description: glycolate oxidase [Mesembryanthemum crystallinum]
  misc_feature (1)..(348): Homolog of NCBI NO: 7431428 NR Description: (S)-2-hydroxy-acid oxidase (EC 1.1.3.15) -
  misc_feature (1)..(348): Homolog of NCBI NO: 16226772 NR Description: AT3g14420/MOA2_2 [Arabidopsis thaliana]
  misc_feature (1)..(348): Homolog of NCBI NO: 15231850 NR Description: glycolate oxidase -related [Arabidopsis thaliana]
  misc_feature (1)..(348): Homolog of NCBI NO: 15229497 NR Description: glycolate oxidase [Arabidopsis thaliana]
MVYDYYASGAEDQWTLQENRNAFARILFRPRILIDVNKIDMATTVLGFKISMPIMVAPTAFQKMAHPDGEYATARAASAAGTIMTLSSWATSSVEEVASTGPGIRFFQLYVYKNRKVVEQLVRRAEKAGFKAIALTVDTPRLGRRESDIKNRFTLPPNLTLKNFEGLDLGKMDEANDSGLASYVAGQIDRTLSWKDIQWLQTITNMPILVKGVLTGEDARIAIQAGAAGIIVSNHGARQLDYVPATISALEEVVKATQGRVPVFLDGGVRRGTDVFKALALGASGIFIGRPVVFALAAEGEAGVKKVLQMLRDEFELTMALSGCRSLSEITRNHIVTEWDTPRHLPRL

SEQ ID NO: 35827 - protein, 308 aa, Arabidopsis thaliana
  peptide (1)..(308): Ceres Seq. ID no. 13487894
  misc_feature (1)..(297): Pfam Name: FMN-dependent dehydrogenase Pfam Description: FMN-dependent dehydrogenase
  misc_feature (1)..(300): Homolog of NCBI NO: 2554675 NR Description: Three-Dimensional Structure Of Glycolate Oxidase
  misc_feature (1)..(308): Homolog of NCBI NO: 999542 NR Description: Chain A, Glycolate Oxidase (E.C.1.1.3.15) Mutant
  misc_feature (1)..(308): Homolog of NCBI NO: 121530 NR Description: (S)-2-hydroxy-acid oxidase, peroxisomal
  misc_feature (1)..(307): Homolog of NCBI NO: 228403 NR Description: glycolate oxidase
  misc_feature (1)..(308): Homolog of NCBI NO: 27549566 NR Description: glycolate oxidase [Zantedeschia aethiopica]
  misc_feature (1)..(308): Homolog of NCBI NO: 1773330 NR Description: glycolate oxidase [Mesembryanthemum crystallinum]
  misc_feature (1)..(308): Homolog of NCBI NO: 7431428 NR Description: (S)-2-hydroxy-acid oxidase (EC 1.1.3.15) -
  misc_feature (1)..(308): Homolog of NCBI NO: 16226772 NR Description: AT3g14420/MOA2_2 [Arabidopsis thaliana]
  misc_feature (1)..(308): Homolog of NCBI NO: 15231850 NR Description: glycolate oxidase -related [Arabidopsis thaliana]
  misc_feature (1)..(308): Homolog of NCBI NO: 15229497 NR Description: glycolate oxidase [Arabidopsis thaliana]
MATTVLGFKISMPIMVAPTAFQKMAHPDGEYATARAASAAGTIMTLSSWATSSVEEVASTGPGIRFFQLYVYKNRKVVEQLVRRAEKAGFKAIALTVDTPRLGRRESDIKNRFTLPPNLTLKNFEGLDLGKMDEANDSGLASYVAGQIDRTLSWKDIQWLQTITNMPILVKGVLTGEDARIAIQAGAAGIIVSNHGARQLDYVPATISALEEVVKATQGRVPVFLDGGVRRGTDVFKALALGASGIFIGRPVVFALAAEGEAGVKKVLQMLRDEFELTMALSGCRSLSEITRNHIVTEWDTPRHLPRL

SEQ ID NO: 35828 - DNA, 749 bp, Arabidopsis thaliana
  misc_feature (1)..(749): Ceres Seq. ID no. 12337355
  misc_feature: MA Experiment ID: 20000179 Result: Up-regulated in Transcription
  misc_feature: MA Experiment 20000179 PARAMETER Experiment Name: At_Germinating_Seeds_P Parameter: Age (hr) Value: 6 vs. 0
  misc_feature: MA Experiment 20000179 PARAMETER Experiment Name: At_Germinating_Seeds_P Parameter: Tissue Value: Germinating Seeds
  misc_feature: MA Experiment ID: 20000180 Result: Up-regulated in Transcription
  misc_feature: MA Experiment 20000180 PARAMETER Experiment Name: At_Germinating_Seeds_P Parameter: Age (hr) Value: 24 vs. 0
  misc_feature: MA Experiment 20000180 PARAMETER Experiment Name: At_Germinating_Seeds_P Parameter: Tissue Value: Germinating Seeds
  misc_feature: MA Experiment ID: 20000214 Result: Down-regulated in Transcription
  misc_feature: MA Experiment 20000214 PARAMETER Experiment Name: At_4deg_Cold_P Parameter: Timepoint (hr) Value: 6
  misc_feature: MA Experiment ID: 20001558 Result: Down-regulated in Transcription
  misc_feature: MA Experiment 20001558 PARAMETER Experiment Name: At_Drought_Soil_Dry_P Parameter: Age (day) Value: 27
  misc_feature: MA Experiment 20001558 PARAMETER Experiment Name: At_Drought_Soil_Dry_P Parameter: Organism Value: A. thaliana
  misc_feature: MA Experiment 20001558 PARAMETER Experiment Name: At_Drought_Soil_Dry_P Parameter: Plant Line Value: WS
  misc_feature: MA Experiment 20001558 PARAMETER Experiment Name: At_Drought_Soil_Dry_P Parameter: Post Timepoint (hr) Value: 6
  misc_feature: MA Experiment 20001558 PARAMETER Experiment Name: At_Drought_Soil_Dry_P Parameter: Post-Treatment Value: Re-Water vs. No Drought
  misc_feature: MA Experiment 20001558 PARAMETER Experiment Name: At_Drought_Soil_Dry_P Parameter: Timepoint (day) Value: 13
  misc_feature: MA Experiment 20001558 PARAMETER Experiment Name: At_Drought_Soil_Dry_P Parameter: Treatment Value: Drought vs. No Drought
atcgtcatcgtgaaatgtgcagctccggaaataaataatcactaaaataaccagatccgatctactgccccggtttctcgccggagtctccatcctgtaaccggcgatcctctttctgctcagttatggaagacgtgaaagggaaggagattattgatgatgctcctattgacagcaaggtttcagatgaaatggagagtgaggaaaatgcgatcaagaaaaagtatggaggattgttgcctaagaagattcctttgatatctaaggaccatgaacgtgcgttttttgattctgctgattgggctttaggcaagcaaaaaggacagaagccgaaaggacctttggaagctctccgcccaaaactgcagccaaccccgcaacagcaaccaagagcaagacgaatggcttattcttcaggcgaaactgaagactctgagactgataacaacgaagctccggatgaccaagcctgcgcatcagctgtcgatagtaccaatttaaaggacgatggaggcgcaaaagacaacatcaaatcatgaacaacatatagatatctcttgaggagcgcaaacaaacaacatcacaagtcaatttacagaagaataagcgaccaggtttgctttgcaacggttgtaatatcaagtctcttaccttatcatacttgggactgcaaatctgtatcacttacaaacctcgtggcttgaaacgtctattggacgattgcaaattatttgctttaatgatccatc

SEQ ID NO: 35829 - protein, 137 aa, Arabidopsis thaliana
  peptide (1)..(137): Ceres Seq. ID no. 12337356
  misc_feature (16)..(105): Homolog of NCBI NO: 26453128 NR Description: unknown protein [Arabidopsis thaliana]
  misc_feature (16)..(105): Homolog of NCBI NO: 21592601 NR Description: unknown [Arabidopsis thaliana]
  misc_feature (16)..(105): Homolog of NCBI NO: 18414599 NR Description: Expressed protein
  misc_feature (38)..(99): Homolog of NCBI NO: 10176961 NR Description: gene_id:MHJ24.11~unknown protein [Arabidopsis
  misc_feature (35)..(102): Homolog of NCBI NO: 100536 NR Description: hypothetical protein - swollen duckweed
  misc_feature (35)..(109): Homolog of NCBI NO: 100535 NR Description: hypothetical protein - swollen duckweed
  misc_feature (1)..(99): Homolog of NCBI NO: 18424791 NR Description: expressed protein
  misc_feature (30)..(127): Homolog of NCBI NO: 4164473 NR Description: negatively light-regulated protein [Vernicia
  misc_feature (1)..(104): Homolog of NCBI NO: 34902768 NR Description: unnamed protein product [Oryza sativa (japonica
  misc_feature (1)..(137): Homolog of NCBI NO: 18409295 NR Description: expressed protein
MEDVKGKEIIDDAPIDSKVSDEMESEENAIKKKYGGLLPKKIPLISKDHERAFFDSADWALGKQKGQKPKGPLEALRPKLQPTPQQQPRARRMAYSSGETEDSETDNNEAPDDQACASAVDSTNLKDDGGAKDNIKS

SEQ ID NO: 35830 - protein, 115 aa, Arabidopsis thaliana
  peptide (1)..(115): Ceres Seq. ID no. 12337357
  misc_feature (1)..(83): Homolog of NCBI NO: 26453128 NR Description: unknown protein [Arabidopsis thaliana]
  misc_feature (1)..(83): Homolog of NCBI NO: 21592601 NR Description: unknown [Arabidopsis thaliana]
  misc_feature (1)..(83): Homolog of NCBI NO: 18414599 NR Description: Expressed protein
  misc_feature (16)..(77): Homolog of NCBI NO: 10176961 NR Description: gene_id:MHJ24.11~unknown protein [Arabidopsis
  misc_feature (13)..(80): Homolog of NCBI NO: 100536 NR Description: hypothetical protein - swollen duckweed
  misc_feature (13)..(87): Homolog of NCBI NO: 100535 NR Description: hypothetical protein - swollen duckweed
  misc_feature (1)..(77): Homolog of NCBI NO: 18424791 NR Description: expressed protein
  misc_feature (8)..(105): Homolog of NCBI NO: 4164473 NR Description: negatively light-regulated protein [Vernicia
  misc_feature (1)..(82): Homolog of NCBI NO: 34902768 NR Description: unnamed protein product [Oryza sativa (japonica
  misc_feature (1)..(115): Homolog of NCBI NO: 18409295 NR Description: expressed protein
MESEENAIKKKYGGLLPKKIPLISKDHERAFFDSADWALGKQKGQKPKGPLEALRPKLQPTPQQQPRARRMAYSSGETEDSETDNNEAPDDQACASAVDSTNLKDDGGAKDNIKS

SEQ ID NO: 35831 - DNA, 1303 bp, Arabidopsis thaliana
  misc_feature (1)..(1303): Ceres Seq. ID no. 12379218
  misc_feature: MA Experiment ID: 108434 Result: Up-regulated in Transcription
  misc_feature: MA Experiment 108434 PARAMETER Experiment Name: At_Root_Tips_cDNA_P Parameter: Tissue Value: Root Tips
  misc_feature: MA Experiment ID: 108461 Result: Down-regulated in Transcription
  misc_feature: MA Experiment 108461 PARAMETER Experiment Name: At_Germinating_Seeds_cDNA_P Parameter: Age (day) Value: 1 vs. 0
  misc_feature: MA Experiment 108461 PARAMETER Experiment Name: At_Germinating_Seeds_cDNA_P Parameter: Tissue Value: Germinating Seeds
  misc_feature: MA Experiment ID: 108462 Result: Down-regulated in Transcription
  misc_feature: MA Experiment 108462 PARAMETER Experiment Name: At_Germinating_Seeds_cDNA_P Parameter: Age (day) Value: 2 vs. 0
  misc_feature: MA Experiment 108462 PARAMETER Experiment Name: At_Germinating_Seeds_cDNA_P Parameter: Tissue Value: Germinating Seeds
  misc_feature: MA Experiment ID: 108463 Result: Down-regulated in Transcription
  misc_feature: MA Experiment 108463 PARAMETER Experiment Name: At_Germinating_Seeds_cDNA_P Parameter: Age (day) Value: 3 vs. 0
  misc_feature: MA Experiment 108463 PARAMETER Experiment Name: At_Germinating_Seeds_cDNA_P Parameter: Tissue Value: Germinating Seeds
  misc_feature: MA Experiment ID: 108464 Result: Down-regulated in Transcription
  misc_feature: MA Experiment 108464 PARAMETER Experiment Name: At_Germinating_Seeds_cDNA_P Parameter: Age (day) Value: 4 vs. 0
  misc_feature: MA Experiment 108464 PARAMETER Experiment Name: At_Germinating_Seeds_cDNA_P Parameter: Tissue Value: Germinating Seeds
  misc_feature: MA Experiment ID: 108488 Result: Up-regulated in Transcription
  misc_feature: MA Experiment ID: 108489 Result: Up-regulated in Transcription
  misc_feature: MA Experiment ID: 108573 Result: Down-regulated in Transcription
  misc_feature: MA Experiment 108573 PARAMETER Experiment Name: At_Drought_cDNA_P Parameter: Timepoint (hr) Value: 6
  misc_feature: MA Experiment 108573 PARAMETER Experiment Name: At_Drought_cDNA_P Parameter: Tissue Value: Aerial
  misc_feature: MA Experiment 108573 PARAMETER Experiment Name: At_Drought_cDNA_P Parameter: Treatment Value: Drought vs. No Drought
  misc_feature: MA Experiment ID: 108577 Result: Down-regulated in Transcription
  misc_feature: MA Experiment 108577 PARAMETER Experiment Name: At_42deg_Heat_cDNA_P Parameter: Temperature (deg C) Value: 42 vs. 22
  misc_feature: MA Experiment 108577 PARAMETER Experiment Name: At_42deg_Heat_cDNA_P Parameter: Timepoint (hr) Value: 6
  misc_feature: MA Experiment 108577 PARAMETER Experiment Name: At_42deg_Heat_cDNA_P Parameter: Tissue Value: Aerial
  misc_feature: MA Experiment ID: 20000090 Result: Up-regulated in Transcription
  misc_feature: MA Experiment ID: 20000180 Result: Down-regulated in Transcription
  misc_feature: MA Experiment 20000180 PARAMETER Experiment Name: At_Germinating_Seeds_P Parameter: Age (hr) Value: 24 vs. 0
  misc_feature: MA Experiment 20000180 PARAMETER Experiment Name: At_Germinating_Seeds_P Parameter: Tissue Value: Germinating Seeds
  misc_feature: MA Experiment ID: 20001451 Result: Down-regulated in Transcription
  misc_feature: MA Experiment 20001451 PARAMETER Experiment Name: At_Far-red-induction_P Parameter: Age (day) Value: 7
  misc_feature: MA Experiment 20001451 PARAMETER Experiment Name: At_Far-red-induction_P Parameter: Light Value: Far-red vs. White
  misc_feature: MA Experiment 20001451 PARAMETER Experiment Name: At_Far-red-induction_P Parameter: Organism Value: A. thaliana
  misc_feature: MA Experiment 20001451 PARAMETER Experiment Name: At_Far-red-induction_P Parameter: Plant Line Value: Columbia
  misc_feature: MA Experiment 20001451 PARAMETER Experiment Name: At_Far-red-induction_P Parameter: Timepoint (hr) Value: 24
  misc_feature: MA Experiment 20001451 PARAMETER Experiment Name: At_Far-red-induction_P Parameter: Tissue Value: Whole Plant
  misc_feature: MA Experiment ID: 20001458 Result: Up-regulated in Transcription
  misc_feature: MA Experiment 20001458 PARAMETER Experiment Name: At_50mM_NH4NO3_L-to-H_P Parameter: Age (day) Value: Undefined
  misc_feature: MA Experiment 20001458 PARAMETER Experiment Name: At_50mM_NH4NO3_L-to-H_P Parameter: Organism Value: Undefined
  misc_feature: MA Experiment 20001458 PARAMETER Experiment Name: At_50mM_NH4NO3_L-to-H_P Parameter: Plant Line Value: Undefined
  misc_feature: MA Experiment 20001458 PARAMETER Experiment Name: At_50mM_NH4NO3_L-to-H_P Parameter: Timepoint (hr) Value: 2
  misc_feature: MA Experiment 20001458 PARAMETER Experiment Name: At_50mM_NH4NO3_L-to-H_P Parameter: Tissue Value: Siliques
  misc_feature: MA Experiment 20001458 PARAMETER Experiment Name: At_50mM_NH4NO3_L-to-H_P Parameter: Treatment Value: 50mM NH4NO3 vs. 100mM Manitol
  misc_feature: MA Experiment ID: 20001557 Result: Up-regulated in Transcription
  misc_feature: MA Experiment 20001557 PARAMETER Experiment Name: At_Drought_Soil_Dry_P Parameter: Age (day) Value: 27
  misc_feature: MA Experiment 20001557 PARAMETER Experiment Name: At_Drought_Soil_Dry_P Parameter: Organism Value: A. thaliana
  misc_feature: MA Experiment 20001557 PARAMETER Experiment Name: At_Drought_Soil_Dry_P Parameter: Plant Line Value: WS
  misc_feature: MA Experiment 20001557 PARAMETER Experiment Name: At_Drought_Soil_Dry_P Parameter: Post Timepoint (hr) Value: 3
  misc_feature: MA Experiment 20001557 PARAMETER Experiment Name: At_Drought_Soil_Dry_P Parameter: Post-Treatment Value: Re-Water vs. No Drought
  misc_feature: MA Experiment 20001557 PARAMETER Experiment Name: At_Drought_Soil_Dry_P Parameter: Timepoint (day) Value: 13
  misc_feature: MA Experiment 20001557 PARAMETER Experiment Name: At_Drought_Soil_Dry_P Parameter: Treatment Value: Drought vs. No Drought
  misc_feature: MA Experiment ID: 20001558 Result: Up-regulated in Transcription
  misc_feature: MA Experiment 20001558 PARAMETER Experiment Name: At_Drought_Soil_Dry_P Parameter: Age (day) Value: 27
  misc_feature: MA Experiment 20001558 PARAMETER Experiment Name: At_Drought_Soil_Dry_P Parameter: Organism Value: A. thaliana
  misc_feature: MA Experiment 20001558 PARAMETER Experiment Name: At_Drought_Soil_Dry_P Parameter: Plant Line Value: WS
  misc_feature: MA Experiment 20001558 PARAMETER Experiment Name: At_Drought_Soil_Dry_P Parameter: Post Timepoint (hr) Value: 6
  misc_feature: MA Experiment 20001558 PARAMETER Experiment Name: At_Drought_Soil_Dry_P Parameter: Post-Treatment Value: Re-Water vs. No Drought
  misc_feature: MA Experiment 20001558 PARAMETER Experiment Name: At_Drought_Soil_Dry_P Parameter: Timepoint (day) Value: 13
  misc_feature: MA Experiment 20001558 PARAMETER Experiment Name: At_Drought_Soil_Dry_P Parameter: Treatment Value: Drought vs. No Drought
  misc_feature: MA Experiment ID: 20001757 Result: Up-regulated in Transcription
  misc_feature: MA Experiment 20001757 PARAMETER Experiment Name: At_50mM_NH4NO3_L-to-H_P Parameter: Timepoint (hr) Value: 6
  misc_feature: MA Experiment 20001757 PARAMETER Experiment Name: At_50mM_NH4NO3_L-to-H_P Parameter: Tissue Value: Leaf
  misc_feature: MA Experiment 20001757 PARAMETER Experiment Name: At_50mM_NH4NO3_L-to-H_P Parameter: Treatment Value: 50mM NH4NO3 vs 100mM Mannitol
attctcagctttgccgttttcatcgattaaagagagagaggcttcgttcgccgtccgtcgtagaaatggggttcaagaggaagaaagatgatggtgatggtgaggaaatggaatctgatgttcgtggaaagtctactttcagtgggggtgagaagaggaatgtgatacttccttcgatgattaagaacaaagataagagatcaaaagtgtatgcgaagcagaagcatgagaagaaattggagaagcagaagaagattagagctcgtgatgctgctgagaaacgagctttagagcttggagaagagcctccacaaaagatgattccgaagacgattgagaatacaagagaatctgatgaaactgtttgcagacctgacgatgaagaattgtttgcggatattgatgctgatgagtttaatccagttctgagacgtgagattgcacctaaggtcttgctcacaacatgtcgtttcaattccactagaggacctgctttaatatctgagttgctttcggtgataccaaactctcattatcaaaagagaggaacctatgatttgaagaagattgtagaatacgcaacgaagaaagattttacatctcttattgttgttcatacaaatcgtagagaacctgatgcgcttcttatcatcggtttgccaaatggtcctactgctcatttcaaattgtcaaatcttgttctaaggaaggatattaagaatcacggaaatcctacaagccatcaaccagaactggttttgaataactttacaacgcgtttagggaatcgtgttgggagattttttcaatcactcttccctccggatcctaatttccgtggtaggagagttgtaacattccacaaccagcgtgactttatatttttcagacatcaccgttacatatttgagacaaaggaaagcaagagtgataaaggaaaagaagagacaataaaacctcgtcttcaggaatgcggtcctcgattcacgcttaagctagttactctacagcatggaacttttgacaccaaaggtggagaatttgaatgggttcataagcctgaaatggacacgagcaggagaaggttcttcttataaattctgctgtcttccgagtttcaccaagttttgtgtttattttgcattttcgaattttccctacctccgtccaaaattgtatgtctttaaaacttctcatttcttttttcaatatagccatgagccatcgaaacaatcgtaagagtacttgtttcaacaatataggccctcgttttttactaagctatatatagttggttaaactc

SEQ ID NO: 35832 - protein, 364 aa, Arabidopsis thaliana
  peptide (1)..(364): Ceres Seq. ID no. 12379219
  misc_feature (50)..(364): Homolog of NCBI NO: 39597550 NR Description: Hypothetical protein CBG03232 [Caenorhabditis
  misc_feature (50)..(364): Homolog of NCBI NO: 17534031 NR Description: IMP4 family (45.2 kD) [Caenorhabditis elegans]
  misc_feature (100)..(364): Homolog of NCBI NO: 11360239 NR Description: hypothetical protein DKFZp761G0415.1 - human
  misc_feature (58)..(364): Homolog of NCBI NO: 17225079 NR Description: RNA processing factor 1 [Homo sapiens]
  misc_feature (58)..(364): Homolog of NCBI NO: 13376605 NR Description: RNA processing factor 1 [Homo sapiens]
  misc_feature (58)..(364): Homolog of NCBI NO: 33440502 NR Description: Unknown (protein for IMAGE:5694049) [Mus musculus]
  misc_feature (25)..(364): Homolog of NCBI NO: 27371215 NR Description: Similar to RNA processing factor 1 [Xenopus
  misc_feature (22)..(211): Homolog of NCBI NO: 7485389 NR Description: hypothetical protein F11O4.6 - Arabidopsis
  misc_feature (26)..(364): Homolog of NCBI NO: 7485389 NR Description: hypothetical protein F11O4.6 - Arabidopsis
  misc_feature (22)..(364): Homolog of NCBI NO: 18411672 NR Description: expressed protein
SQLCRFHRLKRERLRSPSVVEMGFKRKKDDGDGEEMESDVRGKSTFSGGEKRNVILPSMIKNKDKRSKVYAKQKHEKKLEKQKKIRARDAAEKRALELGEEPPQKMIPKTIENTRESDETVCRPDDEELFADIDADEFNPVLRREIAPKVLLTTCRFNSTRGPALISELLSVIPNSHYQKRGTYDLKKIVEYATKKDFTSLIVVHTNRREPDALLIIGLPNGPTAHFKLSNLVLRKDIKNHGNPTSHQPELVLNNFTTRLGNRVGRFFQSLFPPDPNFRGRRVVTFHNQRDFIFFRHHRYIFETKESKSDKGKEETIKPRLQECGPRFTLKLVTLQHGTFDTKGGEFEWVHKPEMDTSRRRFFL

SEQ ID NO: 35833 - protein, 343 aa, Arabidopsis thaliana
  peptide (1)..(343): Ceres Seq. ID no. 12379220
  misc_feature (29)..(343): Homolog of NCBI NO: 39597550 NR Description: Hypothetical protein CBG03232 [Caenorhabditis
  misc_feature (29)..(343): Homolog of NCBI NO: 17534031 NR Description: IMP4 family (45.2 kD) [Caenorhabditis elegans]
  misc_feature (79)..(343): Homolog of NCBI NO: 11360239 NR Description: hypothetical protein DKFZp761G0415.1 - human
  misc_feature (37)..(343): Homolog of NCBI NO: 17225079 NR Description: RNA processing factor 1 [Homo sapiens]
  misc_feature (37)..(343): Homolog of NCBI NO: 13376605 NR Description: RNA processing factor 1 [Homo sapiens]
  misc_feature (37)..(343): Homolog of NCBI NO: 33440502 NR Description: Unknown (protein for IMAGE:5694049) [Mus musculus]
  misc_feature (4)..(343): Homolog of NCBI NO: 27371215 NR Description: Similar to RNA processing factor 1 [Xenopus
  misc_feature (1)..(190): Homolog of NCBI NO: 7485389 NR Description: hypothetical protein F11O4.6 - Arabidopsis
  misc_feature (5)..(343): Homolog of NCBI NO: 7485389 NR Description: hypothetical protein F11O4.6 - Arabidopsis
  misc_feature (1)..(343): Homolog of NCBI NO: 18411672 NR Description: expressed protein
MGFKRKKDDGDGEEMESDVRGKSTFSGGEKRNVILPSMIKNKDKRSKVYAKQKHEKKLEKQKKIRARDAAEKRALELGEEPPQKMIPKTIENTRESDETVCRPDDEELFADIDADEFNPVLRREIAPKVLLTTCRFNSTRGPALISELLSVIPNSHYQKRGTYDLKKIVEYATKKDFTSLIVVHTNRREPDALLIIGLPNGPTAHFKLSNLVLRKDIKNHGNPTSHQPELVLNNFTTRLGNRVGRFFQSLFPPDPNFRGRRVVTFHNQRDFIFFRHHRYIFETKESKSDKGKEETIKPRLQECGPRFTLKLVTLQHGTFDTKGGEFEWVHKPEMDTSRRRFFL

SEQ ID NO: 35834 - protein, 329 aa, Arabidopsis thaliana
  peptide (1)..(329): Ceres Seq. ID no. 12379221
  misc_feature (15)..(329): Homolog of NCBI NO: 39597550 NR Description: Hypothetical protein CBG03232 [Caenorhabditis
  misc_feature (15)..(329): Homolog of NCBI NO: 17534031 NR Description: IMP4 family (45.2 kD) [Caenorhabditis elegans]
  misc_feature (65)..(329): Homolog of NCBI NO: 11360239 NR Description: hypothetical protein DKFZp761G0415.1 - human
  misc_feature (23)..(329): Homolog of NCBI NO: 17225079 NR Description: RNA processing factor 1 [Homo sapiens]
  misc_feature (23)..(329): Homolog of NCBI NO: 13376605 NR Description: RNA processing factor 1 [Homo sapiens]
  misc_feature (23)..(329): Homolog of NCBI NO: 33440502 NR Description: Unknown (protein for IMAGE:5694049) [Mus musculus]
  misc_feature (1)..(329): Homolog of NCBI NO: 27371215 NR Description: Similar to RNA processing factor 1 [Xenopus
  misc_feature (1)..(176): Homolog of NCBI NO: 7485389 NR Description: hypothetical protein F11O4.6 - Arabidopsis
  misc_feature (1)..(329): Homolog of NCBI NO: 7485389 NR Description: hypothetical protein F11O4.6 - Arabidopsis
  misc_feature (1)..(329): Homolog of NCBI NO: 18411672 NR Description: expressed protein
MESDVRGKSTFSGGEKRNVILPSMIKNKDKRSKVYAKQKHEKKLEKQKKIRARDAAEKRALELGEEPPQKMIPKTIENTRESDETVCRPDDEELFADIDADEFNPVLRREIAPKVLLTTCRFNSTRGPALISELLSVIPNSHYQKRGTYDLKKIVEYATKKDFTSLIVVHTNRREPDALLIIGLPNGPTAHFKLSNLVLRKDIKNHGNPTSHQPELVLNNFTTRLGNRVGRFFQSLFPPDPNFRGRRVVTFHNQRDFIFFRHHRYIFETKESKSDKGKEETIKPRLQECGPRFTLKLVTLQHGTFDTKGGEFEWVHKPEMDTSRRRFFL

SEQ ID NO: 35835 - DNA, 1362 bp, Arabidopsis thaliana
  misc_feature (1)..(1362): Ceres Seq. ID no. 12334496
  misc_feature: MA Experiment ID: 108595 Result: Down-regulated in Transcription
  misc_feature: MA Experiment 108595 PARAMETER Experiment Name: At_Ler-pi_Ovule_cDNA_P Parameter: Plant Line Value: null
aatttcattcgttctttatcaacaacactctctctcttctctatcaacactttctttcatctctcgccggaaaaacccataaccacaacaatggccaccgaaacccaaatccgaatcggagtaatgggttgcgccgatatcgctcgaaaagtctctcgagcaatccacctcgctcccaacgccacaatctccggcgtagcaagccggtctttagaaaaagccaaagcctttgccaccgccaataactacccagaatcaaccaaaatccacggctcttacgaatctcttctcgaagatccagagatcgatgcgctctatgttcctctccccactagtctccacgttgagtgggctattaaagcagctgagaaagggaaacatatccttttggagaagcctgttgctatgaacgtaactgagtttgataagattgttgatgcttgtgaagctaatggtgttcagattatggatggtactatgtgggttcataatcctagaactgctttgcttaaagagtttctttctgattctgaacgttttggtcagcttaaaactgtacagagttgtttctcatttgctggagatgaagattttcttaaaaacgatatccgtgtgaaacctggtcttgacgggcttggtgcgctaggagatgcggggtggtacgcgatcagagcaactcttttagctaataactttgagcttccgaaaactgtgactgctttccccggtgctgtgttgaatgaagcaggattgatactttcctgtggagcatctttgagttgggaagatggacgaactgcaactatatattgttcattcttggctaacttaacaatggagataactgccattggaacgaaaggcacactccgtgtacacgacttcattatcccgtataaggagactgaggcgtcgtttaccacgagcactaaagcttggttcaatgaccttgtgactgcgtgggttagtcccccgagtgagcatacggttaagacagagcttccacaagaggcatgtatggtgagagagtttgctcgattggttggagaaatcaagaacaatggtgcaaagcctgatgggtactggcctagtattagccgaaagacgcagctagtggttgatgctgttaaagagtctgttgataaaaactatcaacagattagtctctctggtcgttgaaggaaaggactcagactataaatgttgtcgtgtgttctctcctctctcgctctctatgttcaaacttcgatcaaccgtttaagtgtttgttaccacttaccaatatgttctgtcttctgctgtgtccgcctgtatgtatgttaattgttttagactccaattactagccttcaattactaagc

SEQ ID NO: 35836 - protein, 392 aa, Arabidopsis thaliana
  peptide (1)..(392): Ceres Seq. ID no. 12334497
  misc_feature (37)..(159): Pfam Name: Oxidoreductase family, NAD-binding Rossmann fold Pfam Description: Oxidoreductase family, NAD-binding Rossmann fold
  misc_feature (38)..(379): Homolog of NCBI NO: 5852136 NR Description: putative oxidoreductase [Leishmania major]
  misc_feature (37)..(299): Homolog of NCBI NO: 15616405 NR Description: oxidoreductase [Bacillus halodurans]
  misc_feature (21)..(376): Homolog of NCBI NO: 17549134 NR Description: CONSERVED HYPOTHETICAL PROTEIN [Ralstonia
  misc_feature (33)..(389): Homolog of NCBI NO: 15218937 NR Description: oxidoreductase, putative; protein id: At1g66130.1
  misc_feature (22)..(345): Homolog of NCBI NO: 37534168 NR Description: putative oxidoreductase [Oryza sativa (japonica
  misc_feature (37)..(380): Homolog of NCBI NO: 7488933 NR Description: protein AX110P - carrot
  misc_feature (31)..(392): Homolog of NCBI NO: 25518452 NR Description: hypothetical protein F23M19.12 [imported] -
  misc_feature (31)..(392): Homolog of NCBI NO: 18399170 NR Description: expressed protein
  misc_feature (55)..(392): Homolog of NCBI NO: 21954073 NR Description: putative AX110P protein [Arabidopsis thaliana]
  misc_feature (31)..(392): Homolog of NCBI NO: 15233990 NR Description: AX110P -like protein
NFIRSLSTTLSLFSINTFFHLSPEKPITTTMATETQIRIGVMGCADIARKVSRAIHLAPNATISGVASRSLEKAKAFATANNYPESTKIHGSYESLLEDPEIDALYVPLPTSLHVEWAIKAAEKGKHILLEKPVAMNVTEFDKIVDACEANGVQIMDGTMWVHNPRTALLKEFLSDSERFGQLKTVQSCFSFAGDEDFLKNDIRVKPGLDGLGALGDAGWYAIRATLLANNFELPKTVTAFPGAVLNEAGLILSCGASLSWEDGRTATIYCSFLANLTMEITAIGTKGTLRVHDFIIPYKETEASFTTSTKAWFNDLVTAWVSPPSEHTVKTELPQEACMVREFARLVGEIKNNGAKPDGYWPSISRKTQLVVDAVKESVDKNYQQISLSGR

SEQ ID NO: 35837 - protein, 362 aa, Arabidopsis thaliana
  peptide (1)..(362): Ceres Seq. ID no. 12334498
  misc_feature (7)..(129): Pfam Name: Oxidoreductase family, NAD-binding Rossmann fold Pfam Description: Oxidoreductase family, NAD-binding Rossmann fold
  misc_feature (8)..(349): Homolog of NCBI NO: 5852136 NR Description: putative oxidoreductase [Leishmania major]
  misc_feature (7)..(269): Homolog of NCBI NO: 15616405 NR Description: oxidoreductase [Bacillus halodurans]
  misc_feature (1)..(346): Homolog of NCBI NO: 17549134 NR Description: CONSERVED HYPOTHETICAL PROTEIN [Ralstonia
  misc_feature (3)..(359): Homolog of NCBI NO: 15218937 NR Description: oxidoreductase, putative; protein id: At1g66130.1
  misc_feature (1)..(315): Homolog of NCBI NO: 37534168 NR Description: putative oxidoreductase [Oryza sativa (japonica
  misc_feature (7)..(350): Homolog of NCBI NO: 7488933 NR Description: protein AX110P - carrot
  misc_feature (1)..(362): Homolog of NCBI NO: 25518452 NR Description: hypothetical protein F23M19.12 [imported] -
  misc_feature (1)..(362): Homolog of NCBI NO: 18399170 NR Description: expressed protein
  misc_feature (25)..(362): Homolog of NCBI NO: 21954073 NR Description: putative AX110P protein [Arabidopsis thaliana]
  misc_feature (1)..(362): Homolog of NCBI NO: 15233990 NR Description: AX110P -like protein
MATETQIRIGVMGCADIARKVSRAIHLAPNATISGVASRSLEKAKAFATANNYPESTKIHGSYESLLEDPEIDALYVPLPTSLHVEWAIKAAEKGKHILLEKPVAMNVTEFDKIVDACEANGVQIMDGTMWVHNPRTALLKEFLSDSERFGQLKTVQSCFSFAGDEDFLKNDIRVKPGLDGLGALGDAGWYAIRATLLANNFELPKTVTAFPGAVLNEAGLILSCGASLSWEDGRTATIYCSFLANLTMEITAIGTKGTLRVHDFIIPYKETEASFTTSTKAWFNDLVTAWVSPPSEHTVKTELPQEACMVREFARLVGEIKNNGAKPDGYWPSISRKTQLVVDAVKESVDKNYQQISLSGR

SEQ ID NO: 35838 - protein, 351 aa, Arabidopsis thaliana
  peptide (1)..(351): Ceres Seq. ID no. 12334499
  misc_feature (1)..(118): Pfam Name: Oxidoreductase family, NAD-binding Rossmann fold Pfam Description: Oxidoreductase family, NAD-binding Rossmann fold
  misc_feature (1)..(338): Homolog of NCBI NO: 5852136 NR Description: putative oxidoreductase [Leishmania major]
  misc_feature (1)..(258): Homolog of NCBI NO: 15616405 NR Description: oxidoreductase [Bacillus halodurans]
  misc_feature (1)..(335): Homolog of NCBI NO: 17549134 NR Description: CONSERVED HYPOTHETICAL PROTEIN [Ralstonia
  misc_feature (1)..(348): Homolog of NCBI NO: 15218937 NR Description: oxidoreductase, putative; protein id: At1g66130.1
  misc_feature (1)..(304): Homolog of NCBI NO: 37534168 NR Description: putative oxidoreductase [Oryza sativa (japonica
  misc_feature (1)..(339): Homolog of NCBI NO: 7488933 NR Description: protein AX110P - carrot
  misc_feature (1)..(351): Homolog of NCBI NO: 25518452 NR Description: hypothetical protein F23M19.12 [imported] -
  misc_feature (1)..(351): Homolog of NCBI NO: 18399170 NR Description: expressed protein
  misc_feature (14)..(351): Homolog of NCBI NO: 21954073 NR Description: putative AX110P protein [Arabidopsis thaliana]
  misc_feature (1)..(351): Homolog of NCBI NO: 15233990 NR Description: AX110P -like protein
MGCADIARKVSRAIHLAPNATISGVASRSLEKAKAFATANNYPESTKIHGSYESLLEDPEIDALYVPLPTSLHVEWAIKAAEKGKHILLEKPVAMNVTEFDKIVDACEANGVQIMDGTMWVHNPRTALLKEFLSDSERFGQLKTVQSCFSFAGDEDFLKNDIRVKPGLDGLGALGDAGWYAIRATLLANNFELPKTVTAFPGAVLNEAGLILSCGASLSWEDGRTATIYCSFLANLTMEITAIGTKGTLRVHDFIIPYKETEASFTTSTKAWFNDLVTAWVSPPSEHTVKTELPQEACMVREFARLVGEIKNNGAKPDGYWPSISRKTQLVVDAVKESVDKNYQQISLSGR

SEQ ID NO: 35839 - DNA, 1486 bp, Arabidopsis thaliana
  misc_feature (1)..(1486): Ceres Seq. ID no. 12335066
  misc_feature: MA Experiment ID: 20000180 Result: Up-regulated in Transcription
  misc_feature: MA Experiment 20000180 PARAMETER Experiment Name: At_Germinating_Seeds_P Parameter: Age (hr) Value: 24 vs. 0
  misc_feature: MA Experiment 20000180 PARAMETER Experiment Name: At_Germinating_Seeds_P Parameter: Tissue Value: Germinating Seeds
  misc_feature: MA Experiment ID: 20000224 Result: Up-regulated in Transcription
atatagggttacatcttccttagcttgaatacaaaagaaaagctcaagtttgtttctcgtttctatggatattcttcttccttatgctagcctctctggtcttcttcttcttcgttcgtttcagcgaatcacatttgatctatgacacatctatacaaggaattagctttcatcatcaagtctctctctctcgaaaactctcctttggtttcgtttgatctgagaaaagaagaaattcaaatattgataactgtggatgggtgcaccaaagcagaagtggacaccggaagaagaagcagctcttaaagctggagttcttaagcatgggactgggaagtggcgtaccatactctcggatactgagtttagtttaatccttaagtctcgctctaatgttgatcttaaggacaaatggagaaatataagcgtgacagctttatggggttcaaggaagaaggctaaacttgcgcttaagaggactccaccaggtactaaacaggatgataacaacacagctcttaccattgtggctttgactaatgatgatgaacgtgcaaaaccaacttcccccggaggttctggtggtggatcaccacgcacttgtgcttctaagagatcaattacaagtttggataagatcatctttgaggcaattaccaacttgagggaactacgcggttctgacagaacatcaatctttctgtatatagaggagaatttcaagactccaccgaatatgaaaaggcatgtcgcagtacgattaaagcatttatcatcgaatggaacattagttaagataaagcacaagtacaggttttcttctaattttattcccgcaggtgcaagacagaaggctcctcaactctttctggaaggaaacaacaagaaagacccaacaaaacccgaggagaacggtgccaacagtctcactaaattccgagtagacggtgaattatatatgataaaaggcatgacagctcaagaagctgcagaggctgcagcaagagcagttgcagaggcagaatttgctatcacagaggctgaacaagcagcaaaagaggcagaaagagcagaagcagaagctgaagctgctcagatatttgcaaaggcagccatgaaagctttgaagttcaggatccgtaatcatccttggtgaaacagaaagaaatagccatcatggggaagttctgtaacaaagcaagccataaaatatatatacttagtgggtttactggtttcttaagagtgccgatcttgaatcaggcgatatctcatcacctgcagagttttttaagtttccaaacctatctgctctctttttttggttagtaacagtgtaaatccgcagtttgatcatatgtatgttctttctccgaatctgagattctgtataactgatcttttattgtatgtggatgatctgtttagtaaccttgaaactattttgaagtgagatgagtaagcaaaaaaattgagattttgttct

SEQ ID NO: 35840 - protein, 299 aa, Arabidopsis thaliana
  peptide (1)..(299): Ceres Seq. ID no. 12335067
  misc_feature (121)..(189): Pfam Name: linker histone H1 and H5 family Pfam Description: linker histone H1 and H5 family
  misc_feature (1)..(296): Homolog of NCBI NO: 33286863 NR Description: Single myb histone 1 [Zea mays subsp. mays]
  misc_feature (1)..(297): Homolog of NCBI NO: 34912214 NR Description: putative telomere repeat binding factor
  misc_feature (1)..(293): Homolog of NCBI NO: 34105723 NR Description: Single myb histone 6 [Zea mays subsp. mays]
  misc_feature (1)..(293): Homolog of NCBI NO: 18481420 NR Description: telomere repeat binding factor 1 [Arabidopsis
  misc_feature (1)..(293): Homolog of NCBI NO: 21593573 NR Description: DNA-binding protein PcMYB1, putative [Arabidopsis
  misc_feature (1)..(293): Homolog of NCBI NO: 25405344 NR Description: hypothetical protein F2J10.16 [imported] -
  misc_feature (1)..(293): Homolog of NCBI NO: 18402853 NR Description: DNA-binding protein PcMYB1, putative
  misc_feature (1)..(296): Homolog of NCBI NO: 15229625 NR Description: MYB -like protein
  misc_feature (1)..(299): Homolog of NCBI NO: 18481426 NR Description: telomere repeat binding factor 2 [Arabidopsis
  misc_feature (1)..(299): Homolog of NCBI NO: 15240783 NR Description: putative protein
MGAPKQKWTPEEEAALKAGVLKHGTGKWRTILSDTEFSLILKSRSNVDLKDKWRNISVTALWGSRKKAKLALKRTPPGTKQDDNNTALTIVALTNDDERAKPTSPGGSGGGSPRTCASKRSITSLDKIIFEAITNLRELRGSDRTSIFLYIEENFKTPPNMKRHVAVRLKHLSSNGTLVKIKHKYRFSSNFIPAGARQKAPQLFLEGNNKKDPTKPEENGANSLTKFRVDGELYMIKGMTAQEAAEAAARAVAEAEFAITEAEQAAKEAERAEAEAEAAQIFAKAAMKALKFRIRNHPW

SEQ ID NO: 35841 - DNA, 1146 bp, Arabidopsis thaliana
  misc_feature (1)..(1146): Ceres Seq. ID no. 13499978
  misc_feature: MA Experiment ID: 108434 Result: Up-regulated in Transcription
  misc_feature: MA Experiment 108434 PARAMETER Experiment Name: At_Root_Tips_cDNA_P Parameter: Tissue Value: Root Tips
  misc_feature: MA Experiment ID: 108464 Result: Down-regulated in Transcription
  misc_feature: MA Experiment 108464 PARAMETER Experiment Name: At_Germinating_Seeds_cDNA_P Parameter: Age (day) Value: 4 vs. 0
  misc_feature: MA Experiment 108464 PARAMETER Experiment Name: At_Germinating_Seeds_cDNA_P Parameter: Tissue Value: Germinating Seeds
  misc_feature: MA Experiment ID: 108573 Result: Up-regulated in Transcription
  misc_feature: MA Experiment 108573 PARAMETER Experiment Name: At_Drought_cDNA_P Parameter: Timepoint (hr) Value: 6
  misc_feature: MA Experiment 108573 PARAMETER Experiment Name: At_Drought_cDNA_P Parameter: Tissue Value: Aerial
  misc_feature: MA Experiment 108573 PARAMETER Experiment Name: At_Drought_cDNA_P Parameter: Treatment Value: Drought vs. No Drought
  misc_feature: MA Experiment ID: 108585 Result: Up-regulated in Transcription
  misc_feature: MA Experiment 108585 PARAMETER Experiment Name: At_5mM_NaNP_cDNA_P Parameter: Timepoint (hr) Value: 6
  misc_feature: MA Experiment 108585 PARAMETER Experiment Name: At_5mM_NaNP_cDNA_P Parameter: Tissue Value: Aerial
  misc_feature: MA Experiment 108585 PARAMETER Experiment Name: At_5mM_NaNP_cDNA_P Parameter: Treatment Value: null
  misc_feature: MA Experiment ID: 20000224 Result: Down-regulated in Transcription
ggggaagaagaaaactctccttctttttgtaacttttgcttcacctctctcttcttctcttgttctattttttttcccgattcaagcaaaattcatcaagacttgtcaatttgaaaaaatgtcgcaatcaaccgtagatgttccgccaaagggtgggtttagcttcgatctgtgtaagagaaatgatatgcttacacaaaagggtcttaaagctccgtcttttttgaagactggaacaaccattgttggtttgattttcaaggatggtgtgatactaggggcagatacccgagcaactgaggggccaattgttgctgataagaactgtgagaagattcactatatggcaccaaacatatattgctgtggtgcaggaactgcggctgatactgaagcagtcactgatatggtcagctcacagctgcgattgcatcgttaccagactggtcgagactctcgggtcattactgctttgacccttctcaaaaaacatcttttcagctaccaaggtcatgtctctgctgctcttgtactcggtggagttgatatcactggtccacatctgcatactatatacccacacggttcaactgacactcttccattcgccacaatgggttcgggttctcttgctgctatgtctgtgtttgaggcaaagtataaagaaggcctaactagggatgaaggaattaagctggtcgctgaatccatatgctcgggtatattcaatgacctgggtagtggtagcaacgtggacatctgcgtgatcacaaaggggaacaaggaatatctcaggaactacatggaaccaaacccaagaacctatgtcagcagcaaaggctattccttcaccaagaaaactgaggttcttctcaccaaaatcaccccattgctggagcgagtcgaaatcacagaagttggtgaagctatggaggaataattcaatcaatctcatatatcttcttttgcattgatctacatcaaggctctgtgtactctcatgatctcatcttcccagtcttgtcttcttcccatgtttaaggatcattcaaatcttgttactcctctctctccatcttagatttcaatagagagggtaagactcgagagacttcgtcctttcgaaataaaaaaacaactttccct

SEQ ID NO: 35842 - protein, 312 aa, Arabidopsis thaliana
  peptide (1)..(312): Ceres Seq. ID no. 13499979
  misc_feature (75)..(256): Pfam Name: Proteasome A-type and B-type Pfam Description: Proteasome A-type and B-type
  misc_feature (41)..(224): Homolog of NCBI NO: 14594921 NR Description: putative beta proteasome subunit [Nicotiana
  misc_feature (49)..(302): Homolog of NCBI NO: 24664391 NR Description: Proteasome beta2 subunit CG3329-PA [Drosophila
  misc_feature (96)..(312): Homolog of NCBI NO: 2511576 NR Description: multicatalytic endopeptidase [Arabidopsis
  misc_feature (40)..(312): Homolog of NCBI NO: 8671504 NR Description: beta 2 subunit of 20S proteasome
  misc_feature (40)..(312): Homolog of NCBI NO: 21593337 NR Description: 20S proteasome beta subunit PBB2 [Arabidopsis
  misc_feature (40)..(312): Homolog of NCBI NO: 20260224 NR Description: 20S proteasome beta subunit PBB2 [Arabidopsis
  misc_feature (40)..(287): Homolog of NCBI NO: 30688785 NR Description: 20S proteasome beta subunit B (PBB1) [Arabidopsis
  misc_feature (40)..(312): Homolog of NCBI NO: 15237451 NR Description: 20S proteasome beta subunit B (PBB2) [Arabidopsis
  misc_feature (40)..(312): Homolog of NCBI NO: 2511578 NR Description: multicatalytic endopeptidase [Arabidopsis
  misc_feature (40)..(312): Homolog of NCBI NO: 18405364 NR Description: 20S proteasome beta subunit B (PBB1) [Arabidopsis
GKKKTLLLFVTFASPLSSSLVLFFFPIQAKFIKTCQFEKMSQSTVDVPPKGGFSFDLCKRNDMLTQKGLKAPSFLKTGTTIVGLIFKDGVILGADTRATEGPIVADKNCEKIHYMAPNIYCCGAGTAADTEAVTDMVSSQLRLHRYQTGRDSRVITALTLLKKHLFSYQGHVSAALVLGGVDITGPHLHTIYPHGSTDTLPFATMGSGSLAAMSVFEAKYKEGLTRDEGIKLVAESICSGIFNDLGSGSNVDICVITKGNKEYLRNYMEPNPRTYVSSKGYSFTKKTEVLLTKITPLLERVEITEVGEAMEE

SEQ ID NO: 35843 - protein, 273 aa, Arabidopsis thaliana
  peptide (1)..(273): Ceres Seq. ID no. 13499980
  misc_feature (36)..(217): Pfam Name: Proteasome A-type and B-type Pfam Description: Proteasome A-type and B-type
  misc_feature (2)..(185): Homolog of NCBI NO: 14594921 NR Description: putative beta proteasome subunit [Nicotiana
  misc_feature (10)..(263): Homolog of NCBI NO: 24664391 NR Description: Proteasome beta2 subunit CG3329-PA [Drosophila
  misc_feature (57)..(273): Homolog of NCBI NO: 2511576 NR Description: multicatalytic endopeptidase [Arabidopsis
  misc_feature (1)..(273): Homolog of NCBI NO: 8671504 NR Description: beta 2 subunit of 20S proteasome
  misc_feature (1)..(273): Homolog of NCBI NO: 21593337 NR Description: 20S proteasome beta subunit PBB2 [Arabidopsis
  misc_feature (1)..(273): Homolog of NCBI NO: 20260224 NR Description: 20S proteasome beta subunit PBB2 [Arabidopsis
  misc_feature (1)..(248): Homolog of NCBI NO: 30688785 NR Description: 20S proteasome beta subunit B (PBB1) [Arabidopsis
  misc_feature (1)..(273): Homolog of NCBI NO: 15237451 NR Description: 20S proteasome beta subunit B (PBB2) [Arabidopsis
  misc_feature (1)..(273): Homolog of NCBI NO: 2511578 NR Description: multicatalytic endopeptidase [Arabidopsis
  misc_feature (1)..(273): Homolog of NCBI NO: 18405364 NR Description: 20S proteasome beta subunit B (PBB1) [Arabidopsis
MSQSTVDVPPKGGFSFDLCKRNDMLTQKGLKAPSFLKTGTTIVGLIFKDGVILGADTRATEGPIVADKNCEKIHYMAPNIYCCGAGTAADTEAVTDMVSSQLRLHRYQTGRDSRVITALTLLKKHLFSYQGHVSAALVLGGVDITGPHLHTIYPHGSTDTLPFATMGSGSLAAMSVFEAKYKEGLTRDEGIKLVAESICSGIFNDLGSGSNVDICVITKGNKEYLRNYMEPNPRTYVSSKGYSFTKKTEVLLTKITPLLERVEITEVGEAMEE

SEQ ID NO: 35844 - protein, 250 aa, Arabidopsis thaliana
  peptide (1)..(250): Ceres Seq. ID no. 13499981
  misc_feature (13)..(194): Pfam Name: Proteasome A-type and B-type Pfam Description: Proteasome A-type and B-type
  misc_feature (1)..(162): Homolog of NCBI NO: 14594921 NR Description: putative beta proteasome subunit [Nicotiana
  misc_feature (1)..(240): Homolog of NCBI NO: 24664391 NR Description: Proteasome beta2 subunit CG3329-PA [Drosophila
  misc_feature (34)..(250): Homolog of NCBI NO: 2511576 NR Description: multicatalytic endopeptidase [Arabidopsis
  misc_feature (1)..(250): Homolog of NCBI NO: 8671504 NR Description: beta 2 subunit of 20S proteasome
  misc_feature (1)..(250): Homolog of NCBI NO: 21593337 NR Description: 20S proteasome beta subunit PBB2 [Arabidopsis
  misc_feature (1)..(250): Homolog of NCBI NO: 20260224 NR Description: 20S proteasome beta subunit PBB2 [Arabidopsis
  misc_feature (1)..(225): Homolog of NCBI NO: 30688785 NR Description: 20S proteasome beta subunit B (PBB1) [Arabidopsis
  misc_feature (1)..(250): Homolog of NCBI NO: 15237451 NR Description: 20S proteasome beta subunit B (PBB2) [Arabidopsis
  misc_feature (1)..(250): Homolog of NCBI NO: 2511578 NR Description: multicatalytic endopeptidase [Arabidopsis
  misc_feature (1)..(250): Homolog of NCBI NO: 18405364 NR Description: 20S proteasome beta subunit B (PBB1) [Arabidopsis
MLTQKGLKAPSFLKTGTTIVGLIFKDGVILGADTRATEGPIVADKNCEKIHYMAPNIYCCGAGTAADTEAVTDMVSSQLRLHRYQTGRDSRVITALTLLKKHLFSYQGHVSAALVLGGVDITGPHLHTIYPHGSTDTLPFATMGSGSLAAMSVFEAKYKEGLTRDEGIKLVAESICSGIFNDLGSGSNVDICVITKGNKEYLRNYMEPNPRTYVSSKGYSFTKKTEVLLTKITPLLERVEITEVGEAMEE

SEQ ID NO: 35845 - DNA, 1230 bp, Arabidopsis thaliana
  misc_feature (1)..(1230): Ceres Seq. ID no. 12488185
  misc_feature: MA Experiment ID: 108433 Result: Down-regulated in Transcription
  misc_feature: MA Experiment 108433 PARAMETER Experiment Name: At_rhl_Mutant2_cDNA_P Parameter: Age (day) Value: 7
  misc_feature: MA Experiment 108433 PARAMETER Experiment Name: At_rhl_Mutant2_cDNA_P Parameter: Organism Value: A. thaliana
  misc_feature: MA Experiment 108433 PARAMETER Experiment Name: At_rhl_Mutant2_cDNA_P Parameter: Plant Line Value: rhl Mutant vs. wt landsburg
  misc_feature: MA Experiment 108433 PARAMETER Experiment Name: At_rhl_Mutant2_cDNA_P Parameter: Tissue Value: Roots
  misc_feature: MA Experiment ID: 108434 Result: Up-regulated in Transcription
  misc_feature: MA Experiment 108434 PARAMETER Experiment Name: At_Root_Tips_cDNA_P Parameter: Tissue Value: Root Tips
  misc_feature: MA Experiment ID: 108462 Result: Down-regulated in Transcription
  misc_feature: MA Experiment 108462 PARAMETER Experiment Name: At_Germinating_Seeds_cDNA_P Parameter: Age (day) Value: 2 vs. 0
  misc_feature: MA Experiment 108462 PARAMETER Experiment Name: At_Germinating_Seeds_cDNA_P Parameter: Tissue Value: Germinating Seeds
  misc_feature: MA Experiment ID: 108463 Result: Down-regulated in Transcription
  misc_feature: MA Experiment 108463 PARAMETER Experiment Name: At_Germinating_Seeds_cDNA_P Parameter: Age (day) Value: 3 vs. 0
  misc_feature: MA Experiment 108463 PARAMETER Experiment Name: At_Germinating_Seeds_cDNA_P Parameter: Tissue Value: Germinating Seeds
  misc_feature: MA Experiment ID: 108489 Result: Up-regulated in Transcription
  misc_feature: MA Experiment ID: 108573 Result: Down-regulated in Transcription
  misc_feature: MA Experiment 108573 PARAMETER Experiment Name: At_Drought_cDNA_P Parameter: Timepoint (hr) Value: 6
  misc_feature: MA Experiment 108573 PARAMETER Experiment Name: At_Drought_cDNA_P Parameter: Tissue Value: Aerial
  misc_feature: MA Experiment 108573 PARAMETER Experiment Name: At_Drought_cDNA_P Parameter: Treatment Value: Drought vs. No Drought
  misc_feature: MA Experiment ID: 20001557 Result: Up-regulated in Transcription
  misc_feature: MA Experiment 20001557 PARAMETER Experiment Name: At_Drought_Soil_Dry_P Parameter: Age (day) Value: 27
  misc_feature: MA Experiment 20001557 PARAMETER Experiment Name: At_Drought_Soil_Dry_P Parameter: Organism Value: A. thaliana
  misc_feature: MA Experiment 20001557 PARAMETER Experiment Name: At_Drought_Soil_Dry_P Parameter: Plant Line Value: WS
  misc_feature: MA Experiment 20001557 PARAMETER Experiment Name: At_Drought_Soil_Dry_P Parameter: Post Timepoint (hr) Value: 3
  misc_feature: MA Experiment 20001557 PARAMETER Experiment Name: At_Drought_Soil_Dry_P Parameter: Post-Treatment Value: Re-Water vs. No Drought
  misc_feature: MA Experiment 20001557 PARAMETER Experiment Name: At_Drought_Soil_Dry_P Parameter: Timepoint (day) Value: 13
  misc_feature: MA Experiment 20001557 PARAMETER Experiment Name: At_Drought_Soil_Dry_P Parameter: Treatment Value: Drought vs. No Drought
  misc_feature: MA Experiment ID: 20001558 Result: Up-regulated in Transcription
  misc_feature: MA Experiment 20001558 PARAMETER Experiment Name: At_Drought_Soil_Dry_P Parameter: Age (day) Value: 27
  misc_feature: MA Experiment 20001558 PARAMETER Experiment Name: At_Drought_Soil_Dry_P Parameter: Organism Value: A. thaliana
  misc_feature: MA Experiment 20001558 PARAMETER Experiment Name: At_Drought_Soil_Dry_P Parameter: Plant Line Value: WS
  misc_feature: MA Experiment 20001558 PARAMETER Experiment Name: At_Drought_Soil_Dry_P Parameter: Post Timepoint (hr) Value: 6
  misc_feature: MA Experiment 20001558 PARAMETER Experiment Name: At_Drought_Soil_Dry_P Parameter: Post-Treatment Value: Re-Water vs. No Drought
  misc_feature: MA Experiment 20001558 PARAMETER Experiment Name: At_Drought_Soil_Dry_P Parameter: Timepoint (day) Value: 13
  misc_feature: MA Experiment 20001558 PARAMETER Experiment Name: At_Drought_Soil_Dry_P Parameter: Treatment Value: Drought vs. No Drought
  misc_feature: MA Experiment ID: 20001560 Result: Up-regulated in Transcription
  misc_feature: MA Experiment 20001560 PARAMETER Experiment Name: At_Drought_Soil_Dry_P Parameter: Age (day) Value: 28
  misc_feature: MA Experiment 20001560 PARAMETER Experiment Name: At_Drought_Soil_Dry_P Parameter: Organism Value: A. thaliana
  misc_feature: MA Experiment 20001560 PARAMETER Experiment Name: At_Drought_Soil_Dry_P Parameter: Plant Line Value: WS
  misc_feature: MA Experiment 20001560 PARAMETER Experiment Name: At_Drought_Soil_Dry_P Parameter: Post Timepoint (hr) Value: None
  misc_feature: MA Experiment 20001560 PARAMETER Experiment Name: At_Drought_Soil_Dry_P Parameter: Post-Treatment Value: None
  misc_feature: MA Experiment 20001560 PARAMETER Experiment Name: At_Drought_Soil_Dry_P Parameter: Timepoint (day) Value: 14
  misc_feature: MA Experiment 20001560 PARAMETER Experiment Name: At_Drought_Soil_Dry_P Parameter: Treatment Value: Drought vs. No Drought
  misc_feature: MA Experiment ID: 20001757 Result: Up-regulated in Transcription
  misc_feature: MA Experiment 20001757 PARAMETER Experiment Name: At_50mM_NH4NO3_L-to-H_P Parameter: Timepoint (hr) Value: 6
  misc_feature: MA Experiment 20001757 PARAMETER Experiment Name: At_50mM_NH4NO3_L-to-H_P Parameter: Tissue Value: Leaf
  misc_feature: MA Experiment 20001757 PARAMETER Experiment Name: At_50mM_NH4NO3_L-to-H_P Parameter: Treatment Value: 50mM NH4NO3 vs 100mM Mannitol
atttttttttcgtcccattttgttctttctactgtcgccgtaaaggatattcaaaagcggtagaggcggcgatggcggatcttttaccacctcttacggcggcacaagtcgatgctaagactaaagtcgatgagaaagtcgattactcgaacctcccttctcctgttccctatgaggaactccaccgtgaagctctcatgtctttaaagtcggacaattttgagggtttacgcttcgactttaccagggcgttgaatcagaagttttctctcagtcatagtgtaatgatggggccaaccgaagttcctgctcagtcacctgaaactactatcaaaattccaacagcccattatgagtttggtgccaattattatgacccaaagttgctgctcatcggaagggtaatgactgatggtagactaaatgcgagactgaaagcagatttaactgataagttagttgtgaaggcgaatgctctgataacaaatgaggaacatatgtcacaagcaatgttcaactttgattacatgggatcagactacagagctcagcttcaacttggacagagtgccctaattggagcaacttatatccagagtgttacaaaccatttatccttgggtggtgaaattttctgggctggtgtgcctcggaagtcgggaataggctatgctgctagatacgagacagataaaatggttgcttctggtcaagttgctagcacgggtgctgttgttatgaactatgttcagaagatttcagataaggtgtcacttgccactgatttcatgtacaactacttttcaagagatgtaacagctagtgtgggttatgactatatgcttagacaggctcgtgtgcggggtaagatcgattcaaacggtgttgcatccgctctccttgaagaaagattgagtatgggactcaattttcttctttctgcagagctggatcataagaagaaggactacaagtttggtttcggattaacagttggttaaaagaccgaataaaaaccggcacacaataagcctggcgcacagagcagattgcagcagtagtggtttcagctgcgaggatttcggttaaaatttattctatttcagtttaggctttttggtgaagttgggaagataaacggtaacgatgttgtgttgttatttgaggtttaggatttgtttccaagaaccattttataaaagaagaagaagcaaatgaggtttttgtttt

SEQ ID NO: 35846 - protein, 332 aa, Arabidopsis thaliana
  peptide (1)..(332): Ceres Seq. ID no. 12488186
  misc_feature (53)..(326): Pfam Name: Eukaryotic porin Pfam Description: Eukaryotic porin
  misc_feature (236)..(332): Homolog of NCBI NO: 34903264 NR Description: unnamed protein product [Oryza sativa (japonica
  misc_feature (241)..(332): Homolog of NCBI NO: 2982293 NR Description: ISP42-like protein [Picea mariana]
  misc_feature (96)..(128): Homolog of NCBI NO: 25405370 NR Description: hypothetical protein F14I3.2 [imported] -
  misc_feature (160)..(329): Homolog of NCBI NO: 25405370 NR Description: hypothetical protein F14I3.2 [imported] -
  misc_feature (24)..(128): Homolog of NCBI NO: 13162531 NR Description: Hypothetical protein [Arabidopsis thaliana]
  misc_feature (160)..(329): Homolog of NCBI NO: 13162531 NR Description: Hypothetical protein [Arabidopsis thaliana]
  misc_feature (24)..(329): Homolog of NCBI NO: 15222963 NR Description: hypothetical protein; protein id: At1g50400.1
  misc_feature (24)..(128): Homolog of NCBI NO: 11994775 NR Description: membrane import protein-like [Arabidopsis
  misc_feature (160)..(332): Homolog of NCBI NO: 11994775 NR Description: membrane import protein-like [Arabidopsis
  misc_feature (24)..(332): Homolog of NCBI NO: 15231008 NR Description: membrane import protein, putative
FFFVPFCSFYCRRKGYSKAVEAAMADLLPPLTAAQVDAKTKVDEKVDYSNLPSPVPYEELHREALMSLKSDNFEGLRFDFTRALNQKFSLSHSVMMGPTEVPAQSPETTIKIPTAHYEFGANYYDPKLLLIGRVMTDGRLNARLKADLTDKLVVKANALITNEEHMSQAMFNFDYMGSDYRAQLQLGQSALIGATYIQSVTNHLSLGGEIFWAGVPRKSGIGYAARYETDKMVASGQVASTGAVVMNYVQKISDKVSLATDFMYNYFSRDVTASVGYDYMLRQARVRGKIDSNGVASALLEERLSMGLNFLLSAELDHKKKDYKFGFGLTVG

SEQ ID NO: 35847 - protein, 309 aa, Arabidopsis thaliana; identical to SEQ ID NO: 24718
  peptide (1)..(309): Ceres Seq. ID no. 12488187
  misc_feature (30)..(303): Pfam Name: Eukaryotic porin Pfam Description: Eukaryotic porin
  misc_feature (213)..(309): Homolog of NCBI NO: 34903264 NR Description: unnamed protein product [Oryza sativa (japonica
  misc_feature (218)..(309): Homolog of NCBI NO: 2982293 NR Description: ISP42-like protein [Picea mariana]
  misc_feature (73)..(105): Homolog of NCBI NO: 25405370 NR Description: hypothetical protein F14I3.2 [imported] -
  misc_feature (137)..(306): Homolog of NCBI NO: 25405370 NR Description: hypothetical protein F14I3.2 [imported] -
  misc_feature (1)..(105): Homolog of NCBI NO: 13162531 NR Description: Hypothetical protein [Arabidopsis thaliana]
  misc_feature (137)..(306): Homolog of NCBI NO: 13162531 NR Description: Hypothetical protein [Arabidopsis thaliana]
  misc_feature (1)..(306): Homolog of NCBI NO: 15222963 NR Description: hypothetical protein; protein id: At1g50400.1
  misc_feature (1)..(105): Homolog of NCBI NO: 11994775 NR Description: membrane import protein-like [Arabidopsis
  misc_feature (137)..(309): Homolog of NCBI NO: 11994775 NR Description: membrane import protein-like [Arabidopsis
  misc_feature (1)..(309): Homolog of NCBI NO: 15231008 NR Description: membrane import protein, putative

SEQ ID NO: 35848 - protein, 267 aa, Arabidopsis thaliana; identical to SEQ ID NO: 24719
  peptide (1)..(267): Ceres Seq. ID no. 12488188
  misc_feature (1)..(261): Pfam Name: Eukaryotic porin Pfam Description: Eukaryotic porin
  misc_feature (171)..(267): Homolog of NCBI NO: 34903264 NR Description: unnamed protein product [Oryza sativa (japonica
  misc_feature (176)..(267): Homolog of NCBI NO: 2982293 NR Description: ISP42-like protein [Picea mariana]
  misc_feature (31)..(63): Homolog of NCBI NO: 25405370 NR Description: hypothetical protein F14I3.2 [imported] -
  misc_feature (95)..(264): Homolog of NCBI NO: 25405370 NR Description: hypothetical protein F14I3.2 [imported] -
  misc_feature (1)..(63): Homolog of NCBI NO: 13162531 NR Description: Hypothetical protein [Arabidopsis thaliana]
  misc_feature (95)..(264): Homolog of NCBI NO: 13162531 NR Description: Hypothetical protein [Arabidopsis thaliana]
  misc_feature (1)..(264): Homolog of NCBI NO: 15222963 NR Description: hypothetical protein; protein id: At1g50400.1
  misc_feature (1)..(63): Homolog of NCBI NO: 11994775 NR Description: membrane import protein-like [Arabidopsis
  misc_feature (95)..(267): Homolog of NCBI NO: 11994775 NR Description: membrane import protein-like [Arabidopsis
  misc_feature (1)..(267): Homolog of NCBI NO: 15231008 NR Description: membrane import protein, putative

SEQ ID NO: 35849 - DNA, 920 bp, Arabidopsis thaliana
  misc_feature (1)..(920): Ceres Seq. ID no. 12334492
  misc_feature: MA Experiment ID: 108463 Result: Up-regulated in Transcription
  misc_feature: MA Experiment 108463 PARAMETER Experiment Name: At_Germinating_Seeds_cDNA_P Parameter: Age (day) Value: 3 vs. 0
  misc_feature: MA Experiment 108463 PARAMETER Experiment Name: At_Germinating_Seeds_cDNA_P Parameter: Tissue Value: Germinating Seeds
  misc_feature: MA Experiment ID: 108577 Result: Down-regulated in Transcription
  misc_feature: MA Experiment 108577 PARAMETER Experiment Name: At_42deg_Heat_cDNA_P Parameter: Temperature (deg C) Value: 42 vs. 22
  misc_feature: MA Experiment 108577 PARAMETER Experiment Name: At_42deg_Heat_cDNA_P Parameter: Timepoint (hr) Value: 6
  misc_feature: MA Experiment 108577 PARAMETER Experiment Name: At_42deg_Heat_cDNA_P Parameter: Tissue Value: Aerial
  misc_feature: MA Experiment ID: 108595 Result: Down-regulated in Transcription
  misc_feature: MA Experiment 108595 PARAMETER Experiment Name: At_Ler-pi_Ovule_cDNA_P Parameter: Plant Line Value: null
  misc_feature: MA Experiment ID: 20000113 Result: Down-regulated in Transcription
  misc_feature: MA Experiment 20000113 PARAMETER Experiment Name: At_42deg_Heat_cDNA_P Parameter: Temperature (deg C) Value: 42 vs. 22
  misc_feature: MA Experiment 20000113 PARAMETER Experiment Name: At_42deg_Heat_cDNA_P Parameter: Timepoint (hr) Value: 8
  misc_feature: MA Experiment 20000113 PARAMETER Experiment Name: At_42deg_Heat_cDNA_P Parameter: Tissue Value: Aerial
  misc_feature: MA Experiment ID: 20000171 Result: Down-regulated in Transcription
  misc_feature: MA Experiment 20000171 PARAMETER Experiment Name: At_42deg_Heat_P Parameter: Age (day) Value: 14
  misc_feature: MA Experiment 20000171 PARAMETER Experiment Name: At_42deg_Heat_P Parameter: Organism Value: A. thaliana
  misc_feature: MA Experiment 20000171 PARAMETER Experiment Name: At_42deg_Heat_P Parameter: Plant Line Value: WS
  misc_feature: MA Experiment 20000171 PARAMETER Experiment Name: At_42deg_Heat_P Parameter: Temperature (deg C) Value: 42 vs. 22
  misc_feature: MA Experiment 20000171 PARAMETER Experiment Name: At_42deg_Heat_P Parameter: Timepoint (hr) Value: 1
  misc_feature: MA Experiment 20000171 PARAMETER Experiment Name: At_42deg_Heat_P Parameter: Tissue Value: Aerial
  misc_feature: MA Experiment ID: 20000173 Result: Down-regulated in Transcription
  misc_feature: MA Experiment 20000173 PARAMETER Experiment Name: At_42deg_Heat_P Parameter: Age (day) Value: 14
  misc_feature: MA Experiment 20000173 PARAMETER Experiment Name: At_42deg_Heat_P Parameter: Organism Value: A. thaliana
  misc_feature: MA Experiment 20000173 PARAMETER Experiment Name: At_42deg_Heat_P Parameter: Plant Line Value: WS
  misc_feature: MA Experiment 20000173 PARAMETER Experiment Name: At_42deg_Heat_P Parameter: Temperature (deg C) Value: 42 vs. 22
  misc_feature: MA Experiment 20000173 PARAMETER Experiment Name: At_42deg_Heat_P Parameter: Timepoint (hr) Value: 6
  misc_feature: MA Experiment 20000173 PARAMETER Experiment Name: At_42deg_Heat_P Parameter: Tissue Value: Aerial
  misc_feature: MA Experiment ID: 20000227 Result: Up-regulated in Transcription
  misc_feature: MA Experiment 20000227 PARAMETER Experiment Name: At_Root-Tips-vs-Tops_P Parameter: Tissue Value: Root Tips vs. Root Tops
actcagagacttgttgtgaagttgaaactctctgaccgtagctttcttatccttcattcaggttcactactatgtacagtctcacattcaaatgaatgagtaccgggatcgtgttgtattgccatctgcttcaaagaaacagggacgaccaatttgcacttgtttgaaaattttggatatgtctggtttaaagctttcagctttaagtcaaattaagttaatgactgctataacaacaatagatgatttgaactatccagagaagacagagacatactatgttgtcaatgtcccgtacatattctctgcttgttggaaaaccataaagcctctgttgcaagagagaacaaagaagaagattcaagttctgaaaggttgcgggaaagatgagttgctaaagataatggactatgagtctctcccacatttctgtagaagagaagggtctggatctggtaggcatatctcaaatggaacagtagacaattgtttctctctggatcactctttccaccaagacctttatgattatgtcaagcagcaggctctggttaaaggatcaggtgcaccgatcagacatggttcagtccacgttaagttccctgagccagacaccgaaggcaacaagatcttcgataccttagaaaatgagttccagaagcttggaaatgaccagaagatctgagtgatctacaacccttataacacgaattgcccataagaaaccggaatttgtctctggttgatgagcagtatttaagataagaatcaatcacctttacttgtattactagtttcgcttgcatcagctcgatgcaggttttgtttaaaaagaagatggaacacaatttcctcggaatggatcttttgatctagtaccattatatatatagaactcatttctatttatgtccttttgc

SEQ ID NO: 35850 - protein, 197 aa, Arabidopsis thaliana
  peptide (1)..(197): Ceres Seq. ID no. 12334493
  misc_feature (7)..(111): Pfam Name: CRAL/TRIO domain Pfam Description: CRAL/TRIO domain
  misc_feature (1)..(197): Homolog of NCBI NO: 25295905 NR Description: protein F14J16.8 [imported] - Arabidopsis
  misc_feature (1)..(197): Homolog of NCBI NO: 15222786 NR Description: polyphosphoinositide binding protein, putative
MNEYRDRVVLPSASKKQGRPICTCLKILDMSGLKLSALSQIKLMTAITTIDDLNYPEKTETYYVVNVPYIFSACWKTIKPLLQERTKKKIQVLKGCGKDELLKIMDYESLPHFCRREGSGSGRHISNGTVDNCFSLDHSFHQDLYDYVKQQALVKGSGAPIRHGSVHVKFPEPDTEGNKIFDTLENEFQKLGNDQKI

SEQ ID NO: 35851 - protein, 168 aa, Arabidopsis thaliana
  peptide (1)..(168): Ceres Seq. ID no. 12334494
  misc_feature (1)..(82): Pfam Name: CRAL/TRIO domain Pfam Description: CRAL/TRIO domain
  misc_feature (1)..(168): Homolog of NCBI NO: 25295905 NR Description: protein F14J16.8 [imported] - Arabidopsis
  misc_feature (1)..(168): Homolog of NCBI NO: 15222786 NR Description: polyphosphoinositide binding protein, putative
MSGLKLSALSQIKLMTAITTIDDLNYPEKTETYYVVNVPYIFSACWKTIKPLLQERTKKKIQVLKGCGKDELLKIMDYESLPHFCRREGSGSGRHISNGTVDNCFSLDHSFHQDLYDYVKQQALVKGSGAPIRHGSVHVKFPEPDTEGNKIFDTLENEFQKLGNDQKI

SEQ ID NO: 35852 - protein, 154 aa, Arabidopsis thaliana
  peptide (1)..(154): Ceres Seq. ID no. 12334495
  misc_feature (1)..(68): Pfam Name: CRAL/TRIO domain Pfam Description: CRAL/TRIO domain
  misc_feature (1)..(154): Homolog of NCBI NO: 25295905 NR Description: protein F14J16.8 [imported] - Arabidopsis
  misc_feature (1)..(154): Homolog of NCBI NO: 15222786 NR Description: polyphosphoinositide binding protein, putative
MTAITTIDDLNYPEKTETYYVVNVPYIFSACWKTIKPLLQERTKKKIQVLKGCGKDELLKIMDYESLPHFCRREGSGSGRHISNGTVDNCFSLDHSFHQDLYDYVKQQALVKGSGAPIRHGSVHVKFPEPDTEGNKIFDTLENEFQKLGNDQKI

SEQ ID NO: 35853 - DNA, 1176 bp, Arabidopsis thaliana
  misc_feature (1)..(1176): Ceres Seq. ID no. 13592325
  misc_feature: MA Experiment ID: 108595 Result: Down-regulated in Transcription
  misc_feature: MA Experiment 108595 PARAMETER Experiment Name: At_Ler-pi_Ovule_cDNA_P Parameter: Plant Line Value: null
  misc_feature: MA Experiment ID: 20000180 Result: Up-regulated in Transcription
  misc_feature: MA Experiment 20000180 PARAMETER Experiment Name: At_Germinating_Seeds_P Parameter: Age (hr) Value: 24 vs. 0
  misc_feature: MA Experiment 20000180 PARAMETER Experiment Name: At_Germinating_Seeds_P Parameter: Tissue Value: Germinating Seeds
  misc_feature: MA Experiment ID: 20000265 Result: Up-regulated in Transcription
  misc_feature: MA Experiment 20000265 PARAMETER Experiment Name: At_Open_Flower_P Parameter: Age (day) Value: 21
  misc_feature: MA Experiment 20000265 PARAMETER Experiment Name: At_Open_Flower_P Parameter: Plant Line Value: WS
  misc_feature: MA Experiment 20000265 PARAMETER Experiment Name: At_Open_Flower_P Parameter: Tissue Value: Closed Flower vs. Whole Plant
  misc_feature: MA Experiment ID: 20000436 Result: Down-regulated in Transcription
  misc_feature: MA Experiment 20000436 PARAMETER Experiment Name: At_Drought_P Parameter: Age (day) Value: 7
  misc_feature: MA Experiment 20000436 PARAMETER Experiment Name: At_Drought_P Parameter: Organism Value: A. thaliana
  misc_feature: MA Experiment 20000436 PARAMETER Experiment Name: At_Drought_P Parameter: Plant Line Value: WS
  misc_feature: MA Experiment 20000436 PARAMETER Experiment Name: At_Drought_P Parameter: Timepoint (hr) Value: 12
  misc_feature: MA Experiment 20000436 PARAMETER Experiment Name: At_Drought_P Parameter: Tissue Value: Whole Plant
  misc_feature: MA Experiment 20000436 PARAMETER Experiment Name: At_Drought_P Parameter: Treatment Value: Drought vs. No Drought
  misc_feature: MA Experiment ID: 20000438 Result: Up-regulated in Transcription
  misc_feature: MA Experiment 20000438 PARAMETER Experiment Name: At_Shoots__P Parameter: Age (day) Value: 14
  misc_feature: MA Experiment 20000438 PARAMETER Experiment Name: At_Shoots__P Parameter: Tissue Value: Shoots vs. Whole Plant
  misc_feature: MA Experiment ID: 20001248 Result: Down-regulated in Transcription
  misc_feature: MA Experiment 20001248 PARAMETER Experiment Name: At_Far-red-induction_P Parameter: Age (day) Value: 7
  misc_feature: MA Experiment 20001248 PARAMETER Experiment Name: At_Far-red-induction_P Parameter: Light Value: Far-red vs. White
  misc_feature: MA Experiment 20001248 PARAMETER Experiment Name: At_Far-red-induction_P Parameter: Organism Value: A. thaliana
  misc_feature: MA Experiment 20001248 PARAMETER Experiment Name: At_Far-red-induction_P Parameter: Plant Line Value: Columbia
  misc_feature: MA Experiment 20001248 PARAMETER Experiment Name: At_Far-red-induction_P Parameter: Timepoint (hr) Value: 4
  misc_feature: MA Experiment 20001248 PARAMETER Experiment Name: At_Far-red-induction_P Parameter: Tissue Value: Whole Plant
  misc_feature: MA Experiment ID: 20001450 Result: Down-regulated in Transcription
  misc_feature: MA Experiment 20001450 PARAMETER Experiment Name: At_Far-red-induction_P Parameter: Age (day) Value: 7
  misc_feature: MA Experiment 20001450 PARAMETER Experiment Name: At_Far-red-induction_P Parameter: Light Value: Far-red vs. White
  misc_feature: MA Experiment 20001450 PARAMETER Experiment Name: At_Far-red-induction_P Parameter: Organism Value: A. thaliana
  misc_feature: MA Experiment 20001450 PARAMETER Experiment Name: At_Far-red-induction_P Parameter: Plant Line Value: Columbia
  misc_feature: MA Experiment 20001450 PARAMETER Experiment Name: At_Far-red-induction_P Parameter: Timepoint (hr) Value: 8
  misc_feature: MA Experiment 20001450 PARAMETER Experiment Name: At_Far-red-induction_P Parameter: Tissue Value: Whole Plant
gaccatttcttttccatgactttcctcttatcaagaacatttatttctctcactctcagaccttcttgttcgatttccatggcgaatttaacgacgaacgctaaatctcgcctgagaggtgttgtattcgatatggacggaaccctgactgttccggtcatcgatttcgccgcaatgtatagagctgttcttggtgaagatgcttacaagcgaatcaaagcagagagccctagtgggattgatattctgcatcatattgagtcgtggagtcctgataaacagcagaaggcgtatgaaatcattgctgattatgagaaacaaggaatagataagcttcaaatcatgcctggtactgctgaactatgtggcttccttgattccaaaaagataaagagggggctaattacacgcaatgttcaaaaggcaatcgacatcttccatcaacgttttgaggttatcttttctccagcactaggcagagagtttcgtccatataaaccaaacccagacccgctgttgcatatatgttctacatgggacatccaacctaatgaagtcatgatggttggtgacagcttaaaagatgatgtgagtgacagacatgatgacaagcctttggtcaaccctttctccatagcaaatcgataagcaatgcaatgaaagaagcttaaacaatggatcttctcatgccattgcttaaagattttctatgtggaaaggatgcctaccaacttttcagactatttttctcacatctttactgaagattacaactgggaatcgatctttcttttctcgattctgcagatagcatgtgggaaacgagctggagccttcacttgcttgctagatgaaaccggaaggtatggaccagacgatttttctgtttccggtctgcaacctgattttaaggttgattccttgtccaaaatccagaacctattggagacgaacttcgacctgaacccgtagtttttccaagttcctcatcttgtagtttcagtgaccaaattagtgtcctactcaacacagtatctgttcaggatagccataaatgtcaaaccacggaattctatgcactggctatctttaagttgcacaattgtgtccctgcatggtcgtctagcgaacatgtgtgtgagggcaaacattgttgtttgttaaatccaaaatttc
